United States Patent Application Publication US 2008/0114160 A1 - sequence listing, part 52

SEQ ID NO: 16208 - DNA, 10523 bp, Oryza sativa
ccaaagatcagaacatcttccaggtataaacctctcggtaccattttattccggcatgcttctctcatagaaattacgctgaatattgaaaggacactttgcaggaaaccgtccgatatagatccaactggaaaagatcctgatccggctgccacagagtcaaatttatccaaagatgctgagccgactgccgaaagccagccgactgccgaaagtcagccgactggtgcccatgcttcggatgacaaggccaatccgagtgaccagccgccgactggaaaccagtcggcagctactgaaactgcaacaacccaagagcccccgactggaaaccagtcggatgtaggtctaaatcaagagattcctgaagctgaagcgcaggcgacaacttctcaaggaccagaggctggtaatgactcagtgattgggtctccggataaagagcagggatcacctcacgctcagctaggcacatcctcaggtaactcatcttctcaagtgatgccgttctgaataactccagcttactcgtctaatgtcttgggaatacatcaggtccactaggcggcgacgaagaagaaattctccgcataaaggcagctgatgactctcgtcctcctatcttactcaaatggtgggacgagaactctcaagtttccggcattgtcataaatcgccaaaaagaagatgaggaagtgtgccagctgaagaaagtacttggagaagctactcgcattgtgaatgtaagtcttctaggtgactgcctttgatgactttgttttctcgttagcaaaactaatccatgaaccaccgtgcagagaatccatcttcgcaatgaggccaagaccacaaccttagaaaagctggttcctcatttgggaactcttgaagctgttaggagccagctacacgaggccaaggagcatgccaagaaaacggagaaggaattaagggaacgaattgctcagctccaggattcaaactacgagctgagtggttcatcaaaaggtaatctctagatctgtcccatttatgctgtcataactggatcctcaaacattcggatttcaaacagcgcaagccaccaggatggctcaaatggagaagcaaattgaagctttgagaaaagacaaagcagaactagctgcagaaagggactcggccttgaaggaggttgaaggtactgccagctgacaatctgaactttcctctttttaatgtagcagattcttattgtaaatgtgttttgtagaccgtaaaatcaaatctcaagctcagtttgacgtcctggttgataaaatcaagaggcttaaaggagcaagagatgaagttgccaatgtcgctacaccacttgtccaagctatgttcctcaataacagtggtccgagtgcacttgacgcaaccgaaatctttgacaagctgagagttgcaccggatgtatatttcaagaacatcaagaaagctggaagtatgggagctagcatggcattggcgatgaccaaatccttgtacccgagaattgaaatcgacaccattgatggatttgcagacgggacaagcgaagaggctgctcttgatcttatcagcaatgctcaaaatgcggctgataagattgcaagtgacgttgtagagcaattccgcaacaacgaccttcagccgagcaacaataactctgatgatgaaaggactgactctgactgagtatgaatgtaacaaatggaggctcaatttgtacaatactggtgtatttatgctgtgcttgatagttctagccaaatctttgatttcttaaaagcttttatcaagctttgttgagcctaaaacccaaagaagctataaaaaactttcagtcctcgcagactaagtagaaaaatcgaacaaggcaatgataaaccaagtaagcaaattgaattgataaaaaatcacactccattattataataatagcccccgactgacaacttcaagaagaaaacttgatgttgacagtcaagatagggaagtacaatgataaacttaagcgtagaaacgacgaagatgttcaatgttccaagagttgtcgacgagagtaccatcttctcgcttgagtcgataggaacctggccgggtgacttcagagatgataaatggcccctcccataaaggagataacttgtgccgatcccgtgtagtttgaattttcctcaaaaccaggtcgccgactaaaaaggcacgggatcgaacattgcgattatgataacgccgcaacccttgtaagtatcgagccgaccgaatcaaagctgcttcacggacttcttccaatcggtgcaagtcatccactcggtcctcttcgtagcgttcttcacggaaatttcgaaagcgcaaagattcgaattcaacttcactcggcaacattgcttctgccccgtagacaaggaaaaaaggtgactggcctgtggcccgactgggtgtagttcgcaaagaccaaagcaccgatggcagctgttgcacccatttgccggcatagggttttagccggtcaaagacacgcgctttaatcccttgaagtatcatgccattggctcgctccacctgtccattgctcatggggtgtgccaccgaggcatagcaaatcttaattccaaagtcttcacaaaagtctttaaaaactccgccagtgaattgtgtgccattatcagtgatgatccgattgggcactccaaatctatgcacaatgttgatgaagaagtctcgagcattatctgctgtgattgtgacaaccggtttagcttcaatccacttggaaaatttatcaatggccacaaagagatgcgtgtaaccgccgactgcctttttaaacgggccaaccatgtcgagcccccaaaccgcaaacggccaagacagcgggatagtttgcaactcttgagctggtaaatgaatttgtctggcgaaaaattggcaaccttcgcacgtgcgcacaattttgtcggcgtcggacactgcagtaggccaaaaaaaaccctgccggtaagctttgccgacaatggtgcgtgcagcagcatggtttccgcatatcccagaatgtatgtctttcagcaattgtctcccttcctctaaagatacgcaacgttgcagaactcctgaagggcttttcttgtataactcagcttcatgcataacataaagtttgctccgccttgaaatccgctcggcttcatctttgtcttgagggagttcttgagaagtcaaaaatcgtatgaggggctctcgccagtcggcttcaatcatagctacgtcatgagtgcccgcaatttgagcagtatctttgtgaggtaccgtcggcgtataaaggtgttcgacgaaaacatcggaaggcgccacctcgcgcttggatccaaagttggcaagtctgtcggcggcttcattattgtgtcgaagaacatgacttagttcgagtccatcgaacttgtcttccaatttgcgtacctcttgtcgatatgccatcatattgtcatcaaggcaggaccactctttcataacctggttgactaccagctgtgaatcgcctctaactattagacgctttatccctagggaaattgcaatccgcagcccatgaaggagggcctcatactcggcgacgttgtgggacgccgaaaaatgtatccaaagtacatagcttaatctttctccagttggtgaaattagaaccactcctgctccagtgcccgaaagtctttttgacccgtcaaaatgcatggtccagtgctccatcttctccgcgggggtatcctcttggcactcggtccattcggcgacaaaatcagctaacgcttgggacttgattgaaattcggggcttgaatgatatgtccaaagacatcaactccaaagcccactttgcaatccgtccgtttgcttcgcggttgtgcagtatatcaccgagtggaaatgatgtgaccaccgttaccgggtgaccttgaaagtagtgagatagcttcctggtagtgattaaaataccatataacagcttctgaacctgagggtacctcgttttggagtcggctaggacctcgctgacaaaataaatcggtcgctggactttctggacatggccttcttcctcacgctcaacgaccaagacagtgctcacaacctgggaggtggctgatacatacagcaacaacggctcctgcaggtgtggtgaggctaggaccggtggctcggtgaggagtttcttgaaatcttcgaaggccttctgtgcttcaggtccccactggaaatcatctgttttctttagtagcttaaagaagggcatcccccgttcgccaagtcttgaaacaaatcggctgagcgccgccatgcatccagtcagcttctgaacatctttctgggtacttggcggtttcatgttgaggatagcagtaactttctccgggttggcttggatgcctctatgagacaccataaaaccaagcagcttccctgacggtactccgaatgtgcacttttcagggtttaatttcatcctgaaagcacggatgctcgcgaaggtttcttccagatccgagatcaaatcatccttttgcttggtcttgacgactacatcatccacataagcttcaacgttacggccaatctgcgttgagaagcatctctggatcatacgttgataagttgctcctgcgtttttcagtccaaatggcatggtgacgtagcagtatgccccgaagggcgtgatgaatgaagtcttcaagcagtcggattccttcagtcggatctgatgataccccgagtagcaatccaaaaaactgagaagctcacagccggcggtcgagtcgactacctggtcaatgcgaggcaacccaaaaggatctttagggcaggatttgttgaggtcagtgtaatcaacacacatgcgccattgccctgttttcttccgaactagaactgggtttgctagccagtcgggatgaaggacttctttaatgaagcctgctgctaacagcttggttaattcctccttgatcgcgtccttcctgtcttgtgcgaatcggcggagtcgttgtttgataggcttggcgtcttctttgacatgtaatgagtgctcaatcacctctctaggaataccgggcatatcagatggtttccacgcaaagatatctttattgttctgaagaaaggtgatgagcgcactttcctatttacaatctaactcggcgcctattacagcagttttagcaggatcagagggatctaggggaatcttcttagtcttagcttcgctttctccacttttagaagtcttggtagcaggtatttctccttcgctcgccgtggctgcagccagtcggatatcctctcgggcagacgccatctcgcgggtttgggccatgtcgcaactctccttgtcgcatgtgacagcttgcttgatgtcactccgtagggataggactcctcggggaccaggcatcttcatcatcatgtaagtgtagtgcgggacggccatgaacttggctaatgccgggcgtccgagtatggcatggtatgctgtctcgaaatcggcgacttcaaagctgatattctctgtgcgaaagttttcccgagtgccaaaagtgaccgggagggtgatctggccgagtggagttgcggataatcctggaattacgccgtgaaaaggcgcattgcttggttttaactcggagcgaggaatctgcatatcatccaaggtcttggcgaaaaggatattgagtgcactgccaccgtcgatgagggttctgcgaagcttgacattacggaccactgggtctagtaccagggggtaccgccccgggtggaccactcggtcaggatgatccgagcggtcaaacttgattgcaatctctgaccatcgaagatattggggcgtgtcgggctgaacggcattgatctcccgttcggtcaacttttgcttccgtttagactcataagccagggggccgccgaagatatggttgagctccttgcggtggtcttgaaaacctgccggggtgtcgccgtcgtccttcttcctcgacgtgctttgttcttcatcggagttcttccgtgtagtcttggtgtattgatccgcgaactgcttgtagacgaaacaatctttggccacgtggttggagttaggatggtgcgggcattgggagttcatgatcttgtcaaacgtgttgacgcgcgaatgctgtcgagaagagtgactggcggttgcaacaagttccgcaggcttacgcttgcggtccttatgattgttacttccacctcctcccgaagccggcgtatccttttttggcttccaactgggacccgactgctttgacgcggtgacggcgtcttcagctttggcgtactcgttggctttttcaaacatgagcttgactgtcctgggaggcttacgcccgaatttgccaaccaattcttcgtggcgaatccctttggtgaatgcggcgatgatgacgtcgtcggtgatgtcggagatcttgttacgctgttcagaaaatcgccggatgtaatctcgaagggattctccggacttctgaatgacgttgtagaggtcgtattgtgtgccgggacgctcgaaggtgccttgaaagttggcgatgaagtggtcacgtaactcggcccaagatccgattgtaccacggggcaatccatggagccaagatcgggcggaatccgctaaagccactggtaaatagttcgccatggccttgctgtctcctcctgctgcgcggattgcgagaccgtagacggtaagccacgattctgggttagtggtaccatcatacttctctattccagtcggcttgaagccggctggccaatccactcgacgcaggtcgtcggtgaaggctgctactccgtcaaggtcgtcgtcgtggcggtccggcgagtgatgatagcctcgagctgctcggcgctgtatgattgtgtcgcgaagatcgacggggcggcgacgaggtggtgagcgaggccgttccactcggcgctccctatggtgatcgggaggtgagtgaacagaccgctcgtcgtggcccctgctcctgcgattggatcctgcgccggtgatgctgaggcttggatgacggtagtcatgagatcggaagtgggggactcggctgccagtcggcgtatggacgctttcggagttaactgggaccgaagccgcaatcatagtcttcgtctggttcaagatgttgacgacgtgatcggattgattgagctcgttttccctgagtagggtgtcgaggagggtgatcgcggcaaccgcattctgttgaggggtgcgaaaaaccggcgtcccttcaacatcttgctggccgatgagatcacgcgcccggcgccctgcttccaaagctcgctgccgtcgatcctcagcctccttcgcggtccgctcacgctcctgctgctcatgccgtaaccgttcttgttcttgtgcttgatgctcctcttccagtcggcggcgctcagtctcgcgacgcgcttcggtctcccgggcttggcgttgctcctccgtctcgttattggccatgaagacgccaaagtagagaggggtgtagttgtcatctaggcttccgtcgaagtcgtcgagatccgggtcgtggtagcgagagctaaactcgtcgtactccacgatgtcggtggggcgcgagtcgacggtgggagagctgtagtcgccatctagctgatccgtctaaaccgtgccgagtggttggaggatgacgccaacttccctgaagctaggcgaaatcggtattgaagccgacttccgcctaggcctacgggaaagagacgctgtcgtgatggagacggccgtcaaatcgtcggggagcttcatcaggatcggtgggtaagccccatcatcttgatctggtgacgttggtgaaggtgcgatctcgcccgagtggtttgaagccgactcggtcgagatggtcttgaagtaactttcagccgcgtttgggagtccaaacggggccgaaatctggttctctcccgactggtccgactccgagtcaaggagagagatcttgccgaagttgctggtgacgaagtcgaggctgccgaaccgaaacgtctgcccgggtgggaagacgaggtcgtcgatgccggagatggaacccattgcactgatcggcgaaaagcttgacgctacccctacctggcgcgccaactgtcgaaactagatttcggcaataataaaagggggtggctatcaagctggaaaagtgtatgggtttggagacaaaggatttatacaggttcaggccttcttataaaagaagtaataccctactcctgtccggggatgaatccgccgagtgtattattgattgtatgatttgggaaaatcaacatatgcccctagaggcacccggaccccccttatatatggggaggagtccgtgttacaaaagataatctatatccctaacggaatatgcagatacagataaaatacagtcgtaaccgactaagtcccagggtatttccttgatgcacaagttgagaaacaaacccgagatacacataaaatattctatctatattcggtatcctatattcagcccaaatatcatcgccgtgtagatatgggatatccataatctccacagagagagagagagtttccaagcaaatttgatggcacatatccacgaattgtgattttcaatagtttgcattataaacgcttcatcttgtcctgcctccttttttccttaaatttatttacatggtgtgggaggcagtatttcctaaacacttataagtaggactcactaaattgaagaaaaaacaagtagctctaccttgcttatgatggtccttcatattgcagcacatcttccatgggtctgtagcagctcatcctgctcaaggttgactatgagttttggtcagtgaaggggatacaattagtaatggaattagaacacaggtaacactcgagttaattagtgttttgcttgcagtttcaatgcttacactacaatttcattctctgcaattacattcacattttaagctttggttttcttctctactcccaatcaccgaacttgtttttttaatgaaaacacaacttggtatttgcaagttttctatctgttttttgcaacaggaaaactgttacatgttctagacaaaaatatcatttttaagaactgtaacaactaacaagcttatggatgaactttgacaggttccttgacgaaatttgaagatgtaacctgccacccatgattcgcagccatcgcccgttatggacttgccaagtttctggtggtgcccattgttgatgaaattactgattgcctgaagtactcaagtttcatgagtataacaaagattacagcttgggtatctgtaaagtggttatgttgagataaaaggacaataatgtgagatttctgtttacatctcaaatgttccctttaatttttttatgctactttctaacttcgcctttcagtttaaatttcataatatgcattgtttcttatatccaggattgaatcttctagcctctacaaaactgaattgaggttctgcatatttctccaaaataaaacaagtatgaatgtgctaggcttgcttgtttgattcatgcattataaatcttttcattgagaatactagcatttaaagtcaaggatatatgtgaaaatctcagtagcgtttgattaaatttacattttatgcaaataacaaccaacttgacatcaccttctccaagcatgagggaatgacgtagttttacgtgcaacctgcatctatacgattgatcccttgtggtgatactatgcctgtccatcactacagtttttctctagttctgttacaacttaaaacaagctgtattgttctatgtgatatgattctcttcttgtgcttattcactgttgccctgctagaagcaatttctatgcttactggttacttgatattggaattaggaataagtccacttggactccctcggatatatgtataatctgatttgtatctctcaaccgtaataccggatatcttaacccctcaactatgaaaaccagcgcaatttaactcccttggttgttaaacgaggaatttaacgcggtcgacgaggccggtgccaatgccatgtcccccgctctcatctcctctgctccatcgcatgaaaggacgctcagaggacgagggagtggggcggtgggcagcaacacgatgaagcagaggggtggcggggagatctctagctccccaatgccttcgccggccaggccacaccaaccccgtcgcgtcaccgccgccaatgaactccatcatcaatcaggggatcatcctcaacgccgtcgctagagggcgggcctacccgctatcggtgccatccttcgggtccccaggtcatcaccaacacgccgccgtaaagatcccgcctcgacctcaccttaggcacgacaccaccctggatccagcccctacgataggccgacgctttctcgtgagctcgcagcattcctctcccttcactgctgccgc

SEQ ID NO: 16209 - DNA, 23020 bp, Oryza sativa
  unsure (1)..(23020): unsure at all n locations
ccatcgggcagcctgtccctttgtgtccaccgtcgcagtagccacaagcgacgccctcgctgtcggaccctcgccgccgaacgccgccgtcaccgaggcggaaggggttgagaaccctcggccttcacccgcgccgcactcttgtccttgtcattgtcccaacggctgtgatgtcagctaccatgcaccaagtaaaagaaaggaggagagagagggatagaggttattagagggaggggatggacatgtggggccaactttttttttaatttagttgatgactgggctgccacatagacatcacgtcagcgaaaatcactcttaaaacagccaagagagtctttttacatagtttttatatttttttttgggggggtggttgtcaaatctgtttatacgatttagggatacgaattagattcaacatatattaaggaagtgaaattggactttttccctcgaattatatacacatgtttgtctcaagtcgtgtagatgcccacatgtacaaaacagcccatttataaaggcccacagagaaagcacacaaagctagcccaaacaaaagccccaaatcatgatccattaacccgttagcaaatgtgataggcctactagatgatgcactagccagttagcaaaataggaataaatctattttgcctctccaacttatttctttggttgaatcgcatcccttaaccacaaaatcgggtataacccgtcccccaacccctaaaactattgcaaattgactccttggatggtttcggaagtggttttgtcccacgtggcatctttgaccctgttgactagctgagtcagcttgtggaacccactgccagtgctcaccgtcgtcgcacgcgttccccacgcgttgccttcgccgcctctaccgcatcgcctacaatccaccaccatcgtgtttccccctccaatccgccaccactgtcgccagccgatgccccctcctcccccatcgccgtcgcccatggggagaggagtcgtcggccgaccgcaaattggggagagaactcgccggtcagcctcgcacggggaggatctcgccaggaggccgcacaccgagcgaggagctcaccggcctaccgtccacaggaggaggagctcaacgggaaaccgcgcgtgggggaggagctcgccgggaagctatgcgcgggggagaatcaaccggcggacaacacacggggagaggagcttgtcggctgctactgttgctgcttccacacggccacaggcgcctcctgctgcttggaccgctgccgccgccgcaacctcctatcccgctgtagcagccacatgctacttccacttcgactccgttgcagcagcctcctctctcacgccgccgcagtcgctgcctacagctgttgctgcttccacgatgccaccgccgccatctccgcaacctactctccttccctccctcgtcgtcgccgccaccctctcataccaccgcagccctcacggcctctgttgttgctggaatgtgtgtgtgagagagaggataaatgaagattaattaaagggaagagagatgggaggtgaaaaaaatggtgatatgaggtggaagtcgctgacatgtgggtcccactcccacctgccaactcagtcagtcaaccgtggtctagcagccatgtcagcagcaatcgcttgccaaatgctgaaggagtaagttgcactagtttttgaggatgagggatgcgtatacccagttttgtgggtgagggaggtgattcaatcgaaagaagagatgagggaggtaaaatagacttattctagcaaaataggactggaaattttgaaactttcagtcctgggcctgttacatgatccaataatccattacaaaatgtaactgatttttttttcttgcataattacatgcatgtctcctatattgattgcattagaatctaatggattttctttttcctcttctgttttaaaatagacactaaacaatgcagtcaataatttgcattttttcttatatccacctatgaaatacacaaaatacatgcaaaatcatcatacttgctgaccatcaatgaatcgattggattaaccaaccaaagttggtcttactcattatgcccttaaacatgccgggctttgttgttggccacaatttttttaatctaactgggccccaaatatgctgcattttctcacttgcaatctactaaaaataaagataaaacctcaagaagacttgtcaccagccaagatttaagggtagtgatcttggctgggtttgcttggctgcatgcaagaattatagcagtctctgaatgacccagaaacatttaccgttgtggagattatggataccccatacctacacggcatgtatagtctgactgggtatggggtgccatgtatagatataatatccttaaaaggactcgggttaaattccaaacttgtacgtcaaaggaaatacctgggatcctagtcggttacgattgtatctcatctgtaactacctattccgttagggatatggattatgctttgtaatgcggacccattcccctatataaggaggggtccgggtgcctctagaggcacgattttcacccaaatcatatgatcaataatacactcggcggatcaatccccggacaggagtagggtattacttcttgattaagaaggcctgaacctgtataaaattccttgtctttcaacccatccatttttccagcttgatagccacccccttttagtattgccgaaatcttgtttcgacagttggcgcgccaggtaggggaagcgtcaagttcttcgccgactactgcgatgggtttcgtttccggcatcgacgacttcgtcttccctcccgggcaggcgttccggttcggtagcctcgacttcatcaccaacgacctcggcaagatttttctcctcgactcgaattcgaaccagtcaggaagaggccagatctccgccccgttcggtatcccgaactcggccgagatctaccccaagaccatctcaaccgagttggcctcaaaccactcggacgagatccaatctactacaacacgacctgatcaagatgatggagcttatccgccaatcctgatgaaactccccgatgatttggctgtcgtcttcaccacaagggcgtcttctccccataggtctaggcgggatctggcctcggccccgatccagcctagctccaggaaagtcggcgtcatgctccagcctctcggcatggtttcgacataacaactggatggctacctcagctcccccggcgtcgactcatggcatacgaagatcattgagtacgacgacttcggctacctctacgactaccgcaacctcgacgacttcgacgaagactttgaagataactacacgcctctctacttcagcatcttcatggccgacaacgagacggaagaacagcgtaaagcccgagaagccgaagaacagcgcgtgcgacaggaagccgaacgacgccgattggaagaggagcgccaagcacaagaacgagaacggctgcagcgtgagcaacaggagcacgaacgggctgcaaagaaggctgaagaccagcgacagcgcgccttggatgccgggcgacgagcacgagaacttatcaggcagcaagacgtcgagggaacggcggtttttcgcacccctcaacagaacgcggttgcagcgatcaccctcctcgacaccctccttaaggaagacgcactcaatcaagccaatcacgtcgtcaacatcttgaaccagaccaagaccatgatcgcagcttcggtcccgattaactccgcaagcgtccacacgccgactggcagccgagtcccccctcttcaatctcaagactatcaccaaccgagcctcagcgtcgttggtgccggatccagtcgcaggagaagggaccacgacgagcgctccgtccacttacctcctgaccgacgcagggagcgtcgagctgaacgtccccgctccccgcatcgcaggcatcccatcgatcttcgcgaaactataaaccagcgccgcgcggcgagaggctacatcccccaccattcaccatatcgctatgacgacgacgtggatggagttgctgccttcacaagcgacctgcatcgagtggattggccggccggcttcaagccgactagaatcgagaagtatgatggcaccactaaccctgagtcttggctcactgtctacggtcttgcaattcgcgcagcaggaggagacaacaaagctatggcaaactatctacccgtagcactagcggattctgcccggtcctggctcctcgggctaccccgtggcacaatcggatcttgggcggaacttcgcgaccacttcatcgccaatttccagggcacctttgaacgccctggcactcagttcgatctctacaatgttgtctagaagtctggagaatcccttcgagattacatccgacgtttttccgagcaacgcaataagatctccaacatcaccgacgacgtcatcatcgccgccttcaccaagggcatccgccacgagctcttagtcggcaagtttggacgcaagcctcccaggacggtcaagcagatgttcgaaaaagccaatgagtatgcaaaagccgaagatgccatcaccgcatccaagcagtcgggcaccacttggaagccgaagaaagatatgccgactatagggggggagtggaagtaccaatcacaaggatcgcaagtgtaagcccgaggaacttgtggcaaccactacaccatcctcccgacaacgttcgcgcgtcaatacctttgacaagatcatgaattcccaatgtccgcatcatccaaattccaatcacgcggccaaagattgcttcgtctacaaacagtttgcagaacaatacgctaagaacgcacgcaagaccactgatggagatcaaagcacgtcaaagaagaaggatgatgaagatgatgccccgactagttttgaagaccatcgcaaggaactcaaccacatctttggcggaccactagcctatgaatccaagagaaagcaaaagctgaccgaacgggagatcaatgctgtccagcccgacacacctcaatatcttcggtggtcagagacaacaatcaagttcgaccgctgggatcatcccgaccgagtggtccacccggggcggtaccccctagtactagacccagtggttcgcaacgtcaagctttgcagatctctcatcgatgatggcaatgcactcaatatccttttcgccaagactctggacgacatgcagatccctcgcacggaattaaagccaagtaatgcgccctttcacggagtcatccccgggctatctgctacaccactcggccagatcactcttccggttactttcggcactcgggagaacttccgcacagaaaacgtctgtttcgaagttgctgatttcgagacagcgtatcatgccatactcggacgcccagcgttagccatgttcatggctgtcccccactatacctacatgatgatgaagatgccaggtcctcgaggagtcatatccctgcggagcgacatcaagcaagccgttacttgtgacaaggaaagctgcgagatggcccagacccgcgagatcacgctcgcccgagaggaaatccgactggctgcatctacagcaaccgaaggagaagtgtctgcaaccaagatgtcgaaaagcggagaaggcgatgccaagaccaagaaaatccctctagatccctctgatcccactaagactgctgtaataggcgctgagttagattgtaaataggaaagcgcgctcatcacctttcttcaaaataataaagatatctttgcgtggaaaccatctgatatgcctggtattcctagagaggtgattgagcactctttacatgttaaggaagacgctaaacccatcaaacaacgactccgccgttttgcacaggatagaaaagattcgatcaaagaggaattgaccaagctgttagcagcaggcttcattaaggaagtcctacatcccgactggctggctaacccagtcctggttcggaagaagacggggcaatggcgtatgtgtgttgattacacagacctcaacaaatcttgtcccaaagatcccttcgggttacctcgcattgaccaggtggttgactcaatagtcggctgcgagttactcagttttttggattgctactcaggatatcatcagatccgactaaaggaatccgactgcttgaagacttcattcatcacacccttcggggcctattgctacatcaccatgccttttggattgaagaacgtatgagcaacttatcaatgtatgatccagagatgcttttcaactctgattggtcgcaacgttgaagcctatattgatgatgtggttgtcaagaccaagcagaaggatgatttgatcgcgtatctagaagagacctttgcgagcatctgcgccttcaggatgaaattaaaccctgaaaagtgcatcttcggagtaccgtcagggaagctgcttggctttatggtatcccataggggcatacaggccaacccggagaaaatcaacgccatcctcaacatgaaaccgccgagctcccagaaagatgttcaaaagttaactggatgcatggcggcgctaagccggttcgtctcatgactcggcgagcgggggatgccctttttcaagctgctaaagaaaaccgacaatttccagtggggacccgaagcacaaaaagcctttgaagacttcaagaaacttctcactactccaccggtcttaacttcgccacatccgcaagagctgctgttgttatatgtgtcggcaacttcccaggttgtgagcacggtcctggttgttgagcatgaggaagaaggtcatgttcaaaaagtccaacgaccaatctatttcgtcagcaaggnctttttaggctcgtatctctcaagtatcaagcactattccttcaggntctcaataagtctatttattattggtgctttctgattatccatcaggcaaattatctcactattttcaaggtcactcggtcacggtggttacatcgtttccacttagggatatacttcataaccgcgaagcaaatgggtggatcgcaaagtgggccttagagttgatgtctttggatctatccttcaagccgcgaacttcgatcaagtcccaagctttagcagacttcgtcgccgagtggaccgagtgccaggaagacacgcctgcagagaagatggagtattggactatgcattttgacgggtcaaagaggctttcgagcaccggagcaggagtggtcctaatttccccgactggagaaaggttgagctatgtattgtggatacatttttctgcgtcccataacgtggcggaatatgaggcgcttcttcacggattaaggattgcaatctctttgggaattcggcttctgatagttcatggagattctcagttggttgttaatcaagtcatgaaagagtggtcctgccttgatgataatatgactgcttattggcaggaggtacgcaagctagaagataaattcgatgaccttgagctaacacatgttctccgacataacaatgaggcagccaacagactggccaatttcgattcaaaacgagaagcaactcctttcgatgtgtttgtcgaacatctttatgaactaatcgtaccgaggaaagaaatggtcgaggccacgtacactcaagaagtaaacatgattgaagccgactggagagagcccctcatcaaatttttgaccaagcaagaactccctcaagataaagacgaagccgagcggatttctagacgcagcagactttatgtcatacatgagaccgagctgtacaagaaaagtccgtcaggaattctgcaacgctgtgtgtctttggaggagggaagacaattgccaaaggatatacattcaggcatctgtggcaatcacgctgccacacaaaccatcgttcgcaaggcttatcggcagggttttttctggcccacagctgtgttcgacgccgacaagattgtccgaacatgtgagggttgttaatttttcgctcgacaaactcatctaccggctcaagagttccaaaccatcccgctgtcttggccgtttgcggtttgggggctcgacatggttgggccgtttaaaaaggctgttggtggttatactcatctcttcgtagctgttgacaaattctccaagtggatcgaagccaaaccagtcatcacaatcatagcagacaaggctagagatttttttcatcaacattgtacaccggtttggagtacccaatcggatcatcagtgataacgacactcaattcactagcggagtatttaaagatttctgtgaggacttcggcatcaaaatttgttatgcctccatagcgcaccacatgagcaacagacaagtcgaacgtgccaatggtatggtacttcaaggaataaaagcacgagttttcgaccgactgcatccctatgccggcaagtgggtagaacagctgccgtccgtgctttggtccctgcgtaccactcccagtcgggctacgggccagtcaccgttttttctagtctatggagcggaagcgatgttaccaagcgaggtggaatttgaatctttacgattttgcaacttcagcgaggagcgctacggagaagaccgagtagacgatatcaaccgactggaggaagcccgtgaagtagccttaattcagtcggctaggtatttacaagggatgcgccgttatcacaatcgcaatgttcgatcacgagctttcttagttggagacctggttttgagaaaaattcaaactacatgagatcggcacaagttatctcccttatgggaaggaccgttcataatttctgaagttactctaccaggatcttaccgactcaaacgtgaagacggtactcatgtcgacaactcttggaacattgaacatctccgtcgtttttatgcttaggcattacattttgtatcttcctctctgactgttaacatcaagtttttccttgagttatcagtcgggggctattataataataatggagtgtgatttcttgtcaattcaatttgcttacttgatttatcattgccttgtttgattttttggcttggtcaatgaggactgaaagtttttcaacaacttttgcgggttctaggctcaataaggtttgacaaaaacttttaagaaattaggagctgagtttaaatcatcaagcacggcataaattcatcagtattgtacaaattgtgactccatcatcatcatcattgtcagaatacaacatcaatcagtttcagtcttttcatcatcagagttaccagacccagtcggcctaaggtcgttttcttggaacctctcaactacatcaacggctatcttatcggcagctttctgcgcgtcattgatgaggtcaagagcagcttcttctcttgtcccgtctgtaaagccatcaacggcgtcaatatcaatcttcgggtacaaggacttggtcatcgccaacgccaggcttgctcccatacttccagcttccttgatgttcttaaaatatgtatctggggcaattctcagcttgtcgaagatttcggaagcatcaaatgaactcggaccattgttattaaaaaacatggcttggacgagtggtgtagcggcgttggcgacctcatctctagctccctcaagcctcttgattttgttaaccaagacgtcgaattgggcttgggatttgattttgtgatctgtgcaagtagatttgtatcagcaagtgggcgtgaagataagagtggttttttgaagtttcagctacaagtaccttcgacatctttcagagccgagtccctctgcttcgtcagttcgcccttatccttttccagagccctgtttcgcctttccagctcagacatcttggcagcttgcactgtattgcctctcattggttagttgcacatggatagcggcatggaacaagtcggataaggatgagaattaccttttgatgaaccgctcagctcaaaattggagtcttgaagctaagcgatccaatctctgaggtcatgctcagtctttctggcaagctctttggcttcacacagctggtctctggttgcctcaagggtttcaaggtggggaactaattttttgagggttgtagtctttgcctcattcctaagatggattctctgcattacaagtgcgtctttatttaagcaaagtggccgatggaatgattgaagctgagcgtatagagacttacatttacaagacgagtagcttggccgagtgtccttttcagcagacatacttcctcgtcttctttttgtttgtttatcacaattccctgaggttgcatttcgtcatcccaccatttgactaatatgggtgggcgagaatcttcagccgatcgtatccggaggacctcttcttcatcaccgatcattgggccttaaacagtcatgaataatggtaaaataattgaagagaatatgtcggattaaaacagatttagaggatttgtttacctgttatgatttctggtcggggatgagcaggtccttccaccctgacaggagagttagttccagagccagcgccagtgtttgtcttgggagggctattggtttgagcctctgcttctgggatatctttactttgctctgtacccgactggtttccagtcgggggctcctgatcagcactgaccttagctttagctgactggtttccaatcgggggcttattgctggttgctacattgtcggttgctgattggtcaccactcgggcgatcttcggtagtcaacccggtttcagtcgaaggaccagtctccgtgccagtcggttcagagtcctttccagatggatcgatgtcagttggtttcctgcaaatttgagatattcaatcaacactactttaatggtgagagaccggtaatacgggggaaattgctgaatgactcatacctggatgacttcctgatttttggtatgggacgactggatgttttcttctttggattagtttgccttggctgtttctcagtcgccctttttgtcgcctgccttttccacatcgtcgccctcatcgtcacttgaaaccaacttcctcttacgagaatctggctggttagtcggcttcgaggtgttagattggatattcgactggatcttcggccctccgctggcttggccagtttgctggcgaggtgagcggtgttgagcaattggaggatcagatttcatcaaagcgaattcctgtgcatggtatttcaagtttccagttgaccttacggaagataaaagcatgctttgagaaaggatgaggtgtataatacgtaccggtggaggagggttgaaggcattatatggcacgactggcaataagtgtgaatagttgaccacgatggcattcgagaagattttgtacattctttcctgcataattctgaactcaagagactctgggtcctctcgaactcgaaagctgttcaggatctttctttgattggtgccagccggctcttgataaagtgccgagtaatttattctccctacagaccctgttctttaagtttcagcatcctgtccagcaggtcaagcgcttgggcagcttcttctcccataggaagtgaattccaggtatcacgatataccggaggaagacaagagtacctgggaagcgttggctcggagttttgcacatagaaccagttcgcatgccaacctttgttcgaggtcttgaatggcatggagaagtatttttggctcaaggtccccctcagttgaaaaccggctcccccaacaacacatggtttgctcttgtttggctggggcttgaggaagaagatgcagcggaatagggaaaaatgcggcctaatccccagaaaagcttcgcaggcatggatgaaattggcgatgtggactatggaattggggtttaggtgatgcaggctgatcccatagaagtccaaaattccccgaaagaagcttgaggttggaagagaaaacccgccatagaagaaatgagaaaataccacgacctcatgtgtgtcaggggttgggaatgcttcgccgcatgctggacgccacccaatgatctcttttgccggaagaacactgtgcgccaccatctccttcaggttctcctccgttacatcggagggcgcccactgactctcaaagctctctctctctctctctctcttccgccatggatgcgatctggatgatatgatttggtttggagtgtggctgggactaaatgggagattgatgcggtggttgcatgggagattttcgtggagttttggaggatggattggagtgaatcggtgaaccctagtttcgtcggtgcggtttcgtactgtagcagagaatggggaaagtggcgagagtttcggtggggaagatgaaacgacgcttgaccttcggtgttgtttcattaagatatcgggagtactaatgggcctgggcctaaacagtacttcagcccaatttttctattggcgtggctaagttgtgatcttagggacttaggcatttttgcttcggcaacatttgctcacaacagtatagcaatgttgttaaaatcctttttgacgcagttagataattctttggaactgctacgatgcaaataaaaaggtgcccaacagaaaagtgttataccaattttgtaggcctttttacgctacaaaagctgttcgggttttgttgagatggctggtttttgaatagtcattctctcggcaagttatatgcttgatttaatcatggtgtgggtcatagcctaggctatttagacttgttggttgtcatgatttatatcacatttgatggatctttttaagattttttactcggatttttatcatatgtgtggatttatagacctttagagtgtttctcactcgggcctctttatatctccttttttggtgtattaaagctaaagcagttggctggatgttttattaaacatcgcatatgcttagctgtatgatactttggatgatttggttgtaaaaccactcggttggatgttatttgcaccttgactatatgtttagtttttaactaatcacatagtcggggggctacacctaattaggtgtatctagtcaatgtacccgattttttctattttcagaccttcacagtctttgattttgatactcgggagattatggcagaagaagtcggagtactcggattatcgttttggattacgggagaagactatttcgtcgactgtaaaggtttcaggggctactgtggagattatggataccccatacctacacggcatgtatagtccgactgggtatggggtgccatgtatagatataatatccttaaaaggactcgggttaaattccaaacttgtacatcaaggaaatacctgggattctagtcggttacgattgtatcttatctgtaacaacctattccgttaaggatatggattgtgcattgtaatgcggacccttcccctatataaggaggggtccgggtgcctctagggacacgattttcacccagatcatacgatcaataatacactcggcggatcaatcttcggacaggagtagggtattacttcttaattaagaaggcctgaacctgtataaaattccttgtctttcaatccatccacttttccaacttgatagccaccccttttagtattgccgaaatcttgtttcgacaaccgtaactgtaacctgttgcacttgcactgcataggattctcatttgccagttggtcaccatagagtcagtagtcagaacacattggtactccactgttcagaatgaggtcagaaatcaaatacagagcacgccgatttcaatccgagagagatggacacacactctccctcaattcaactcctcacgattgcaaaataactaatcgaatttatgtcagaaagtttgtttaaatggtgttttttatgttcctttttgtttggcggaccacttaaatttggggttcaacagataaggcctggtttagttcccaactttttcttcaaacttccaacttttccatcacatcatttcaatttcaatcaaactttcaatttttgcgtgaaataaacacaccctaactagagcctcaaaaagagtttgacaaattaaataaatttcttctcccattgattgttctgcttgtttggagtttggacaacaagtactagtagtaatagtagggccatgtttagttcacatcaaactttccctaaactcctaacttttcatcacatcacatcacatcgaaaacttccctactcacataaattcctaacttttttttcaaactaccaactttcttcaaactttttcctaatttcaaaaactaaacacagcatagatgaagaacaccacacagcaagacacaccacatgacactgctatctatgcactgcagccacatgctgcctattagcttggttcagtgtcactgtacaacactggtgcaactaccaggcaggcagtgtatcactgtatccagtgtccacatcatctcagcttggcagcagcctttttggaatcctgaaaaaaatctaaacattagctttaaaaaaacacaaagcatcatccaaagagctaaagtgcaaaattactgttcctaaaggtaatttcaatccccaccccactcctgggcatccggagtactatctttgattcagaaaatgctacattgatctctgtgcatgctcatcatctttgaagccaggggacatcatcccccttttgcttactagctttcatgtgaggaagtttcccagagcatcttggcatctcatccatctcaaagatttcatgtttccctccttccttttcttttaacctttttctgttgattcatatgctcaaatcttctagggtgagagaacccaaattcaaacaaaagttgcatgtcaaagttagagttggtgttgaattcactgcaagtttaaaaactgtgcaggaagttactttggatagcctaaagtttgcattggccggtgttatcttttgcccaaagatgattgtgtggcttcgtttgttccctccccctcctcttttctaccctgcttttgatgccaaattgctactaattgctgcatcgtcagagtgtaacacgatgattagttcaaatatatatcaatgccaggtcgttggcctctgatgtctgacagacaatcagcaggtttaatagcaatgatacatgaaagaaagccagtagccttggaccaaaagatcattgtaggagtatatctaggggatgaaatcataaaaaatggcctacatggaccaccctgggattgaatgacatcagctgttccttgcgattccattaattttggatgctgattgcatgctttttctcagttttttcttctgtcttgagaaaacgtgatgtcattgctagctgcacccacgcaatagaatgagcctgccacattgcgaatgtgtcaaacatatatagagagagagtttacttgtccatctctaaatgttattctttaattctttttcacctgccattgcaaatgtgtcaaaaggttttccacggttaatgcacatgatcatttgcatctaacgctgtcattcttgcagacataataaattcttgcacagtatatctgttgctcacttagcctggcagtatgcatgtgttgctctgtgaaaataatgtgaagcggcagtgtggcggcaacatttgagaaagcagccaactcacccggccactgcacagtgttgagagttggaaattcgtcggtgactcgatcggtgtagggtagcagatggtagtagctagctagtagctagggttcaattcgcctgtgatatgatgatcgaaagatccattgcgcatcacccaatcagtcacacaagtaacgtgtgcagcctctttgctttcatgtgctgtccggtccatttcccgcctttttgcattgctcccaagtcccaacttttagaggtaaacccaaagatgtgttttgttaagtttggaaaaaaagttagaagttcacgtgtgtaggaaagttttggatgtgatgtgatagaaagttggaagtttgaggtagttgggaatgaactaaacatggcccaagggcatctgcttaatttaggaatcttaataaaatacatggagttaactacttcttatcatatgctccctctgttttaaaatatatgacattttgttttgttaggacaagcatttaaacaatttaaataatgattgcttcattaatatattatttatatgataaagtataatcgtatgactttgaagacgaatctaataacatcaatattttactggttaaaatctaatcgcaacgaaacatatatcctatatttttaaaatggagggagtattaacttcagcaagatcgtttattttaggagacggaaaaaatcagctaattacttcctgttatcagtcaaacacgattgttttaagttaactaactaggaccctatttagatgggactaaaacttttaagttcctatcacatcggatgtttaaacactaataataaatattaaacgtagactattaataaaacccatccataatcttggactaattcacgagacgaatctattgagcctaattaatccataattagcctatgtgatactacagtaaacattctctaattatggattaattaggcttaaaaaatttatctcgtgaattagctttcatttatataattagttttgtaagtagtctatatttaatactctaaattagtgtctaaatatagggactaaagttaagtctctggatccaaacaccacctaagcatcaacattcagtatttaagttgatttcggaaggagtagacatgcaacccagccctcttcaacacagatactaacaaaaagcgtgtctgcgtgtgtgtgatggcaacacaacggtgatcgatcgagccggtcctgcattttttgcagtagtcaggcagtcagtcacggaccattgccactgtagtgacgcagtcagccaagccaagctccactcccatgttggatcggcttgcgcaggcaggaaatcggtcatcgatcaggaggtggtggtggtggttcacgtgttggctggccaccgatcgagcgccggtcggtcgatcgatcgatcgccgtgcgtgcgtgcacacacagcgtgcggcgcgcgcggctgccggaggaaatacgtacggcgcggcagattcaacccgtcacgcacgacggcagcggcggagaaccggtttggactcggacagttggacggacgctgctgatgctgagagagagggagagagactggatgcaagcgagcatccaggcaggcaaacggacttttttttcccgcttattctacttttatttcttttataaattttataataccatataaaaaaatagactaataaataggttttatacggtagcgagacttctcacttacattctattagaagaggacggcaacaacgatgtgcgcgtgtgacggacgaataacgatgatgtcagaggattgcagtgcaacgacagcagcatcgtcgtcatctacctcccctcgctcaggattctctgcagctgcccatgctgccagcagcaatggagccggcgcgcgtgcgcgcgcgcgtgcatcccgatggtctagtgtactctagtggcggatgaaacaagaaaatctgaaacccaaggcaacgaacaaaagaaatgaatttggatgcgtctcgtgcagtactaatctggctatttgaaacgtggatgaattaaaatctttggtaatgacatcgatcccctgcgaccgattctcctccgcgttgtacaatgggtttgagctgagctaacatcatctccaacagagttgctatctgcctcttcaagtaaaattttagcaactctaggtgaaaatcgtactccaataaaattgccatctcactctccaagctattccgctagcaaaataagcccttggaatggccaaccttggagagtcatcttgcctgaccaaacgtgggtaccactgctccatcccatctctctctccttgccataacctcgtaagacggcagtagaccgtgcgccgtcagacgatgtcaccacgctgtcgcccatcattgtctcgcgccaccactgcttccccttcgatgccgatcgcctctcctcccatactcgcctcattcaccgttgtcaccgaggttgcgtcggctgtcgttgtcagatccacatgcgacgaagaagcggctgtcgacagatgcatctacgagtgaagccgccactgccaccgcggatttttcatgagtagcagtgtcaccgccgtcgtcagctccacatccacaggcaacatcgccgcccgggtcaacatcatccttctccccctatctcactagagttgctcgcccttctatacgtatgttgaggtagcgatgttggcttgggtggcgccgagacagttggctgtggcgggcggcttgggcagaggcgatactgcaggactcatgggtagccaacggtgaggagaggaaagattcgatagagaaagaagtatatagagactaatatatggtacccattgttagattggatagtgtaaataggaaggttgttggagtggaaaacaaaattggctctctattctactgtcaaattagctaaatgagcatctggagagtcatatttaaagagactgttggagatgctataagggtgcgttagtttcttgtggttgaagggatatttttagcacacgcaaaaaaaagttcattagcatatgattaattatgtattaactattataaattctaaaaaaaggatttattaaagttttaaagaaactttggtattcatttttttttcacgaaacacattgtttagcagttttaggaagcctgctacggagtaaaaaaaaagcaggaagttgttgtgagtgaaaattaaaaaatggcctaattaccatgagcatgtctccccaactgttaaacaatgtgttttgtggattaggttcctatgcagttcctagtgtgactgcaacttaagcagacatatagggtctattaaaactccatccaacggttgagattgtttaagcactgttcatggaaaaaaacatcacatctactatagccagtggcactgtagcacttaatctacacccttcgttgggaaaatgaatggatgagatctcatgcagtcattaactttcagtcgtagttgtgactgtatttgatctcaatccgtgttttgtgctaagggcaagaatgtttgtgactgtatgtgtatgggtaataaggatgggacccatgagcaatagttatggacgtgtctataatagttaactcttttgaagaactttatgatgggtccactgaaaaaaaaaagcttcctaacaagccagagaaatagatattgaacagtgaaaaaatatattaatattttcctgtgatcatgccttaagattaaggctatctgactatgaagcttaaggctgtgtttgacacattgagttggggctaatccttgatgcatacaaaatggggtgactcattagcacatgattaattaagtattagctattttttaaaaaataaatggattaataggatttttaaaagcaacttccctattttttttgaaaaaaatgcacggttttgatttggtaagcatgcgaccagaaaactaggtagtgaagttggaaaagtacacattccaacacaacctaaggtgagctcccaaaataactaaagtcacaacacttagtgctttttggctaactttttggtatatttttgttgtcttaaaactttatacagagaaatttcttaaaaaataataaatctatttttagagtttacaatagataatatttaattaataatatgtaatgacttacatatcatttttttctacatctaactagctaatcctaaccactatagagaagatatcactactgaaaaactgatctttaatgggtcatgtataatctacattagtcccggttcgagtaggaactttgtgatatcttctctatagcggttaggattatttagtcctagttcctactcgaactagtactaatgtggattttgcatgacccatcaaagatcagttttccctagtaatatcttctctatagcggttaggattagctagttagatgtagaaaaaatatatttagtcccggtttaaaattttacgatctttagtctaaagatcatttttagtcccggttcaaaataggtcaggtgtcccaccaactttattcccggtgcaccgtatataattcctaagacttatcctcacctcctcctcatccgtaactacctttcctcctcctctctctcttctctctatcttatctctatcctctcatcctctcatctttaactattttctagcggcgaggtgcagtgccgggcgagcagccatgtcgggcggcggcggggggccggtggcggcggccagcgccacgccgggcggggagcagcaccgggcagtggcctgtgcagagatcggaggcgggctatgtggatgcaaatttttcctgtgaatttgttcatactgtggatatgtgaatttgtgatgtcaatttgagtatgtttattggatctgtgaatctgtggataattttgtgatgttttgttaatggggatgattttgttgttgagattggtttgaaatcaatataagtagaaaaaataattaaaaataaaagaaaaaaaaggagtacagatgggaaattcagccacgtgggaactaaagatgatttttggtccggttatttcaaccaagatctttaatccttgattcatggtctacagtcataaatttacggtcccaattgtataatcggcggttgtataaccatgactatattgttacgaacggggagggaaggtcctttctccggcagtgtatggaacagctactcaagtcagaaagttaatccgtattaataagctggttaattcaacattttttacgtgggcgattcatgaccttttctccacctgttacttgtatacgttgaatagtgtacttctgactgatttgctggtgcgataatatccttgacagcctggaaacatgttcccatatttagacaccagaaagtaagctgtacacgcttcttaatctgtccaatacaagacggagacaaaacatgtccatttaccctgaacttcgatatctagaaaacggactatcaaaaaaacctttcacaagttatttggatattttttaaaaaatataactataattataatagttaacttttaacttatatataactggtatataatatactacaacccactacttttatactgtctatatattagtgcccaaaattttctgatattatgcaatagtctaatatgtgtataaagcaaattaatatcatatatttaaataaacagacaaacaatactagcatatttgataaatatatgtatatattttgcctatgacatattattatacattttttgggagttttgggagaaaaaacttaaggatgatatattttttcttcacatcatcccctaatatataatgttccgtttcattgattgatgtatggaagttgatatacttgactataaggataagtttactatttatatatttttgcatgttgcctaccaccttatcataaaagccccaacacccctccaccacccaatttttgccaacacacattctttaccctactgacgggcagaccacatttctccaagagacctctgcacgccgactccattgtactccctccgtttcgcaatgtaagtcattcgtttcgcaatgtaagtcattctagcatttcctatattcatatctatctagattcattaacatcaatataaatgtggaaaatgctaaaatgacttacattgtgaatcgaaggaagtagccgccatgtccacatgaatcaagagaggcgacttttagccgtcttagtttctaggcaccacctccacccctatcttgaaactcccccgtgaccatatttggaagctgatgggacatagtgaggggcaccaaaggagagaaagaggcatgtctagcaattgagaggactacccactgcgatcatctgtattgccacgtcaccacaagggcccaactaacctaatatgccctttcgtggcctagatttagaccaccgcgcacagttagtcgtccctaccaacttacagtagcctatcaactaacatccatagtgacccggacggatataagataagattagaggagggactcaaatctccttcttagtcattcagccccgctactctctctcctctctctctcttcttccctctcccctttctccttctattaatggtgatccagcagggtagggggactcgagtccccccagcacacatactggatccgtctttggacctacccacaccgagaagcatgggccgccgcacattcactgtgatgcttcgcccttattgtcttactccctaccatctcgggccctcggctcttttgtgctatcaccgcactatctcacccgcaccacttgccactacccctgatgtaagatggctcgtcacggcgtcgcctctaatgtctttgttcctgctcctcgctcatgccatttctaaagctcagacgctattttgaatcccacaatcgttagttctatgtgggctttttagtagctcgctctgcgacgaggagggcatcggtggtggcctggcgggtagttagacatagtttgccattaatatcatctttatttagaagatgcttccaccctatatcactcgagtacttgcccatcaaatatattttttttgaaactacaaagagtaagcaattaattgaatgtggctgaaaagtttggctcttcatctcttcctttttccagatttggttctccatgtgatatctctggcacgctgaaattgctgccgcaagtacaacaagagcgtcaccaccatcgatcgccagctcgcgaaaaccagaatcgtagtagtaggagcaacgtgtgtgtgat

SEQ ID NO: 16210 - DNA, 2975 bp, Oryza sativa
ccacccttcctcttcgcttcgttttcttctcctcgacccgccgaacagcagcccgctcttttgatcttttcctccctctcttcttctccctccgaaccacgagtcgccgccaatggcctcctgacaaggcctcgtctcggttctctgctcgtggttgggggcttcttggcgttcttgattttttggtttgggtgccttggtgctcgttcttgaggcgttcgttttcccttggtttgatgcggcggcggtggtgagggtgggagcagccgcaggtcgggaatggaaggggacgagggcgcggcggcggcggcgaggataaggctagtgcggtgccccaagtgcgacaagttcttgccggagctccccgcctactccgtctacgtctgcggcggctgcggcgccgctctccaaggtgcgccgcccttctcttcattgcctcgccgtgtggttccctttcgcagccaattggttgaattttggggccttttttttttctgtttgatcgtcgattgcattcgtagtatagtttgcatgatttttttttcttctcgttttttctgttcattctcttgcgacccattctgcaaagaatccgggttaattagttagttagttaattaattgattggttgattgattgatttcgtgtgcttgctgaactgtgatggatttgggaattgtcgggattattggtgcatcaaagttcgcacatggactttgtctttggtgacactgacacttgcggctgcggaaaatttttgatttgctcaactagtcgtcatgtttgcagcaaattttaggaagactttgtttaatgccgacaaatattgtcagctgttttatgctttcaagaaagttctgtactttgagggtttaatctgaattctcaacttgccctctttgaaacgaacttttttttatcaatttcaacctagtgccttattacaatgggcagatagtgtttactcaattcttttggaaaaatgtaaatttctacactgatgtaatcttaatatttgcgaaaaaaatcttgctcactgaaacttgaaagatggctgccagtctgccaactacaccattgcagactcgttctctcttcttttgcagttacttctatgccttcctgaatagattacatggggcttgacaaacaaaacatgggttggatttgacctaaatatcttaagattttgggtgatggttgagtagtttttatataaatcctgtggattgcgattattatgggattctagttgcattttagtccccaattgtgcttgccaacgttgctttggggggtcaatcgcaatgccattggtgctggggcttggagaagtggtcttcttgtgcagcacatccttgtcatatcctagttaataataacataatttgacttgcatgagttgcatcctttaaccctcctttgttaggaatgaagtggtcaattgaatattgagatgacatcattcatcttctgaacatttttcagcaaagaagaagtactcagcccaaggttctgataactctgataatggacatgtgaagtaccttgaggtactagagagtgttgcggaggcgcctgaagcaatggatggtgctaccgctgatggtagatctatacccaatagaatttcagctttgcacagtagatcagtttacaaccatgaagacaatcgaatggcaagaggtccaagtacttcaacaggtgaagctactattagaaacgatggtagggaggcaaagtacatgcgcatccgtaatgtggaaaatgctgacatgatgaaatcagtaagaggaagaggtatatctgacatatctccgaggtctccaatcgatggaattccacccacctcttaccaagcggaaagccttgtcaactaccaattacagtcaaaatacagattctccaacagggagcatgccaatgatagggacttggatggtccaagcagagttaggggccttgagaaagatcgtgctgagctcttgaagatgcttgatgagttgagagaccaggtgcagcaatcatgtgaggttactgatgcaccaagtagaagtgctacaactaatagacctgcagatgcctcaagttcacatggtgcgcatgatcagccaaatcagctgaggcatgatccatctgtattgcattggaatggttctcatcactcgccatccttgaatgtgcaaagtcctaatatcccacaagtccatgctccattgcctactcgacagaatcttcatggatatgcagagcccatcccgcatgcgagagcctctagctatcatgctggtgctggttacccctgcagaaatgttgataatttcttctttggacatcatgatcctgaccctttgctctcatgtcaccatgaaggcttgtaccatcagcccgtctgttcttgcttcaattgttaccaccgagagtttttgcctgtacagggaactccccttggttttactgatcaaagggcaccataccttatgaacagttatggagcatatcctgtagagggtcccctatatggtcagcagagatacacttcaagaggtactaatacttctttacagaggaatcacctgaggaccaatgtaaggaagaaaccggcacaaacttgtgagccgattgcaggtggtgcccctttcaccatatgctacaattgctatgaagtgctgcgaataccaatgaaacattctttgttgggaaaggagtataagctgatgtgtggatcatgctcacatgcaattctagtcaaccttgatggaagcaggctcaatgtttcagaacctgcgcccggtataaatttatctgctgcactgcaaaatggtattggtgatagcatgagaaacaatgggcatgctaatgctgatgagaggttgcttccacaatattgtttttctaatggaagtcatgaatctcaagaaaaagatctagaatcaaattcaagtgaatcagatagcaaacacactcctctagg

SEQ ID NO: 16211 - DNA, 2037 bp, Oryza sativa
atttactgaagttgcaaacggaactcaattaaagatgtatgtgtagccaatgagacacagtctccagtcgatgagtttgatgatactttatatgcacaagatatgctaaatttgccacaaaatgttggccatactaggtctacaaaggcaggcgattcatttctaaccaatctcattaaaaggagcttcaaaatgaacaatggaacacgcaatggaagagcaaggatttttgttaatggctttcctatctctgaccgtgcagtcaggaaggctgagaagctagctggagaaatctgtcctggtgattactggtaaaattcctcaggctgcagagtgctaaactatgtttggtttatattttgattcctgcatttcagttatgcttcagtaatcttgaaaagaaacttaaatagtcgcctacattaatataacaaaattctattgtgtactttctttcttgtattgaatatttgagtatacaaaattttgatctgatgttctgttacttaggtatgattatcgtgctgggttctggggtgttatggggcgaccctgccttggcatgatacctgtaagaacacttgtcttggatattgttcatttcttcctgtatgctatcctatcgataaaatctctaagttgttttttttccttgcagccttatattccagagttcaattatcctatgcccaagaactgtggtggtggaaacaccggcatatttattaatgggagagaacttcatcagaaggatttggatctacttgtgtctcgaggactgtctgattcccctggcagatcttatatagttgaaaattctgggaaagtttcagatgaagtttctggtgaagagctttatggccttggcaagcttgcaccgacgtaagtatctctttaaattctaatcattttaaattctgcaaaagcaaattaatctagattatttcggtagtcaaggctagctcctgaactgcagttaatatgacagatgctattgctataatcttgtttgcgatgcctcttaattcctgtggtgatacaacttaatcctggaccattttttttaacaacataggatcatataatctatttccaaggaacttattctacaaatccaatgacatcatggaaaatatgttaatggattgtgctcaccattagctcttttttagagtcatctatttggacacacagtgatgtatatgggttatatagattgttagattataatcataatgccatgttatgctacagctacacccatctgcccagtataatttctaaacctttcacaaaagaatacagcctaacaacagttgagttggtcagaagtaattgtgggcttgtggcactacatttttttaatttgatcaacattccctaaaatatgtccaggaatcagggtggtaaaaatagcaagatttgtaagtgttagaaggattgggaatcttgttgtgaagtaatgccctactacatttcatctttgcttattttttgtggccctattctttttttcatattaatatatactccctccgtttcacaatgtaagtcattctagcatttcccacattcatattgatattaatgaatctaagacatatatatccatctagattcattaacatccatatgaatgtgggaaatactagaatgacttatattgtgaaacggaggaagtacgtcattatggtgaactagtgaatagaaatgatagaaaagcattggcctcagatctataacgtgcctggtgtctagtgccaccaccagtaggcaattccaaaatcatagttatgcatagtttcagaaatccttttgcaaaaatatgtcatcaatatcagagctacattagtcgactatccttgcgactaaacaagtgttgtgaagataattcatttcatctccagttgcctttatgtactgcaaaatcctggtacacaggatactgaatctctgatactcttttcaaggattgaatttctgcattagtcttggaactacattatgttctttatttgttgaattggtgtggttttt

SEQ ID NO: 16212 - DNA, 13254 bp, Oryza sativa
tgacgaagtatttgacacattgctactgacttggaaaaaacagtcctacaacgtggcacaataacagtagtccatgagactaacagcctcagttttgagatcatgaagggatgatctgtattctttcgagataatggaagctttagtaaattaagttaattgcatcaagatgtacaatcaaaccgagtcacttcttacctctatataaaatgcacatggccaaaaaaagaagaagaaagaaacaactagaaatatctcccaagcgtaaaagtttaaaagaaacatatatcttagtggttatcaatcagtagtctagaccaccacccatatcctggataaaaaaaactcctacgccacttggtccaactgtcgtgataccactgcaatagtatcctgtagtctcggtccgtggagattagtctagatatgtagtcaccggataacttaagtttggacttaagattggtgtaaatgcaatttacgtttatacttgtattttttttattaatttagagaacttttagcttatttgatgattttgactttcctacaaactaatccattaaaccccctagaggcctaggctatctcgtgtgctagatgaaattatatacacaatattttcaacgtaacttgtctctgtatatgttgtttatgaagcaacaaaaatgaaacaatattatattgtatggactattttaaccatcaatagaaaatttccacgcctaggactgaactaatgggatctcaaatatttttataaattacatagcatttttcaagattataatggggattatggagctaggtatggggcccaagccctagctctgcctcatgcctgattccgccatttaaatatcttatcgcttgtatggtactttttataggaatataaatatgaaacctccgactgaaaatagcgttaccgcccgcggatgaaatggaggtgagaagcggacttggaggagattctgtcggcggcgtgaacggcaacggcgagccgtcgacgacgtgccctttgccccctatccattttccagtagcgcagaagttggggggaggcttatcatagtgggccaggccagctcgtgaaatccacgcgaggggggaaaagcagacaaggaataatggctcagcatccagcaggccaggcccaatccataaggcctaaatactacttgtagtcactgcacagcgttacattacaactttgcatctaagaaagcacagcaatttacgaaggataaaaagtctactttaactccctccaatatatgcctgatccaattcgtatctcaaccacgaaaccatatatatcgcctctccaagtattgaaaccagtacaaaataactccctttgacagttttcaatatggtttcaactaccaacatggcatggttgacatcgtcttcaactgatgtgtcgcttacatgtcactagaagtaaagataaaattaaaatgaaaaaaaaatgagaccccgtgtcagttggacttagatttgaaagaaaaaaatacagtggacccatgtggtgttagtgtcccttctcctcttcccctctcttctattccctctcttttcgacaccatgagtaccttaacaacaacgctagtggattgacggtggggatgcagggagtgcctcggtacaggggagatggtggaagagagaggtcggggccccaacctgtttagtttgcttcagctcatgtgtgtctttattatagtatagatctagcttcttggtgcaattcagcaattagttgagactagttattttaggccttaaattgtgtaaaaccgttttgatttacgcttccgcatatataacttattttagttaaaagttttaaaaccgccaattcacccctctagtcggccttcttgatcctatgacggggactctcccggggattagctcctaacgaaaagattgctattataataaaatctattatattttaggatagaggtaaactatagtaggctagtgtagctaggttttattgcgctccgtcaaaggttgagcacggaggacgcacaaaataatggccgtgtcccaaccacaataaatcaattcgtgatggattatgtctcaaaggtgtaactaatgtctgcttgatatgattgtatgtgtgggccgggttgccataactcacaatctattcatgtgtcatcttgtgccccctcttctattttctgttaatatatgctcgcactgtatttttcatcaattttcatgtatcatgtatattattatctaaaaaaatgtaccatgtatattaattgagttttacataaacaagctgcagatatatgcatgaccatctcatctttatcacacaactttatgtgaaacttagcatagtatatatccgtagttttttcttttacatatcaaattaggataggatgaatgtgtaaatctatcttaacaaaatttcgaataaaaaagttcaaatacttatatgaactactatcatccaatagtagcttatatagtagaaggtaccatataagtaaaaaacaaacacctaacttatcatctaagagtatttacaacgggatgacatggcgagttaccttatgctttcatatcgaatatgagacggcatcttagttatggaagttgtcgtttccatgctagatccgccccggatggaatgcttcttggagacgtaaattaaagccgatgtcggtgcttactttggatgccacatgctttctttctctcctttattaattttctttttcagaaaacaaaaatgcatgacgaggctgtgccatccgtccgtagcgcacgcgcaaagaaatgagatcagcggtggggtatggcccacgtgtcagcgctatcatgcatacgtgtatctccgcggtaaaggtgatccctgattgtttttttttgtttgaaaatttcaatcaccttgacggtacctgcgcacagctacggaagaggcttctctgacgtagtgccctcttacgtgggtggctaacatgtgggtccattatctatggggtctacatgtcatcctctcaaagttagaaggcagtatgttagaggatcacgttccatagcgtactactcattcataatcttttctttcctatacccttaatttctcttaattggtcatcttctcttttttttttacaatccaataatgcaaaagaacaaagccggctttactggaataagaaggtagatcacgaagtaagcttaactcaaccaactaataactaattagattcttttttaacctgttcatctccatgttaaaaatctaacttaaacacaaatattcgtacttacgatgatgtgcaagttatagacttgacatgcatatttgtattcatagcttattatttttccagtgctagatgatatactcatcaacaactttctcaatccaaggtataccggtctagctatagtcccaaagggtgctaacatgaatagagtgtatatacatatttatatggataaatgtgcacgtaattaattatactagcgtcgggattgtattgtgttttaaaataggaaaaagtacgaattaccccctaacaattgtggtcggccgaattacacccctaaactcgaaaaccggacattttacactctcaattattgaaaccagacaaataacccccctaaacactgttttgagtggttttgattagaaattacacacgtggcgccaacgtgacaatccagtcagcaaaaaaaaaaaactccctgagcccacttgtcaaacctatccctcaacccaatcctgtgattcccccctgctctctcttgcgtatgtcagcggaggcggcaggcagccggcggtggaggcggacctcgcctgggtggtgggtggcggaggcgtaccgggcagccggtggcggaggcggacctcatctgggcggcgggtgacggagatgaacccaacagccagcggcggaggcagacctcgcccgggcggcgggtggtggaggtgaacccggcagcaggcgacggaggcggacctcgcccgggcgacgggtggtggaggcgaacccggcagtaggcggcggagcggagccgcctgcctgagcgcgcacacgggagagagaaagagagcgatcagggagagagaggtatgaccggtgggtccaagggagttatttttatttttatttgctgactggattgccacataggtgccacgtgtgcaaactctctggtcaaaaccgctcaaaacagtgttgaggggggtaattcgtttggtactaaaagttcgggggtgagtaatgtctggttttctggtttagggggtaattcggtcgaccacgatagttcagggggtaattcgtactttttcctctaaaataaataatgaggtagagtcaactatgctcgctggtagaggttttttccttgcggagcacccggtaagttgggcttggtctaatggactaacaacaccttcggtctatcccaagtgtaactggtccaatacgaaaagttattcaagacaactctatacgtatttatacgtataaagtgtacacatataaattttatataaaaaaacttttaatgtagaacattttataaagaactatttgaatccgacagtcgcattgcttcgcttatttaattatatgattatctgaatcgcttattggtaaataaaaaaatatttgtgagtataaattttatatatgtctccttagcgacttaaaagcaaatgttgtaatttgtaaataaactatgatgaaaaaaatcaaattcaaaattaagttctaaaatttaaattttatcttataaacataagcctaagcgatacaatgagacttcgaatcggaatcggatataaatttggatagataaacttatcaaaatttaacatggtgcaaaaagaaagtgtaggcattcgcacacttagacttcccacaaactttcgtgcgatagccctttgatagagttatatatggagacaaatgcttcttatttgattctctcagaaatattaggttcaattcaataaaaaggagtttcttattcgatggttgcataattgttttactactctattgtcgattaattcctggaaaatctagtagatcacatggaagcatatagactttatatgacctcattctctctccattaccgtgaaatcacaacctaattctcttgccccgcacgtctcaccatgcccgctatgtcggtgagaaccatcggccacaccttccccgtgacgtcttctccaaatacttctttgcaatgccgtcgtcacccctcttcacaagctttggtgagtttctacatgcttcctttctcctcccctatcaatctctagcagcaccgacaccaccaccacttcaccgacgactcatctccaccacatccttccacttcttctccccatcctcctttgtgatgctgttgtcacccatcttcaccaacgttggcaagtttttgcatgctccctttctccttctcctcccctatctctagtagcatcgacaccaccaccgcctcaccgcatacccatctcctccatcccattgtcggttcttcaccatcttagctttccttctaaacctgtccttactagccatacctcctcctattgaatgcttttgcccaatctcgagattcaatatgacgtacgtgatggaggttcgacgtcacagctattgagagagatgttgccgtggagagctcatcgaggaagtcactgttgacttcgctggtgagttctccccactatctccctccctctctcatgtatatcctactttagttatggtgatagtctaataatcagttacaaaactgtagtataatattatattcactaaactgaaaaccatgaatattaagcaacgcctttcatagcctttgaaattgtgttttttccattaaggacttgaatatccattagaccggaagatgtttgaatccgaacttgcttattttatatttagaaaacgtagacgcatgagatccgcacattgtttcttagagagaggggagagagttataacatgagtagaataacactcataataattcctccctacgatgttatttgaggcttcatgttacttaaaaatttaatgtaaatatgtagtaatataaaccatgtttaaagccacgataaaataaataataattataatatttctaaaatacaaatattattatgaaaattaatagcgttatttttattagtttaaaggtggaggaattgtcctcctcacctaccatcgtagtttttttttaagaaaaacgcctttcaaatgaaaccgcctcatccaaaaaaactcaaataaaaaactaaacacagtagtttcaatcccattacaacgcacggatacgacacaagtgtatttaaaaacggagctaacacactgtatatattactccctccgtttctaaatatttaacaccattaactttttaagcatatgtttgaccgttcgtcttattcgaaaacttttgtgaaatatgtaaaactatatgtctacatataagtatatttaacaatgaatcaaatgataggaaaaatattgataattacttaaatttttttaaataagacaaacggtctaacatatttagaaaaatcggtgtcaaatatttaaaaacagagagggagcattatatagtgccatggctgattgcttgggtgacgagagattccagagatcgagtagtgatctgatcgacttggtgcacgcacgggcggtgggtgatggactgatcagatgaccaactcaccgagatgagcacgcacgcacagctgcaacgcatcacgtgatgagtacgtgatcttctttcgggtcatataggacatgaaaccgtgtcaagcttacacgcgacgtgcatattgtatcacgttctttccctcggttctggagataatacctgttggggccaaggttatttcagggaagaagaaaaaaggttttaggtacgtacgtgctgatgattcttttttttttctgatttttttgtcactttacttgctagcttacaaaattaagtgtccacatactatttaatttttgtgaatttggtcgctttatcagactttatgcatacatacgtcgattaactcttctattttttttaatattttttttaattttgtttctaagtatagttttttacttatttgctaacttacacctgtaccttattaattaggaggggtcatctcgttgatcaaccatttatatagatagttccctacaacacgagtacttaaaaaatactccctccgtcccaaaataagtgtagttttacactatttatgtttaacgtttgaccgttcatcttatttgaaatttttttacgattaatatttttattgttactagatgataaaacatgaatagtactttatgtgtgactaacttttttttaattttctcataaatttttcaaataagacggacggtcaaactttggacacagattcccacgactgcacttattttgggacagaggtagtacaagataattaaaaaagtagaaattttggtttggaatctactagaaaaactactccacaacacaaggtttataatttacaataaaaaaatattgtttagaatataatattcatttttaaaaatatttcttttaatgtaagatatgacgatatatcctattactgttctaagataggcaaatacattaaattatatgtgcctatttcttgaaataaaaacagattgtggatcacttcgtcagctttgtcgccttcagctaaattgtacaatattaaactatacggataaaatatatacttttgcctacgtcattttaaagtcaaacatactttgattgaactgtatggataaataatgaactatcaccaacataatccagcatgtcaccatggttactctacacataatttggtttacatcaggcaataataattcatgagaattatcatttacttctatcatcaaccagaggtacatagaaacaacaatgagagtgtatttggataatgggttaggagaggtggaattggtaaatggaaatgaatggagggatacgatgaaatggagcgagaagaatgaatggttaggattgaaacttatcctttgagagataagaaatcatatcccaaacctattacatggtctgaagtaaataagatacttgagccacagccacaaaaaaagtcatggtgaaaaaccacagagtgtgctgttactctgcagtgcaaaagaagggagtagaaaataacctgaaaatgaatcgagcggtgggtcacacaaaaagcacctgcccactgccttccccttcctcgttggcagcttcccccggcgccacctatgcctcgccgcttcaccctccactctttcccgttttgcccctcctcctgcctcttcttcctcttcctccagccaccgaactcaccaacaacgagacgactcaggggagatcaacctgctctccactactgtggactgcagtggagtccgtggtgagtgaggcacacacacgcgtccttctccggcgaacgatggggtggggtgagccgccggcgccgcagcagaggaaggcggcagggggcggcgggctgaagctgctgctgtccgtgctcctcgtcggcctcgccctgcgcctgctcgtcaacccctccgcgtacctcctcctttcgtcgtcgtcgacgacgaccaccgccgccgtcgcgctagggcaaggggacgacgcggtcctcgccggcggcggctcgctgccttccaacggtgagatgttcttgggatcgatgctgttgttgctttgctccttttcaaccgtttgtttttcttctttttttttgtttctttactttttgggttgtttctcgtgacatggaaacgcagctgaaggaaaggaagtactctagtagcagtactagtggaggagtattagtgtgacttttcgctctcaatttgatattttggcacaaattcagcatttttttgatcgaattaaggggattcggaacatgaaaagaaattgtatatatcttttttggtaactgagaattttccattgattgaacttgaagatggagggatcaccggatccttggttaaacaagggaagaaaatgctgaaatgtttattacacatgagagtaaattgtaaatattttcttcttcgataaaacgatccaatcatttctgaatgagagggttaatttctcccttcttatcatgttcgcgtgatattatagttaattactcccgatatagtttattgttcaggtgccaggtctgtggacctcagtcttgattcttgtgatttgtgtctgaccccagatgcagtttgaacaataggtccagtgtcaccttgcaatatttttgagcgagagatgactcctgatgactccagctgtaaggctttgattgatcactttcattagtttagtgaaaaaaaaatgaggttaaatcctctatggaagtgtcggtgtgggatctggagctatggaagctttccctttttaatatgccaaaagggctctctttgcgtgtaccctcaatttgttccatactactacatgtttagttacatatacttatagtattattccctttgtaatttaattaccatacatttcctgataaatgcaggaagttgtgatttattccatggtaaatgggtccctgattcatctggccctgattacactaacaacagctgccgcttcatcgagactccgcagaactgtatgacaaatggaaggcctgacagtggctatctttattggagatggaagccctatggctgcgagatgtcgcggtttgagggcgagaagtttttggaggccatgcggggaaaacattgggctcttattggtgattcaatcctccgaaatcacgttcaatcgttgctttgccttcttgctaaggtattctgtggtttatgtgatgaagtctttaatactttatagttcagaaaaaaaaatactgccatcgtgtagtaattacaagatagtatattgttgaccaatctatctctagtacttcactaataagctcaacctatgttcagtgaaatactagcaaaataagcacactggcatactttttaccagctagttctaactatactaccatttgcaattctccaggcaaatttcgtgggattgaggatgtgtcgatgattttttttatgtgaacgctgagtcagagctgaatatgtttttgttattactgaaaaacgacattaatttctgatgttggtggattagttctgcttttttgcacatgcagattttttagagcaatgctactatttatattgttaatgtgctatcagctgtgcttgcttgaatttgtagtaatagtacttatcaacaaaccagaaattcaagagaagtgaataattttataatctgatttaggttgaagagcctactcaggtctaccatgacaagacattcaaatcaaggaagtggcactttgctttgcacaacatcacagtctctcttatctgggcaccgttccttgtcgaagctgaaatatttgaggatgatgatggagtatcaacttctgagctccaactgcaccttgacattcttgactcaaactggacaaggcaatggaacagcttcgactatgtcgtgatatcgacaggccaatggttcccgaaaaccgcagtctactgggagaatggagctgtgaccggctgccactattgccaggacaagagtgtagcggaactgacttttgagtatgccttccgcaagtcactcagaaaaaccttccaattcatcacgtcctcacctcacaagccagtggtcttctacagaacatggtcaccgtcgcattttgagaatggtgagtggtccagtggcgggacttgcaagaggacagttccattcaagccaggggaaaccggcgatcgagaatcggacatgaagatgtggaggatcgagagagaagagtttgccaaggcagttgtgcacgacaggcacaacaacgccggccgtctgaagctgctcgacacatttgagctctcactgcaaaggcctgacggccaccctgggccttaccggacgtatcatcctttcgagaaggcaacatcggccaaagttcagaacgactgcctgcactggtgcttgcccggtcctattgatgcgtggaacgatataatcatgcagatgttggcaataaactgaaacctcctgaatcatctaaattttgacaaaaagtgttgattcagacctgattattatacataggtaaacttcttagcataatcaagtgccttcttttttggcgctcattgaagaatttccagtcggtaagtatcggtctcttgttgtagcctgtctgattgcggcacccatctgcagccataggaatgtcccctggccgtaattatcagttatgaacttgggttgtgttgtacaacttgagatagttgatttaaagagtcaaatataagtctcatcagctactcgtcttctgttttcagctaattgagctctgaaatgatcagtccttttataccttgacaagttgaaaattgtaccacctgtaacgtgaaaaataagataatgatgtaaaaaattggaaaccacttgtaacgtgcccatcattatacagtgtaaataaaacaagagaatgatgtagaaatattatacctgaattgcttctaacgtaaagaatagttggtaaatcgtatgaagaaaattggcatgtcatacggagcggagcaagttggatgacaaaagaaaaacaggcacatacatgctcgtgcatagtaagctcgaaatttattgaaagaaaacctcttttgtaaaggcatgatgattgcttgcgacatgctcaccgtcatgaacaaacgaacatggctttcgtacagacatacgtcctgcattggtgcactattgttgtgacgtattcggcaccgaataattcgatccaagcatacaaagaatgataaataccaaaaaaaaaaaccaaagataattgggcaacacttattagatttcagcagcatctcgtccatatttacaggatactccaaaggcttcactaaacagtaaggccacgtattcttattctgcagatactagaccaaatatacacaacaggcgaggaagatgagataagtgagcagtgtcttgcagtcaaaagtgtacaatgtgcatttagcacgatgcagaattcttcttcttgcttgccttatcttcgctttgcccattacggctaattttaaatttgcaccggtgagtagcaaggactttctgctcaaaagaaacctcaataaacaagagaacacaaaaaatgactgtgttttaagttgcactgagaagttgtggtatttgtacatattttgtcatgtacaatttcaacctaaaaataataaaactttgaagatatcattattcatatatatctattgcagactgaggtaaataatacaatgacacagaaagtacaataactagaccatatgaatgtctgatatacagaagtgttcactaaatgatgctgcgaacctcacaaagaggcatagtagggtttaacataaaatctagctgtagaccacattattttaaaacaatataaaacattcatggatcggatagtcgatcttcacaattttatagccaaattgctagtctttcaattggtttcatgaaaagcaatcaataattcaaatataattttggtgatgttttaggctttagctatatgcacatgtaggatgtttccttactctgtcaagtattgtttgctcgtgctaactgtacaaacaaatcaaatcagtgtttcttatagcttagtggtattttgtctataaaacttatcctaaaaaagggtttcacacaataccaatgttttaaaaagtggtatgcggtttcatgcggtcaccccaccttgtagcgcttatgcggcataatcagacacttaatgtggtataatcggccgcttatgcggcttaagcagtacgaggttggggcacccgttcctgtatgtggccatgtagaccttattctaaaacactgcacaaaaccataaccttaaaacaactaagtagaattaagatggtcacttgttcactaaataccaaaaatgtttaaagaaagctatttggaagcgatggattgccaaagttacagaaaacagttccctagttatgtgtgatggaccaattaccattataagcaaaattttaatcaatgctgataaatttaagtcataacttaacagaataaagtcatgaacttgttctactataaattgaaggaatctga

SEQ ID NO: 16213 - DNA, 2972 bp, Oryza sativa
tgtccaccaaaatgccattttcgttccatttggtgaatagaaatgtttttgctcaattttattttttcccagatcaaaatacccctaacgaaggccccacttgtaatactctttgatctctcggtttcccctctccctctctctcaacgacaccgtcgggagcggagcgtggcggtagaggccggcagacggtggcgggcgtggcagagcagggcccgcagaggagtggctcgaccagccgcctcgacgctggggtgccggagtttgcgccgcggatcgccgccccctgctgccgctgccagtaatctgcgcattcgccgcggcgcctcctccgccacaggcggccttcttcacgccgccatcgctgtatcatcgaccgtacgagctcatcatcaaccgcagttgctacgagctcgagccccagctgttcgacttcctcaccggcctcttccggaaacccaccatccccatggggatcttgccgccgaccaacctcgtcaccgacgacgacgagccactgccgaccgctccgaggtcatgcaatggctcaatgcccagcctcgtcggggagcccgtcgactagtggctttgcaacctccgtcgcatctggatccatttctgtctcctgctcctccgtggtggcttgcggtggcttttggtatttcttaacctcatagataaaatccgcaagcgcacggaatataccgatgtagcacttcaccgggagtattcttaggtatcgatttccataggactataaatcaggttcatccaagtacacgaagctacgagtaggcaaaaggatagagaggtttcaccggtgagaaacagtgtctacataaagcttaactttaatcctaacgcgatacttcgggcactggccagctcgttgctgccaaatatcgctctactgcgcacccggacagggaggacttcagtgatattgagggttgtcaccacctctacacccgcctcacacctactatgggatgcggagcaaacaccgaaaattaactacctagataccgcgtctaagcagattaattacttactttaatactagctacacactaaagtaaatcactatatttttagttgattatagtgaacgataatcccgtatgctgattacgcactaactaagaaataattcttaccaagcaaactaaattacttaaaatatatttctattataatcagactaattaacagagcaaaagaaataagaagaggattgttgacaactccgaaactcctccgaattcttctacgctactctctccctaatctagtatagagcctcttataattcagctcaagcttggagtgtgtgtgaatgagggagaggagaggggtatttatagtgtggaggtgacttgagagagtggagatgctaaggaatattctaaatggaatcttcactctctcttgacaagtgtcccttcggatgacggttttcaccggtattaacagccacaaccgtcataggatgaggagtacaactgccacgccgaagttgggctagactgggccagctactggttcagccgaaccctttggttcggtcgaaccctggctagcccatccagcccagccctctctctggtgttctgacatgtgggccccactatatgttccactgaagattggccaagataaatgtatcttattgggtttgtgggctcaaaactccataggtttggatatggaagttatattctcatccttcatgtacatttcatctcaattttggtagcttgtcacctgcatacgaatatacaccaacactcgtggaaattgttagaaataaaccctatcactatgttggatgttttatatttatggtcttatgcaggtattgatggcgttaattttgtacttagcagccgtcaacagtggcggcggctgtcgctcctctgcaagccttgctccgctacgcccgccgccggccgccggccacagcccgcctcccggctactgccgctcccgacggcgtcgtcgaaagagagaggaagagaggaaagagaagggtaagagagtatgacaggtagggcctgcgtcaggggtattttggtctggaaaaaaaacaaaattgagcaaaacatttctattcacaaaaagaacgaaaatggcattttggtgaacctctcttagtttaggatgacattatagtgaatcagtttgaagtgatggcattccagcggaaccactcttttgcgatggtataatcccattttctccttaaccagggaccgaatctgattcgtatccgtaatatcgggtatctcgacccccaagtactaaaacctgtgccatttgacttcctcggtggcttaaagggtggttttgccaacgacaagtagagtatcctaatcttctttgtcatgtggggattagggtagtaatcaatagcatagacgcaatgtctaggctagaggttatctttgtttgttgtgtgctccatggattatagagataggcgacaggtggtgacatccctgtctgtcctttgtaatcctccatgctcggatacattttagagctataggccggagtctccttggcagactaggggtaaaccggtgcccgaagcaatcaatagagttttaccttaacttaattaagttaattaacccataggaattctctccatcccaagcctaccatttagttattgtccttggaagaatcatgttcttagattatacacatacgttccttgtggatacgataccctgaaatactcttgagtgaaggctacaacgttatctgtgcacttgcagattattccatggttgtaataaataccaacaaagatacacttctagcctcgaaaggcctcaataaaggacttgctgtagattgaaaaagcatctagctctactgggttttggctaattgatgacaaatgattaatggattaatacacttattgagtgtataagtagggtattagttcgatgaagagatga

SEQ ID NO: 16214 - DNA, 3215 bp, Oryza sativa
tggtaaattgatttcgctgtgaagtgtttttcaggagcgcctatttaccccctctaagcgacatgaatgtcctttcagttctaggtttgcactacgtatacgtgattgcattacatatttctcactcaagtgcaacctgccctacaatttacgtcagcatcagatattagcaccaaacgcatcaagcactttgaagtatatatatgctgccacacaaaacaatcacaagttacaacaagtcaacaacacaatacagaatgaaactagctcatttatttatgtttttccacaaaatatatgtgttgtaccagttattactgcttaggtggcttgaagtatgcataagccgcaaagaagctctgcatcatggtgagtgcgagcaggatcactgctgcggcaagggacgtggccacccatgggttgctgaagtagttgcgcaccagggcggcgcgccaccgcggccacctggaccgccggtaccgattcacctcaccgatcacgccggcgaggtagttacggtcggcagccaggtgggcctcgctgcagagccggctgaagaaccccgtggggtcccggtcgcggttcatgtggttcaccagcacgccgctgaggtgcagcagcctcatgtcctccggcgaggtgacgaggcagtccatgaagacggcgtaggcggtgacgtggccgcgcgtgtaggggtaggtctgctcgaaggcgatgaggttgcggaagagcggctcgctgtagtcgtacagctgcagctccgggatctccaggacgccgccgtggccggcgaacctgacgtcgaggaagctcgtcgcatccttcctgggccggaacgtgacgccggcctcctccagctccctggcgcatggtatccactgcgggagctcagacggcggcaccaagtgctcgctagggtcgtcgtccggcgccgcggcggcgtccggtggtggtgggaagccgacggagaggtagaagaggtgcaggaggtggtgcacatgcacatcgcggcaggagatgggcgaggagtagagcttgcgtggtcggagggagccgaatagccgcagggcaccagcgacgaggacgtcgctggtgtcgtcggcgtccgtccggagctgatggaacagcttctggacgacacagaacgggatctggttctccagaagcagcaggtcgcacgtgacgaacgaccacacccagcacctcccaaacagcacggcccggtcctcgtcgtcatcttgcccgccggtgccggaacgagaactagaggaggaagctttagctcctgattgttcttcactggcaatgcgcgcgaacttgagcaggcggcggaggatgaagcacccgtccagcagcatgatgcccaggactacatgtctctggccgacgtcgagcgcctccgcgtcaaaattgtaggacgccaggatacgtggcaggaagccgttgatggcgctcaggcaccggcgcagaagctccggtgtccgggttggctcttggagaaggtggtgcctcccgatgaggctaccgacgcagcgccatttgtacagttcgaggaccctgtagtcctcctcgcggctctgctgccttggatagcttagcaagccgatctggacggcaactgggaggtagctatagctgttaccctcctcgtccctccttttcatctcaccagggactctgtagatggttggcagccgctgctccggctgattgggcccgccatatttctcaaccaccagccttttcaaatcctgctccatactcttcacgaatccctccgatacaatattgctgcctggatttttgacatattggccattttagaaaagcttattttataagtagattatcattaaatcaacataatagtataggatttatcggttcgaatccaactgtgtcacgatggtttagatgaaaaaaaagaaacaacaacaggatatctgcaactaggtgacagaggagaggaggctgatacgtggaaccggcggataaattaaaaatttaggcggataaattaaaatgaaaatttaagagagtggtatctagatatgtgcatatttagattgggttatttgaaggctaagttccctattcgatagactaagttcctacttaaaaaaagctgtatatatccggttggatataaaggccgggtaaaaaaagtaccctcctctgaaaaaagatgtgcatattcttccaccgatatcgatcctcggcgcaggtcaggtctctaatcccctcatctcttcgtcctcagtttgttgcagccttgccggactggcgagcaactcgctaatccgtccacactaataatctctcccgtacctgatacctcgctttgcctggccacgcgcgccgtgcctcgtcctggcagctctcctctcgttcgacgccgtgtcgcgccattcctcgtcgctttcctcagcacgtcgccgattgccaggatggaggccgatgtggaacagccatagcgcaggaaaaaggccgacgagccgcgacgcctctggcggcgttcggattgagaaggtcaggaggagggtctgcagtggtggatttaacctaaaaattattttcatagattcatgagatatgagagctgaaggctctctagtttgtttagcccacgctgtcatagttatggataccacatacttaatagtacactactacaaaaataatttttctgtacgatgactcatcatttttccatgcggaccataactagtggcgtctgtaaaaatcgagggccattttcccatactgcttaagtggcccgtagggcctcttaagagggccgcatgcaaaaatgagctcatttttttcatacggctcacttaagcgcccgcatggaaaaatcgatttttctatacgggccatttaagaagccatatgcgaaaataaaatttgaaaaatttgaaaactagtgtatctcactcatatgaactccaaattgaatgtttttttcctaaatgtttctaaaatcatgctctatcatgttattgtgttcttactggtattattttggctattttttcttgtgactttgttttatcaattaaaaatttaaatttcaaaagttcaaataatattttgaagtagtaaatgattttatctgaaaaaatcatcaataacaaagttgtataactcatcaaaatctataacttctattttggttattttttcatccgagaaagtgatttgttagattgttc

SEQ ID NO: 16215 - DNA, 11171 bp, Oryza sativa
tccccgctggtcgacgacgacgggccgagcgcgctccgcaaggcgcagtcggagcgcttcgtcggcagcaagacggcatcgtccatggtgcagttcgatgtcgtcttgtagccgacgctgctctagctagtctctgcacgacacactacttacgctgtactatatagtactgttcatgtcacacctgtaaattaaattagcacgaagtaaaaattagtatcaaaatcagtcgctgatttagttgttatggaaagtagctgcaggcttgagggtcttcaagcagtgcaaacaatgggggattattgagacattgtttgttgtggtttgaacaattggatacaggaatacaggtgtggaattttgggagaggttcaaaattctgggtggaaaatttctgatttcttttatgtcggtcaagaagattttcgggacaactgtaatttgccaagtttccatgcgtgaatgatatatctgcaaaatattattgccttcatatatatgaatactatccatgacatgtataaaaacaataaattataatatatgtaattagtactaggagcttcccaagacaacacgaaattttggaatatgttgttaggtttaaaaatttagcttgaaattttcattcaaaagttttggaatttggttatcctcttctgcacctaccacccagccccccaaaaaatggtagtctagggtgcatgatgtgaaaatatgaaggcgatggagatagagacggcacaggccaaatggttccacaaaatgtgcgcgcgccgacgctccatgttgtggcagggttttgaaaatagaagcaagtagctaagcttagtagttggggaggttgctttctagtttgacatcaccagtgaggtgtgcatttgtttttgtgattcctacgtaatgtgagatactacctccatcacaaaatgtttgacgccgttgactttttaaaaatgtttgaccgttcgtcttattaaaaaaattaagtaattgttaattctttttctattatttgatttattgttaaatatacttttatgtatacatatagttttacacatatcacaaaaatttttgaataaaatgaacggtcaaatatatttaaaaaagtcaatagtgtcaaacatttagagaaggagggagtactatgcaggcagttaggggttgtggtgtttgtgctaatcttgttttatctggcgactcctccggtaatcgtcatcgccatgtttgaattcggatcacgtaactaattaaacatgtgaatgatttcatgggaaaatgatctcattgaaggatcgggatccagaccggccttgtgccggattacatttttatgaatggttccgctaaaactgtcgccacttttccggaatatataaatctcagtgatattttttgaccgtacttgcttagtataggtaggaaatgttgtgcccataatcatgtttttcatgatgaactttaagcttctctctctctctctctctctctctttatctctcttgttttttttcgtttctcttatgtgctaatttgtaccataatacattttgttcttaagtaggtcatcaatcatttagagtcttagttctcatacattgagttttacaacaaaaaattgcattgttaaatttgaaattcacaggggcggtggccgcaacgtcaccaagctcatggcggaagcattgagggcgacaatggggaaggtaggagctaaaggtgatatataggggtgtggggaggacggtggaggtggaggtggaggtggagacgcattagaggaggaggtgggagatagactgaggtcatcggagttggagtcggagggggttaggagatggatggatggccaacgattggagatctggagaactggggctcaaccggcagtgggtggaggagaggaggaggacctgctgttgcacggcacccttaaggccaccatcctcggtggaccacctcttcaacccaacccgcgccactagtggtgccccctaggatcttccgcaatgtcagttgattgcatccatgggagattccattttcttcaagcttaaaattgaattagttttcttaacagtagactttgacaagggggtgacatggctatactcgatgatcaccctcggccaggcatgactgggggcaaatgtgggtcatcaacaacaaggtggtgaacccacggtggtacgtacgaggagttccacatctactcagcccacttcgctaccaacatcgtattctccgtcaatgctgcacagcccatcggtgccacgctcatcgcctgcacctacctccccattgagctcctgtccagccaggacattgagcgccatcccgacatcctcgatgctagcaggaagaggatctcatatgggtcgacaatacatgtccagctacagttccacgtctgaccttctcctcattgacatagatgctagggcaatggctggacgtcgatcgaaggggagaagataggagaaagaggggcagaggaggaagaagggaaatttcaatgacaagtgagtcccattttttttgtaattgtagcatgtaacgtgagtgtgacgtcagccaaaaccgccatctataaccaccgagagactcaatttgcactggttttagaagatgaggttgcgttatatctggtttgtgtggttgagggatataattgaaactcgacccctatttgatggacctaaagtggatttttccattttaaaggaataagttcactttaaatcccttaatttatcaccaagtttgaaattcgtctctaaactataatgccaggtataacacacccttaatgtgcgaaactggtgtactcgaggtcccatagtaatatattgcccgggttgatgtagcggctgagttagtgtgggacccacatgctagggcaatttagtctggattaaaaaataaaaattagtggactccacatgtcagtgacacatcctctccttctctctatttctctccctttttcttggtggggttggtgggaacagggtgtcggtggcgtgggagcaggcactgtatgtggcacgcgagggcatagggagtgggcagcggcatggaggatgaagtcggcatcggtgatgaaggtcgtcatcacctagggagcccttggccatcgtgtgcgcttgcacctgcctcccctcctagacagccctcctagcgacgacgaggtcgagaacccagccgtagtgctccatgggagggtccaaccccgctaccaagcgggtggtgagtaggtggaggacctcccgcaggtcgccttcccttaagaatgacaacatctgccactggagtgtgtttggggatcgaatcgtctaagcagctagaatccgccctcatcaccgaggagttgcgatagaagatcagcagcaagggtgccgttgttccgagaagatggacatgtcacgagataaggccatcatgggggccctctacgtcgagatctcgcctgcccctccgcaccagccctcgcgactcatggatggtgtaggcactagacaacaggcatcgacgtcgatggccgagtccaccgaggccatccccaacctcgtatgtgccacctgtggcaagtcctgccgctcccagaccatgagatccccttgcccgccccccccccatccatggttcccaccagtagcagccgctcaatccactgccaccccttttccatgacaaggtgtgcccgtgcaggaccaagcctcgctcgcacggcctcacccgaccaccgccaccgcacaaatcgaagctggaccaacttcggttgctttccaccgaccatgaacaccaccttccagggaacacctccgcctcatcagtgctgccaccactaccgcagttgcttgctggctcatcaacactgccctccatagtcgccgcttacatcactagatcgcgatttcgctcctttcttcaggtccctcgggcagaacagcggcggtgcctgcgcggaaagggagagagaggaggagggagagaaacagggaatgagaggggggtgatgacgtgggccccactacaatttcttttaaccgaacactcactgacatgtgggtcccatgaattttttctgacttgaagtaccaagtcaacgccacgtcagtcaaaaaacagtccaaaataccttaggaccttatttgcactggttttgagagttgagggacgcgccatatttggtattacgattcactaacgaattttagactccacaacaataaggggcctaatgtgaacttattcctattttaaaacttgctgcaactttcaatcccgtcgaaaagaaaaagcccacagaaccacgcgctcgttagcctcctcgttccgacggcccatgtgatgcacatatggcccatattgcctgggaaggtgacactatcacagcggcgaggcccactaaactcgagctcagcctctctcgctcgtcacctctcttctctctccgcatctcccgtctcgctcacgccgccggtcgccgccggcagcctcaatctccgctggcccttcgtcggctgaaggatcaaggattcaaggccctgaggtggtatggcgagccaggagaagcccacgccgcctcagcatccgcctccgcccccaccggcgccggaggtcgcgcctcgtgtgcgcgggttcggacgggcccaccgggcgacggcggaggtggttaccctaacccgccggacgcggcgatccccgacgccgcgacgctgcgggagcagtggctgttcgcggtgcggcagtacagcaggtggtactcccacgcctggggcaccgccatcctcgccggcgccgccttcttcggactcggctggctcgtcaagggctccaaccccctcccgtcccgcgctgagccccacgcctccaacgccaaggaggagggcttaccggtgagaaccccctctgattcttgccttttcagagttatttatttctttgcttgaaaataatggcgagttcgagttcttgatccgctggttgatattcccatattggaatggaatggggtgttggatagcaagactatatatgattctgctgagttagtttcgatatgattggactggtaaagacaaaaattggtggttttttgtgtttaagatgagtaatgagttctagggaagagtggggttgctactttctgcatacttgcaaattgacaaaaggatgctgtgaaacgcatgggtgtcgtgaaaaaatattggcgacactagtactttatgcagctcatgaccatttaggtttgcaatgtcaactccttaaatctggttgttagcttccaaaagttccatattggaaatgccaacattgaatttggagaactatctgacaagagggatgagctatagaaacattgacctttttatataatgttgaatagtagaacatgaacaagtccagtcctcttgtataaagttgctaccagttgcttcagattcctttagtttatagtagaacaagttaagaactttgttctgttaagtttcgacttaaatttatcagcattgattaaatttttgcttacaatggtaattggtccgtcacacataactagagaactgttttttgtaactttggcaatccatcgcttccaaatagctttgtttaaacatttttggtatttagtgaacaagtgagcatcttaattctacatagttgttttaagcgttatggtttcgtgcaatgttttagaataaggtctacaaggccgcatacaaggaacgggtgccccaaccttgtaccgcttaagccgcataagcggctgattgtaccacataagtgtccaatcatgccacataagcgctacaaggtgggggtgaccgcatgaaactgcatactgctttttaaaatattgggtattgtgtgaaacccttttttagataagttttatagacaaaataccactaagctataagaaacactgatttgatttgtttgtacagttagcaagagcaaacaatacttggaaacatcctacatgtgcatataactaaagccgaaaacatcaccaaaattagatttgaattgttgattgcttttcatcaaaccaattgaaagactagcaattttgctataaaattttgaagatcgattatccgatccatgcatgttttatattttataaactcatttaatgaacagttctgtatatcagacattcatatggtatagttattgtactttctgtgtcattgtattgtttacctcagtctgcaatagatatgtatgaataatgatatgtgttatttgtaggttgaaatcgtacatgacaaaatatgtacaaatgccactacttttcattcaacttaaaacacaaagtcatttttggtgttcctcttgtttatggaagtttcttttgagcagaaagtccttgcaggcgagccctccccgcgtgtgagccgcagccgccgagcttgtggagctccatctcgctcgctactgccgccatccacctgagggtgagaaagagagggtaaagaggaaggagacacgtgggcctaaaatttatttttgttgttttactccactgacatgtgggtcccatttaaggcttggtgccacgtggatgaagaccaagtcaacctgccacgtgggataaaaccgctcgaggagtcgatttgcaatggttttgtaagttggggatgggttatacctggttttgcaatcgagggatgtgattcaaccagggacatgagctgagggaagcaaaatagacttattcattgatattacacaacgaaccaagaaactatgcatgcaatacagggtacattatcttagtacatcacatgaatgatttccaacagatagagtgactggggagatatgtgatggctacgatgttcactgatcatctttgaggtgagaagggagcattttatcttcggccaatctttcgagttgaagggcgggacggctgggatggatgctgacggagtgcaacaatgccgcctccgcctccttgacgtcttcttctttggctaagtggcagagcacaaaaacctttactgtgcgaagagaactcgggaggtgctccaagccaatgtcaaaagcaattttcctgtccttgaagaagtgcacgtccaagctgaagtgaagtaattccaggtatggcatgactgagacaggtgttgtgacggcagcactagcagcaggaggtggtacaaaccggatggaggtcgtggccatcgtgcagaatctcaacttgcggaacaacagggtgtcatgaatcccaattcttataattgcattccccatcgcaaatagatcgagtctgcggagcattcgcagcctgccaaggatttccatgtccgcctgtcgcaaaacctgcaacgacagggacaggttgctgaggtttggcagaagtgacggattaatccacggcggcaggctggtgaaggtcaaacacctcaggcacaggaactggaggcattgaggagtgacgaatccttgctcccacggcacacactgccccaccgctgcccaacggtcaaaggcgtgcattttctgtatcttgggcagacttcctagagactcgataatgtccgttgcgggggcaccctcgaactgagtacagagcaccctcagatcctcgagcttgcccagctccttcacaaactgccctgcagctgcagcatcaggccacatccacaactcttgcagggacgtcaggttcccgatccaatccggcacccttgttttaatatcggcttgtaggcacagcaactgtgtcaacttgcccacgctcgacggcacttgctctatgccagtcccccacagatccagcgtctctaggaacctcagacgtcccgctattccatttgggagctcagaaagaggtgtgtacgtcagtgcaaggtatcgtaggtgaagtaaactgccaatatgctccaggccgtgaaggtcctgcaatgattcacaattttgcagtgccagtacacgcacagcttcaaatttcgccggtgttggcagaacatctatgtatgacaaaccattggcactaaatgaccggattgtcacttgtgactgtgccgttcccaggttcaccactgggggtaatccattcttgctgcttaggatggctatccttcgaccatagccctggtgagatgtgttgtattgttctatacccaatacggtgacaaagttttcactgcttgacaatgaccggatcagaccgagcaccatgtcatgaacacgacagcctagtatgtagtcttcattctctgcctctattggcatgatcatacgtcgttttacaagctcgttgaagtaaccctctcacacctcatataagtctcttccttcttccttacagacaaaaccttcacctatccacctccatatcaatgtttgtttaccaattaaataatcctctggaaatgcgctcaagtacaataagcatgttcttagatgataaggcaaatgatagaaactaagagacaatatcttcatagtattatccacatgccggttgtcttttgcgccaagagcaattgaccgatacaactcagaccagtcctcccttggtttactctccaacaaactagacgttgtaacaatggccaatggtaccccttcacatttcctcaaaatttcatcacaaacctcttccaaatcataatcatcatcggggcattggtcttcaccacttaatattcttctatgcaataaccttctcgagtcaacatcagaaaggtgttttatttcataaacatgaccgacttcctcagcaatttcagaaatacgagtagttatgatcactctacttccacaactactgtctcccaggacttttgcaatcatgtcccaagcatcgaatttccaaatgtcatcaataacaatgatgtacctatcaagaaaacagtgcaagagtttagcaatgtataaatacacgttttgctcctataaatacaagaaacgtgccaataacgggaaaatggaaacaaacaaactggtttcatctctgaaccctgatcaacaaatgcatcatcataacgtatacacgagtgatttcatgagcaatactataatgttgtaaatatgtacaatgttatgatgatgcttagttttttttactatagttaaattaagtatctgttctatcagaccttaaatacaattttgtagtacatgcttttgtcaccacttatattagtttgagagacaaagtggaatttttttatgatgattgttgaaagtagtttgcccttcaggacaacccaaaaatcagattgcctatccattcatagatcaacaagccaacatttaaaatatacggagtagttcaataccactccacctcaaaatataaggtctacaaggtttttacacagtccctaatgtaaaagtttgggcgttaatttcttacatgatatattatcaacaactaccagattaacatcatacgaaagtacttcaaagtacaaatctattgatgtcaaatatcgtgaaactaaagaacatatatattgagagtaatttttactagtcaaaagttgaaaatgccgacttctcttaaacaatgattccttataatttggcacatactaggtcgtacatgcttttgtcaccatttattagtttgagatataattaaagagttatgtttgttgatgatcgaattagttttccttcagttattgagaaacccctaccaataacctccaagcttgcgaatagagtacttaattaccagctaataaaagttaacgaaatggaatacaaaaacattttgccgcaatttctatagtaaaaactaaagagaaaagaagtttatacaacaaaaacattatctagaggtgatgtttaaatctcctttaaaatcaagatttatataccaagtaaaacaaaattcaggatttctacagagcagagacactttttagaggaatttcaaaaatttcctagaatacatttacccaaagcacatgctcttctatttattcctatagaggcatcattttggcactctaaaatttgctcgtgcttgatttatagtaccatggtatgaaagtataatatgcgagggtaattagaataagaatcatgagcgcacctcttgttttcaaggaagtcgtagacctcgttcatgagtaaccttacatccttttttgtgctatggatattgtcgaacttttccttgtcaagatcatttagaacgtccatgaagaccctcttcaagtcttgattctggccaactggcacaaatgccgagcattggaatttccccttaacactgtcgtacactgctctggagagagtggttttgcccattcccccggatccaacaatggaaacttttatcatcttccccaagggcaagttgtcaccctccagggaaaggatctttatgatgtcattccttgtgccatcaataccaacaagctttgccgcatctgtattcgataacaggatgcgaggatcatgggtggacaattgtgtggcagctaggttagcctgaagatcagaggctatgtatctttcacgcgccttggacacctcctctagtttggtgttgatgtcttggacgacgccagatatctgatggcgaaccttgatcttggtgaacaagccgcacatcatgtgcacaagccgttcgaggcaaccggggttggcaggcacactgccatctacacgcaccagaaaggcgtcgatgacgtcctccatgtcatacgacagctcccggactttgcttgcccaaatcctgacctgctcatcaagcaggtcgggatgcatgctgccaaccttgcgaagggcagcatgcatgtcctcgagctcactcttgagaaaattgattttctccctaacgcccgtttgcagcttgtactcctctttgagcagctcggtcagtttggggacaaggctccccatcgcctcagccaccagcgccatggctcgctcaacttgctctaggtgtgcgtatcagtagtgtatggtacgctcggtgggatggcctgctgcctgcagtgggggagtagaggtatatacatttttcttgcatttaaaccctagctggcctgggaacgaacgctgcgtgcacctcgatgaaggtcggaagctgtgtcatcgatccgttacttgcgggtggggcacgtgcaccaaccggccagctgctctcagctcatcacgaattcatcgatatgcatgtcagaaag

SEQ ID NO: 16216 - DNA, 805 bp, Oryza sativa
ggaccaaggttgggatagaggggcaggggtgccacgctaatggcagccgaaggctcaaggaacaggcactatcccaagaggatacctgcaaaaaacgagcactcggctaaaaatgccccccggaaaacaaccggctctaagacgaaggaagtccaccatgactcaaagacaggacccaagaaaccaactctgctgctgcgaagcttgactgaagtaggagtactaccgctacggtcgtatatttgcatctggagatggatgacccagcacctccagcaactagttgttgttcctctaagcaaggatgtcgcaccaccagagctgcttctccagcgatgcaatgttgtggttgccaatgaagttgaactggagattgaggccctccaacgatgccgacatgctgcctaagaaaggaacactcttctgggtaaccttcaaacaaccagaaagtgagaggacacgaagtttgagctgcctcgctgacgccaacactgcaacaccgtagtcgctgaccatgcagtttgagagatcaagttcggcgagatcggtacagccctcagaaatggcaaacaggcttgcatcagtgatcctgctgcaaccttcgagactgaggcgtgcaagcgaactaccatgtgccttcaccaaggcagaaacagtagcatctgtgagattctcgcagccgttcaagtcgacatggaccagcccactttcggaactcttgatcaatggaaggagcccgttgtctgtaactgcaccgagaccactcaagtcgacattctccaactgagggcagatcatgccgacc

SEQ ID NO: 16217 - DNA, 1327 bp, Oryza sativa
cagacaaggccggagacaccctggtcaccgacatgcgcgcaattcttgatgttcaccgactgcagcttcgcgcagcaccggccaatcgccttgaggccctcgtcagcaacaccggggcatgcctcgacggtcaccaccttcaagtccgggcaaccctgagcaattgcagcgaggcccttgtcggtgatcagcgggcagccggtgatgtcaagcctcgccagcgaggggcagccggcggcgatctcggcgaggccggcatcggttacctgagggacatgccacagggcgagcgagaggagcgacgggcagccgcgcgcggcggccgagatgccggcgtcggtgacgccgcgcgtcgggtggctcccacggatgacgaggctctcgaggcttccccggagcgcgtcggcgacggccaccgccatgaggccgacgtccgtggcctcgcgcccctcgaggcacctctcggaggagcagccgccgccaagggggacctcgaactcgtcctcctcctcctcgtcctcgtcgacgaacacctggttgaggtccggcaccgccgccgccgccggctctcgcttgatctccgacgagcggatgccgccgaggagagcgagccagcggcgggagacggccgcggaggcgcaccgggcgcgggcgcccttcacgcggcggaggatctcgaagaggcactcgtcggggagagcgtcgagcgacggcgcctcccgctgctgctgctgctgcttctgcctcttggccgccgtcaacccctcctcctccaccacctccaccgcctccgcggcggcggagacgaagccgcagggcggcacggcggtgacccgcgcccgcttccgcgacctgacgccgccgaacagagccgccgacgccgccggctccatcacaagaacaccaccatctgcacaaagcaaacccaaaaacacacatcagcatgaacccaaacccaaatccattaaaattcctcatcttgtttacctacctctgtaatcgtggaacggaggcatgccgacttcttcaagaacaaatcagaccaacaaatttggccccaaaaaacaacgcaagaatcaacaagagatgaggagaacgccgaacccaatcgccaggaggcgagaggggaaaaaagatcgcagatttagtgtgaggagatcaagggaggtggaggaggtgatggaggagagggaaggaagaagagggtgggtggtttttatgtgctttgggtagagaagaaggggggaagccaaagaatggagaggatgatgaggattcctgcccaacttgcacaagttgtgtgtgtgtgtgtggagggggggggttg

SEQ ID NO: 16218 - DNA, 2722 bp, Oryza sativa
gtgctgcagtgatgcagtgtgctggacatgcctgatgcatggacctctttttttcccctctttttacagtgggatggatggggaggaggcattgtggagttttgattgtgtttgaatttgatagctttgggatgaaaaaaaaagaagaagtgttcttgttagatttttattttgaaagattataattggatgcatacggctgtataggcatgtagtagtatgcgtttgttctcttggttgttaatactacttatgttttttaatatttcatgtccttaattttttatgattcgtttgattattcatcttattaaaaggttttgtgcaaatatataaaaatatagtgaagatttaataataactcaagtcataagaaactaaattgtaataaacatatgaattttataataagttgattggtcaaatgtattactataaaacaacaacgaagttagatattaaaaatggagagagtataacctcggacattagaacatcaaagagaatcggtaattcgtgtatgatcttgcacatttctccattaccattctgaaaaataaaaatctttaaatccaacttctcaattggtttcgtcatcacaggatattcaattaaaaaaaattcaacaatttactttttttcacactagaatttcccacaatttttgcatcgtttttgtgttgattaatcggcatatgattcccaatttaaagatgctttgttctgatacataggtcatgttcttttttccaataagagttgaatgaaaattaagattttcgtggcacgcttttcgaactactaagcggtgcgtttagtgctaaaactttttatatgaaagttgctctaaaatatcagattagatttattttttaagttttataataattaaaactcaatcaaatcatatgttaataccatctcattttacgtaaaaaacttaatcttcatcttcaaaagaaaagagcaccaccacagtggtagcatggctttactaggaagctgtctagtacattaccatattcattactgaacaagtttgcatttatgcagttcacgatctgatttttactcctttcatttttcaactctccttttacaaaaccgctttcaatatttatcaatgctctctattattagtttacatttaaccaccgataaattttaaaaggttaaagcaatgatgaacgaaagctatgcagcataataacttttataaataaaatggccaaactttcaaatatatactaccagttaaagcgaattcaactaaaagctactaacttcataaattattaagtgaagtgttactgcagattaaacttggatgaattaatattttcataaatgcacttaacaaaatagcttaaaatataaacacaaggtctacgcaatgtggtagaagatttttttctagaaaatgtatttttcaaagcattgagcaaataatatgctttaaagtttggtgaataatttgaaaggaataaggctgagttattttgagcactttgggttagctactcccttgtattttgtgagaatatttcccgaagtgttaaatggtatgtgttttgcaaaactttctatatacaaattaatattctgaaaaatcaaataagtttattttaaagtttataataattaatacttaattaatcatgtcctaaaaagttttcttgttttacgtgcggttgtttagcactgctcgaacgaacggtgactaggccctgttagaggataattaattggtaatcagcttctgataatagttaagttttataacttcttttagtttttactaaattctataactcaaaatcaaatctgaatgagaatctaatttatttaaggggattttaggacaacttacagtgcccagaaactccccaacacggggcctaagcccagataaattaacaaagccagtgccccagtataccaccctcaagtttttttcttttttttttaaaaaaaaggcccctactgtggacatgcgccacgcggatcgatccgtggaaaatgccggttcgatcgcccaactctgcctgctgccaaatacgcgcccgcgcgccgcttgatcaaccgatcgatcgagactgatctccaggtgagaaacctgcgagaccgatcgatatgatcgaccgaccacgcccgcgtccaccgctcgtccatcgaacccaacccctcgcgctcgccgtcgcgcgtgcgtgcatgcacctacatcaacaccaccctccgcgcgctgccacggctgtggctggctcgcgctgcgtgttccgtgtgcgcacaagtgcaacgcacctgggctagctgggcgcacccaccacttataactaacggaaagaaagaaacagagaaagaagagagatgaaacgggaaaaagaaaaataaaatgcgatacgacatgcaacggcctgctgctgctgggtgtggtggtgtgggtggtgaggtcgtccagtcctgtccaggtgcatgcactattgcgcccctttttccttcctcccccagcttctttcgcccttatcaaatccacagcttcgtcttaattagacccctgttaatttaaaaagcttaagaggcagcttgtcagtcattagcttctgagaatccagcttaagaacccgcatgtgacttctagtttattttcttttttaataattttttagtttattttttaagtccgtagttactccatccatccctaaatataatggattaatga

SEQ ID NO: 16219 - DNA, 1703 bp, Oryza sativa
agaaaatcaaattaacttcagattataatcgatagatcaaaggcttaaaaagttgtggtaggcaggtttcccttttcttttccatttctgccctggaaatacatataggattatatcacaagattaattgctctcatccttgagaacggctaagtgaagaagatccgacatacacgagagcatttcgacgttcacaagtcattccagtttcatggcagcaaaataaccagcttatttactactactacacaagaaacctatctatatccatgttacatacagactgcacaattggccgctatatggactatctacagttctatattaacaatactaccaaaacatctggtgcatgaaactagaatggtacactgatctactgaagaactgactcagctatgtggtacatgcagcgcctgcaagagcaacttcggtggacgggctaggagttgacaacctgaaaacctgaaaatcccactgatgcaggagttgcagctgcgttagcgccaggctagcatgtggctgtcctcagcagtgcggatttcgctgaaacttcaatcggtctccagattatgctttccatcttgttgcacaagttcttgtagaactgcaatgagtgtaaatctgagttagcaatcgttccggatggacgaaaagttggatgttgcaccttcgaatgagcattttgacacattgtgtgaaagttatcagtgtcagtcaggcagtgtcagtcatttttttagatttatgaactagtctaggcaatcatgctactatattcgattaggatacaagacgatatgtggaaagacagaccctgtggtattccagtgtgtcaccagcaacctttcgaacatcaaccatgaacagagaaggagcaacttcgaaaacctgcgaatgatgcatttcaaagcataagacagcatgaaaaatgtagtttgtgaatgacaaacagcaaaatgttgttccccaacaaagggcaatgtaagactacctgtagaacaacagcaaacgggctcattctgtttgaagatacaccttcaagacgcaactgcagaaaagagttagcaataagtatcattacatcaagagtaagaaatgagttgcttgttgaagaaaatgttttgtaattaccttgtaattctgagagtggaccttaagacccatagtctcagcaacaacttcaattgtagctactatagtctttgctggtttccttgagacaaaacgagtttgacgtttgacaaactcctacaaatataaaacccatcattattgcaacatgagcactccatgtgatgaaagttgcatcagacaacataagttattcatgaggactgcagttaatgcataaagcaaacaccaaagttattcatgacgtgtggcacactatgacgtatggtccacgtaaaataaaaaaatacatactaaacatgtctaggaagatctaatgtaagagcacaaacattgaaaagtgggttcttctttctgctatacgagaacattgcaactagaatgaatatatggttggtgtggtcaaatacttcacaaactaaacaggtgcaatttaaaccatggagattagctaagaagcaagcaatcagatgtttttttctccttttatgcagggtttccatttccattcaaatttggcaaaaaacagaagccgtctgccaccaaccagtacactaagcgataagaaa

SEQ ID NO: 16220 - DNA, 1171 bp, Oryza sativa
tgagtagaacgattatgtaggtgttcacatcaacaatttagggaaagaaagacttatgctgcacacattagtaatgaagccaataccttatcatacagtgttggaagatcatcttcctcaaaaggaaggtatccagccatcaaaacatagagaataacaccacatgaccaaacatctgctgcagatccatcataaccattgttgctaagcacctaaaacattgacacatggtaaagcgcatatcatatatgtactaaaaaaatgcccctaatcttgtctaaggaaatggcttgaaatgcccatatcacaattttatgaactagttcagacaattaaaatcacaatagcttgaacatggtgaaataagacagctagagatatttatttagtgatgatggcagaaatatgcataaaaatgaggtttagaaccctgaagagaactaaccaaccaaataactgcgagacaggtagagaaacaaagaaataggtaatctctttctagtctaacagacatttgtatcatacatacaaatatgatctataaagaaaatctaggaaaattgaattgcatcccgagtaactcgtctaattttgcagacatatttcttgcatgtagtgtagctaatcaattagctccttgccaaaaaaaaaacatttcgtacagttcaatttaccatgcattgagagatagagagagagagagcatcatacctcaggagcaacataatttggtgttccacaagttgtgtgaagaaggcctactccctgaaatccctcaaaaaagaaatcccaatcagaacacttctaggatagaaatacagcatcattaaaagcaattactgagcttactttctgggccaaagtgctaagtccaaaatcagaaactttcaagtttccacgtgagtcaagaagcaggttttcaggctacataacatgcccaaaaaaagggtaagcatgagatattgcacctagtgaataggacaaatgatagccaagtgtctcttatcagtaacggaccttcaaatctctatgatatactcctttgctatggcaataattgatggcatcaataagctgctggaagtacttccttgcttcattttcacgaagcttcccttggcgagcctacagatatttgatcgcataggttcatattttaagaaaatgcaca

SEQ ID NO: 16221 - DNA, 1530 bp, Oryza sativa
atgctgatggtaacaatgttgcggatgatcttggtcagatgttgcaggacgccaaggaggattgcgaaagtgaaaagggggcccataaattggacaagatgttagaggaccacataacatcgttgtacccaggttgcgagcaggggcacaaaaagttggataccactctggagttcttgcaatggaaagcaaaaaatggtgttagtgacaaggcatttggtaatttattgaaactcgtcaagaacattcttccggagggaaacaagttgcccaagacaacgtacgaggctaagaagatagtctgtcctctagcactggaagttcagaagattcacgcatgtccaaatgattgtatcctatatcgtggtgaggagtacgagaacctagaagcatgccctgtttgcaaagcactacgatacaagattagacgagatgatccaggagaagttgacgggcagctaacgaagaagagaattcctgctaaggtgatgtggtatttccctataataccaaggctaaggcgtttgttcaggaacaaggggaatgctagaatgatgcgatggcacgctgaagagcgtcaacaggacgggatgctgagacaccccgccgatggttcgcagtggtgaaacatcgacagaaaatttaaagactttggaaaggacgcacgaaacatacggtttggtttaagtacggatggcatgaatccttttggagagatgagcagcggccatagcacttggcccgttacgatgtgtatctacaacctccccccgtggctatgcatgaagaggaagtacataataatgccgcttataattcaaggcccaaagcaacctggtaacgacatcgatgtgtacctaagaccactggtcgaagatcttaaactgttgtggaagaaggaaggtgtccctgtgtgggatgaggacaaacaggaggagtttaacctacgagcgctgctgttcataaccatcaacgattggcctgcacttagcaacctatccgggcagtccaacaaggggtacaaagcttgcactcactgtatggatgaaacagaaagtacgtatcttaagcactgtaggaaggttgtgtacatgggttatcgtcgattccttgcagcaaaccacccggtacggaagaaaggcaagcactttgaacataaggaggaccactgtacaaagcctaaacatcgcagcgggaaaacagtgtttgctatggttaaagatcttaaagtagtgtttggaaaggggcctggtagccagcctatagagagcgaagatggtcacgcggcgatgtggaaaaagaactctatattttgggagttaccctattgggaattcttggacgtccgccacgcaatcgacgtgattcacctcactaagaatcttgcgtaaaccttcttagcttcctaggtgtatatggaaagtcgaaagatacactggaagcacgtaatgatctgaagcatatggaacaacgcggtgaccttcacccggaaccaaaggagaaaggaagccattacttgagtccagccag

SEQ ID NO: 16222 - DNA, 2325 bp, Oryza sativa
ttttcaatataagacgcatctgcttgtcaccttgtcaaagagatcggtattctcggtccttgtacctgcacaacatgtttcctttcgagaggtacatgggcgttctgaagaagtatgttcgtaaccgtgctagtccagaggcaagcatcgctaaggggtatggaacagaggaggtcattgaattctgcgtagaatttattgaagaccttcgcccaatcggggtacctgaatcacgccatgaagggagactacggggaaaggggactctcggaaggaaagcaataatgacggtagacaacaatttattccgtaaagcccatttcacggttctgcaacaatcttcattggtggctccttacatcgaggagcacttggctctagttcgcgcaagaaacatcggtaagtctgatgcatggattactaggcatcacattgatactttctccacgtggctgcgacaacatctcatgggtaacgagacgattaaccaacaactggccttcctggcgaggagaccatctggctcgatcgcgacattccagggatatgaaatcaatgggtacacattctacacgagggcccaagacatgaagagcacgaaccagaacagtgctgttcgtatcgatgccatgggacacgatggtacaactggcacgtattacagtgccatcgaggatatatgggaacttgactatggacctctcaaggtccctctgttccggtgccaatgggttaggttggctggtggaggcgtaacgattgatgacggtgggatgacaacagttgaccttaacaaggttggatactcggacgaaccttttgtccttgccaatgatgtaacccaagttttttacgtcaaggacatgtctagcaaaggaaaaaagggcaaagggcctgacgagccgaagcgccacgtggttctcccaggaaaaagaaaaatcgtcggagtagaggacaagactgacgaggattacgatcagtttgatgggtaaccccctttcacggtgacgattgaccctagcatcctcctatcaaatgaagacaccccttactcatgtagcgatcacaaggaaggaacaatagtgaggagaaagtacgtgcggtcaaccgtcaccgccgatgtattgcagtaattgttctatacacgatgtaaactatgttggatgtactgaatatccatacaaatcaattgttgtatagcatatgttaaatatgtatgattattagaatttttatcaaattgaaatcatccatatgctagttatatatgattattagattttttgttaattatgtatgattattagaattttaatcaaattgaaatcatccatatgctagttatatatgattattagaatttttaaaggttttaaatcatgcacgtggtatttacatatgttaattataattttcaacaatttaatatcatgatatgctagttatatatgattattagattttttattaaaatcatgcatgtggtatttacatatgttaattagaattttcaacaatttaatatcatgatatgctaattatatatgattattagattttttttattaattttaaatcatgcatgtgctatttacatatgttaattagaatttttaacaatttaatatcatgatatgctaattatatatgatattagattttgtattaattttaaatcatgcatgtgctatttacatatgttaattagaatttttaacaatttaatatcatgcatatgctaattatatataattattagaatttttaataattttaaatcattcatgtgcttattatatccacgtattctactacatacaacaataatttttcgaaggttttatcattaattgttcgactttaaataattgtaatgcattatttactattttagaaacacatatgcaatgaaattcaagacacagctgctattatctttagtcccggttcctaactctaaccgggtttaaaaagaatttagaaatagcgagaaaagatctttagtcccggttggtgagaacaaccgggactaaagaatatctttactcccggttggtaacaacaaccgggactaaagatccgggggtatatatattcccggtgcgccctcgtcttctccaccaacacttagacattgttcgatctcggcttctcattcgccgccaccgtgcctagggcaaccccgcgccgacaccgccgtcgtctctcgccgtcgcttggcggtcctcgccgcctccgccgcagacgccgccgccgcatctcttgggtgagagccgtcgccgcctctctctctctatctcgatctcgatctctctctctctctcc

SEQ ID NO: 16223 - DNA, 1360 bp, Oryza sativa
gattacgaaacgtgaacgaacgtgcacgaaacgcttacgaacgtgaatgcacttgtactaaaagtgtgagaatgaacgcgtttatactaatacgatttactggtaatacatatatgattatatatgtaacttggcccgtttagactaatacattttcctggtaatgttgcagagaagacgtcgtcgtcgtccctcaagccgaagtggtagctagccatcgaaggaattcgcgcaggcaagtgatgtaaagaagtgattgttagatatttaatattagattgttagacttagcatatatgattattacaattttaatataagattgttatcgatttaatataagattagtagcgatttaatataagattgttatacttagcatatatgactattacaattttaatataagattattagagattaaatataagattgttagatatttaatataagattgttagacttagcatatatatgtatgattattacaattttaatatgagattagtagccatttaatataagattattagacttagcatatatgactattacaattttaatataagattattagagattaaatataagattgttagagatttaatataagattgttagatttagcatatatatatatatgattattacaattttaatatgagattagtagccatttaatataagattattagacttagcatatatatatatatatatatatatatatatatatatatatatatatatatatatgattattacaattttaatataagattagtagcgatttaatataagattgttatacttagcatacatatattattattacaattttaatataagattattatagattaaatataagtttgttagagatttaatataagattgttagacttagcatatatatatgattattacaattttaatatgagattagtagccatttaatataagattattagagatttaatataagattagcagagttttaatattacggtacgcaaatacatcctatatacctaacaaatattttttgtatgcacagatggctgatcgcgatgaggaacagatactatacgatacaatcgtagagggaagcagccagtactggaacgaaggagaggggaacgaggatccaaaccagtacttgaacgaggaggggaacgtggagagggatgcggaggggaacgaggaggggaacgatgaggaggaggctagtggaagtcatccctctgctggacagaagagggcacgcggacaacgaggtgccgcgaagaagatagagggtcagcacatcataactgaggatggacaaagacggccgacctagtgccccgacaggggcagc

SEQ ID NO: 16224 - DNA, 4260 bp, Oryza sativa
aaagaaaggaaaaggcaaaagagaaaagaaaagaaaagaaagagggagagaaaggaaaggaaaaatttagggggaaatttaaaatatttaaaaatattagaatttaatcataggcttaatgaaaatatagctagataaattcttgctatttaaatacctaaaatactagcatttaattataggatcaattatttaagaactaaacaattagatgaattcttatagattattatagattatttttagtaaactctataagagattaattcgcggtagtgatctagatgtaattaaggactagataattagataaagtcttaggacatgactttaaatcacaaaatttcttaagaaacacaaatattttaggtagaagaataattccacttcgcgaataaagtagcctatatagaattcacctcccgcgctcgtttctcaattcggtcattatttggattttgtttgaattctaatcgaattcaaattgttcttacgcacgtaactatagagaccgagggagccgcggatccggatgaagaccaagacccacaagacctagagcaaggcaagtcatcactattccttgaacatgttgatcccaattgcaaaattgttttgtttacaaataaaattgcatgcaatgatgaacatcctacttgtgattatgccatgccttgattattgtttacccttaaatccttgtaaccatgatttacgtaaaagtccctagtcaactatgataaatgcttagaaatgctactctagatttatgcatactcatatttatcaaatgctatatgcttgggcaattatctttgggaaggtaattgagatgcggcatgtggagacatgagcgccacattgccatgatattgatgacatgatttgtgaaaggaaaatgaaactaaacaaatgatttcgactggggcggatggaggatttgggtggtatccggaaaaaggctagtgccatccctggtcaattaaggaccgagccatgaagttaagcatgaaacgaccctcgtacaaccgcacttctcgtatgggtatagacctagcggaatagatagctgagcggaggcattatccatgcatagtggtttcttgatgtgtgaggcaggggctctacggtggggcagccattggtagaaccgcgaggcgggtgtctacagtggtgtcgccatcggtaggactgccatgagagaatttaaacataattataacttaatgtatgtgtgagtctttctttcccgggtgcgccagaactcctctcactgctagaaaccgtgtacgcctagagtgcaagaggatgtaaagttcatggagcgggtactgccaatgcgaggttatcaaaaagctttgtcgtgatgcgtctcatgtgttgggacgaggctcatgtgttgggcagtcacggagtgcgggtaaagtgtacatccactgcaatgtgagtaaaccaaatctattcgaatagccgtgctcgcggttattgagcaccgggacatgtattacacttggctagtctctaagttattaacttgtgtgggatgggtagttgcatgatgaatttatatgctgttggagccacttcctgagaagggggaaagtgggcgtcctcagaaaaccataacgattcaatggcgggaagctatccttgggatcacaatggatggtggacagaaccgtcattgtttgaatacaaacactggtactaaaatttgatcagtcaatgctaggtctgaggcttgtgaaaagaattacaaaactggctttacgcaaaagagccatagccatcctttgaaatacccctttcatatgcattgttgctgtggtggcttgctgagtacggttggtactcacccttgcaattataaaattaatcagaagcgggaaatgaagcttcggaggatccctatgcctactaccaggagggagatgaagacgatggcgctcagtaggtcttagtacggtcgttgcctgtggcaatggcatgccgctgcctaaattctgctgccttatctatttctgcttttggatgtattccggaccgctcggtccgatgatttaagacaatgtctaaggtcttatggtgtaataattagcactagactctcgtgtatgtgcatttggtatttcagttatgaactcgtgtgtaccagactacttgatccagggaaatggtactgtttacatgaatgattcctgttataaaaacgggggtctacacattcatcctgcaatggtcagcccatcaggcaatcatagcagctgcgcctcaatggggcaggtcggatcacagagcatggacgccatgcaaacccagggcgaaaccacctgccccgttgatgagatcacgcagcggacaccatgtgagctgcatattcccttcaagaacttatcaatcaaggtatgctcgtagtttgatgatttttgacttgtacattccgcaagttgctgcttaggttgattactaatagataacctctcatcacgtgaaggtggcgtcgggaatggccatcccaacggacccttccgggacttaccactgcaggccgattccagcaggatactcgagggtcgaagttgagctggtggaagccgcgtacgaggacctcgagttgaactacccaggaggagacggtgagacgcatctacgagacacaagccacgccatcatactatggcgcaagcggtacatcatccttcctgggtgacaagcggcgtctcgtgcaccatctcctccggctccgccatctcctcctgcaccatctcttccggttcctccgccacgtcctcctgaaccatctcatccggctcctccgccacctcctgctgcaccatttcctccgactcctccgcctcctccgcctccaccatgtcggcttgcacctcccaagacaaggtctcgccaagctccaccgcctgcccacacaagggcaacgaagaaggcgaaagttgacgccaccaaaaacaaggagccaccgtacgattgcagtcaagaggagcttgatgcttatgtggcaggagaggtgaagaggcaactcaagcctcggagtcctgaaaagaagatacctattgacccgagcgtgaagaacttcttcaagggaatgtccacaacaaacaaggaggcgttacagatatcggactatgaccgaacacttcagagagcctatcacaagaagtccaaaccagtccctcagcttggagaacaaccaaaccaagaggtcgagccattggtgaccggtgaagattttggcataacagaattcattgcagacaccggtctaactgtggatcagttggttcgaggcgcaccaatcccgaaggcggaagtggcatacaagtttgaactcggtaaaccgcttgtcaaacctgaacagctgcagtccctaccgacacagatgtacaaattccatgaacggtacatggaaatgagcgccaagggtagagagatgttcggagcgaggatcagaaaccccgacttcttgcaaggagaagatgttctctggatccatttcaaggatctcttcgatctgtaccagttggacgccctcgacgtctctcttctgagcgcatggattttgtgagtatctttgagttcgatttgtttcgttcaataattagctcctggcatatatgtaagcaataatactttcctttcatcgttgtagaatggagattcgaagggcccgacggcggagggtctacgatactgggttcatcgaccctcggaaaatcaacaccgaaatgatcgacaagtacgagaaagacacagaggacaatctcgtccatctcctaacgcagcagcatttcaagacgtacatactactgccgtacaacagagagtgagtttttattgtcgttcgaacaaatttcgttcccatacatatagcatgtacattttcgatcatatatatatatctcatctcacgcatattccagattccactgggtcctgttattcttcgacttggacgcatgcagagtcactgtgtacgactcaatgaataaagaggagaagatttttgacaaggtcttcaaactaatagacaggtaatataatgccatctattccaaagtcgcggggaatctattgctattatgttgatctcaggtaataattaatcatagcttgcaactgcatatgtagggcttgggatcggttccgttaattggtccgcgggacttggaaataaaaacttggacggaggtttcattttccagtgaatacatgcatgatccaaaattatattgaattaatctc

SEQ ID NO: 16225 - DNA, 7158 bp, Oryza sativa
atatatatatatatatatatatatatatgtatatatatatatataaccaaccatgcagcaaacagggccatgcaaaaaaaaaatggtgcaccgatctttagtcccggttggtaatataaaccgggactaaagatggatctttagtcccagttatttcacccgggactaaagatagctatctttagtcctaaattcgtagtcctggttggataaccgggactaaagggggttaccaaccgggactacagacggtttctccaccagtggatcgtcgtccttgaggccctggcgatcgtcgtccttggcgcaactcaagtcaaagacttcgcccctaatcaattaatcattgcactagaaaagagataagggacgaaattgaggactggtaaaggatttttggaggacactcagtttctttttgatttttttaggtcctttgattcatagaaaaagataaaagtttttgtataggattatattcctatggtcaattttataggaaaaataagtaagagattagatctcttcaaaactttcatttggttcatttttttcctttcgtgcagtcaaaggacatttcctcctgtttcctgtgttttcacttcatgtcggattgaataagcagttacttcaatttttacggttttttctatatccatatttttcctttcctgtggttcgaaggggctctaagactttgatttatctctagttcttcatcacaaaatgtagaggggaaaaaaagacttttgaccttagtttcttgacgtgctacttctacgagaacctaaaacacacacaggatatacaaataattactccatctaatcattgttttttttaaaaaaaaagagaagaactttgcagtatttcattgatagtgaagatagagcaacatcaacatgatcagaaaggataaatcaccgtgtccgaaaaaagatcaagaataaacaccaacccaacacacaacacctcacaaagaccggaatatccctctagtaagtattcccaatgtcatatatctatgacaagtggaggtaatatttgataatattttttaattacacgagtatatgtgggaacacacatggaaacaaacaaaaatgcagaattattttgtaccaacatttttcattttgcccctgagggattttttccatcttggctttttaccactaaggtgaaaattagtcatggtttagcctcacatttgcatttgccctttggcaaaataaatagacatagtgaatgtttatattagagtgtcatatatatgctattttttatggataagacttctgatactaatttaacagcaagcgattttcgtccaatccagatcctcagtattgcagactcaatgtggggctgaatgtggggctgagggtctgtaaggcccatatgtcagtgagcacatgcagtactgcaggagccgcatccattttcatcaccttgactcttaagacgtcaaaagcaactctacaaacaaatttaatgagctttaagatgcatttgtgaaatggggagcctaaagagtctacaactcgtccataactttagccagtaggaacagtacaactgaatggtatttctttaattttgtcttccttttctgatattaattttatcggaatatattcagggccatatagtctttgaatagtcatgtttttttatttaccaatcactttttaatatcgagattaatatcaaacattcacatatactcttttttgggtgaaacaaatagtatttaattagagctccctttaaaacatagaaataggaaaaaaaaacataggaaccaagtgacatagattttaaattcctacaggaagataaaccatatgaaagtactttaaggtcccgttcgtttctccaactcatgagttggatgaaaaagaagatttatgtgacacatttttcaaactgctaaacaatacgtttcgtacaaaaactttctatatgaaagttgttctaaaatatcagattaatccatttttcaagtttgtaataattaaaacacaattaatcacgcgttattaccaccttgttttacgtgaaatacttaatcattatcttcatcttcatcttcatgagattcaaacaccatctaaatattggtgtttgattggaacacataagaaacataggattgcaagagacaaaagattgaaaacatgaactaggacctcttggccttgtttctctgaaatcaccatataattgtccatttcatataaatttcaaagaaagtgataggatttaatcctttgtttcaaaggctctcataggaattattttataggattaagaatcctccacttcaaagcggccttcaaattgcactttgatgaatctctaccaatgttaaaaaaatctaacggcctagagaagcacaaagcatatctagatgaattgtggaatgcagaaaaaaaaactatccctagagaattattacagtgtttgtagaatgaataattatgaattacaaaattatagtttggttaaaaacaagaaaactactgagaagcacaaccttaaaaacaaaaatctccatctaaggttgatcagaggatgcataactattgtttgtaccaacatcttacaagttgtatgttgtagttatctttctcaagccataaaaatataatcttcgaaacaagtaagtaaggaagccgtgaagacgattccaggtggtggcaatagtaaaaagaatataggcatatgagaaacacaatcatatgatgctgaaggttcaatatcacattaaaaaactacatatttaacaaaactacagatttgaagtgttgtatcacaaaactacatatttaacaacaaatttatcatggaactacaaatttaaggtagagtttcacaaaactacatatttaatactatctctgttttttaatagatgacgccgttgactgtttgtcacacgttttaccattcgtcttattaaaaaaattacataattataatttattttattgtgagttgttttatcactcaaagtactttaagcatgatttatatatcttatacatttgcataaatttttgaataagacgaataatccaacatgtgtttaaaagtcaacaatgtcatttattaaaatacggagggggtattaaagttatcacaaaacttcatattgtaaagtttcaatcactagcactgtcgttctgttggacattgtagttttgtaattaaattgggactgaaactatagtattgggataaatttgctacttaatctactgttttgtgaaactttatcttaaagttgtagttctatgataattttttttttgttaaatctatagttttgtgatacaccactttaaagttttgtaaaattttctcatatcacaaattaagaagacaatttgaactagtgatatggttcacaccagtttttcacgaaccatttctggttcactttgtttgtgcactgtcgatggttatgacccctacaattatttctatttattctaaaatgtttcaaatttcagaatacggcgagaagcatccttgatatggcatggaattgtaggggtatgactttattcatcgggttatatatatacaaatataagtatggttttagcatatcaataaattcgtaactcagagatatcgctaatctcgacatggcgatcaacgtgttaagacgacgcacttgcagtttgtgagtgtgtatacatgttgagtcgtaatcgaaatcgaaaagaaaaaggaaagaaaacaattgacgcttactgtcatcacagccattactgaagtaccgatcatgctttctactcattcggagagatcacaaacttttatcgcatcaatcatcatcaaccgatcgagctaatcaccatcaagttaaaaagcgagaggacaataggaggcatcaacaccacaataacaacacaaaagaattaaaaagcgacctctcaaacatgagcaaaatctttttctgtccccttctttttcaggtcatgcaaaagtaaataaatagaatacttcttccgcattagtttaaacttgtatctttttttaagcgcagtaattataggcatacaaatttcttcaccataatataatcatctaaaaccaatttatggcaaaaggaaaaagctagaattaaccgtgccaattattagagaacgcaggtggaagccttaaataggcaagcagtcaggcatttagcagcgcgctgcgcgcagcagtgaagccatagcccaaagccacaagctaaaaattcgtagttgtttttttaataacatcactattaaatatgtattttacgatacggtattaaatatatagttttatgtatttttatgatacggtattaaatatatagttttatgataaatttaatgttaaatatataattttgcgatatatcattttcaatctatagtttctgatagtttaaatggagttcactaaaatttattaaaaaccatgagtaaattttataaaactacatatattttaaattttaaatttgtagattttaaattttaaaagtatactgtaaaatttattataaaccatgagtaaattttataaaactacaaacctacatatttaataacaaatttcgcaaaacaatagaattaaaataaagtataacaaaattcccttgtggtgaaaccagtctatccgggtttaagttttagacttaacatgggtgctcgtatttacagctaattatttttttagtggtaagtgatgtactcatcgacagcaagatgtctatggacttcatcaatctcaagatatactggtccagtcctccgaagatgcttatagaggtagggtatgtgtgtatgtgtttatagacgtgagtgtgtgtgcgttatgggcacctggatttatactacgcttctcaaaaaaataaattataacaaaattgcagatttagtaacaaaattattataaaactacaacattttataatttggagataaaattagtgctaagagtttcaactttgaaatctgtagttttgtaatagcacataattctatgatactccgcattaaatgttttgtgaaaaaaataatcttaattttatgatatgacgttttattctgtactatctccgtcccataataattgtatttctaagatttacatgtgtcacaaaataattatcataatagagtactaattgtctcataatcacttctcatttaaatttatttctattttacccttaattgtccttctattcttacctatacaccatttaatgaggggtatcgtaatctcaaatcttaatatatgctaatcaaaaccatatatcgaaaccatttattatgttaaatgtcgattactccctctggttctataataattgatgttttagataagattgaagtcaaacttttataactttgactatccataactttaaaagtatttagtttaaaaaacaagaacaacatatataaaagtatttagtttaaaagaacaagaataacatatatagatttgtctttcaaaacactaaacattcatttatttattacatatattataatagaaaaataaggtcaaatatatgttttttagatcgtgtgattatcaaaatattaattaaaataaaatcggagggagtattatagaacggagggggtggaagcccataaataggcaagcagtcaaccagatggtcggtattcaggcagcgaagcccccccaaagccgagctcgcgcgcggcggcgtcgtcgtcttcctcctcttccccccgagttggattcgtggccgcgcggcggatgggaggggaggagggaatggcggcggggaggaagaagcgggtggggaggtacgaggttgggcggaccatcgggcaggggacgttcgccaaggtcaagttcgccgtggacgccgacaccggcgccgccgtcgccatgaaggtgctcgacaaggacaccatcctcaaccaccgcatgctccaccaggtaattcccccgcttctcctttcccgctaccctccacatccgcccccgccagtgcacgagtccaaatcaaactcctcgcactcccccctttgctttgatccgggcgattctttttacacttttttttatttgggtgctctccgctgctgctttgctgtttgccaaatggtgagcagccgcgcatcgacgagggcggatggagaatttccgaatatacctcgacagcaatgcgcaccactggttaattcgtgcgagttgcgcgcagctcttgccgtttgatgattaagaataaggaattaactggagagccttaaatttcttgttctcccaaaggggaaaataccttttttttaaaaaaaaaaaagaaaagaaagaaaaacttaattcgagcggtttgtttggtgtttcatctcgtttgggctgacagaagctcagttgcagaattgaaatggttgggtgttgaaagtgattttaccaaaatttggtctgttgtagcttaattcgatttgcggtgtttgcagaaatgctacaaatagttggttcatatggttatccaacgacatcttttgaggatgcatcttgttgcaaagtgctcaagttctctaattatagtggtgtaaatcttttcctaagcttcctgatttgctagttgctatggaacttggtttctctccaattgtgtttgcaattgcaagtatatatttggtttgtttaatataactgttctataatcctaagcctactgctatgccatgaagcttggtttctctccaattgtgtttgcaattgcaagtatatatttggtttgtttaatataactgttctacaatcctaagcctactgctttgccatgaagcttagtttctccccaattgtgtttgcaatttcatgtgtataaatttggtttgtttagtttaactgttctgcaaatcaatgatgaccaccagttttacctgattttgctgtgagcacccatttcagatttccagtttatgcgagatgtactttctttgtgttgtttatgcaatatcgctaatcatgataacaaaaaaaaggactaaaccattctaattcggcattagattacgaactcacttctcatgttacttgacagatcaaaagggagatatcaataatgaagattgtaagacaccccaatatagttagactaaacgaggtatgctaaat

SEQ ID NO: 16226 - DNA, 3477 bp, Oryza sativa
atctttggctgctattgtgacttatatgttctaaactcatccaatttgttagtttggagccctttttgaaggaaattttatttatcttagacaactaataagacggtataattagtgcaagaccactctcaatctgtgcacgcatcatatgaattactttctaagaaaaggaaataaaaagacaagacaacaaatatcataccgtccgaactataaccactagggatcatcatcctcggacaatcaaaacagctcttctaaaacatcgtctctaaaaaaagaacaacgtgtgtacgtatcgacattgccatgatccaatcagtaaatataccataacataggttgtagttacactatgaagaaactcttctaactctatataataccttcaacaagctaggaagcaaataaacatgcatgccgccccaccattccaaggcggttcttccataccccgtacacttacaagcaagcaaataggcacactgctaaaattcatgctcttaacaagcacgccaataggcacatggccaaaattcatagggtccatctaaagagagagagttattgttagtgtaagtgatgcatctaaatagtggaagagttattatcagtgtaagtgatgagcaagcctataggcacatgcattcaaaatttgtagggtccatccaaagagagaaagagctagatctaaagaaacaaagagtgagtgttgtcggcataaatgatatcataatttgaaacaagatagcttcgacctacatgatgatataaaagtcagtaactagtgatgaagatgtgtcacaatgagtaactgcacctagtggagagaagggcttaggcttcactgccacctgcgcaaatacaatcactcccaccgttcatagatcaccactgcttaaaaaaaagtttgtgcggggcggtcaagaacctgtttacaatggtgttttagacccgcctacaaccaaggccttgtaaaaatcacatgatttgggcagcgaaataacgaccgctcttggaaatcaatttccatggacgactcccttaagtttaaaggacttgcccatgagaacaaatttctagtttttgaatttgttggtgaaaaattccgtaatttagtagacacagcatattaaatcatactccatccgtccaaaaaaaactcgacctagggttacatattctcttttttttagggggggggggacggagagagtatgccttagatataatggctataaccgaaatgagagagtatgccttagatataatggctataaccgaaatgtagttgcaacttgcgagatgatgcaacagcctgttaattgaatgacaagatgcagagaaatcgggcaaaaaggcacacatcagcacactcgagatgatagtactaaagaaggaagacgtatatgtgaatccgtcttcgatcatgtgaaaccggaagcccaaaaggcacacatcaaaccattttcaaagatggaactgattgtttatgtcgacaaatccttcgcacaatttataacagttgacaaatccttagctcaatttaggcatcacatagttcgttcaagagcagcattcctcatcttacccaataagttatgttcacggaacaggagcaattattagcaggtaaaacaaggagcatcgcctcgtcaggtgcaacaccaacaccagaaccggagctaccaatgtcccaagcaattagagcattcacttcccttcaagttgtaccaattgccacatgacgacaatagtctttgattaatcaaaaccaatgaatcgaatatacaatttcagcatattctagcaaacaatgtaacattaatgaatcgaataagtagccgacacaaacaatggcaacattcagttcaagggccacatttcctcggggagcaaagcatatagcacacaactccacggtaagatagtaatagcatacgcagccacaaacttattggacgatcttgaaaggcatggttattgcaaaaaggatcttcttggttctctcactggttgagatcaaaatcaataacacgcacaaactctatgcaagtcattcacttggaaaatcaggtatgtcacaggcaccgggcatgctcgcccaggggtcctcaaggtcatgttcatcgccttgacctgcagcagctagattggtctcatcagaaagacccccatgaccgaaagcgtcatctgcatctttggcaaactgctcatttgagggcggcaattcttcgttaaactggcaataaactggcaaattcggttctagtgatacatcgtgcctccagaaagtagggtccaccaagggtggaggttggctgtcaaggaataggctgcttgcattattgttgatgccaacaaaagcatgacaacctgaaaagactaacagtaagttttatgtgatattgttcatgttaaaataagagtgagtacacttactgttctcgaggagatcatcaccatgattggaaaggaagaactcagagagaaagcattcgattgaatcacttgattgcattgaacacgaggaaaacaagcatcaaaagatccttgggaatttgcaagttccccttgtccatgtcctccatgaaccaatgcatccagcagaccattgttgtttggagagagatattctgatctcagggagccaaagtcaacctggtcaataggatgtcctaaggggtcgtgatatgaccatgcattattattgttaaagtcatagttgggatattggagtgaagggagctctacattcatgggcctctgtatggtcccagaagtagagaagttgccatcaagaattggatgtccactgacaatggcactaccaaaaggtactgactgatcttgtgtggcaatggcactaccaaatggacttgtggcatcaactggaagagaatttggagtcacacaatttggccgaatataattttctggtctactatagtctaaattatcgaaaaaaacctctttgtaactttgaccatttccctgtaaaacctcatttgttcgtttcttggcacgtgattcatcagggctttcacagttcatcacttccagatctgtcaacttaaaatgattaaactccttcggatatagaggttcaccagttctctgaattctcttacatctagtgttccagaagttcttgatttcattatctgtgcggcctggcaactgcaataacaacaacagaagttcagatatgcaagttaacatatgatctaataggatttttctaggcaattagactaaagaaccttaaggcattagcctaataagcatttgcattgtacctcagatgttagaatggcaaatatagcaagatgtatcatggtgttgcaatagttggagaggatttaaacatacctaacgaaacagtgaatgatattgtctttacataaatgaaaatatgatgaagtcctattcgatgaacaaaactcataggatttcagtaggaggcaggaaaggaac

SEQ ID NO: 16227 - DNA, 627 bp, Oryza sativa
ccaattaaatgaataaaataaagtctttcgccaatacagaagaaaatactggttgatgtactctgaatacatctatctacgagcaagtggtatatttgcggcccctatatttggagtggacagcatgcattctccccactaggcaaactgttggtaggctttaatttaggtggttaaatatttttgctctaatccaactaatacaccaatgcacctaaatattaagcatgctactaatctaaactaacaatgaacggagtatcaatgcacaagctagcaaaaccaaggaaccatgaaagagtaggaggaggagcacacttacagagtttgccatcttagcccacttgttccccagccataaatggagcttgatgatcatctcctcctcttccttgctgaagggccccttcttgaggtcgggcttgaggtggttcgcccagcggaggcggcagctcttgccgcagcggttcagccccgcgttcctctgcacccggttccagttcccctcgccgtgcgcctccacgtactcccgcagccgcttgtcctcgtcgggcgtccacggccccttcttcagcggaatcctgccacgcacgcgcacacggccgccgccgccgcggcgacgaaccc

SEQ ID NO: 16228 - DNA, 500 bp, Oryza sativa
ccttctctctctcaacaacaatgatagtgctaacggaatatggcgtggcggcaatatagagaaataattcttcattaggttgaggggcaacaagtacatgtggatttgataggtagcgcttgaatgcaatgaatgcctcttcggcctcctgtgtccatacaaatttgtcttgttttttcagcagagcgaagaaaggttgtcctcgctctcccatcctagcgacgaacctgcttagtgctgccatgcatccggttagcttctgtacttccttgagtcttgtaggcgacctcatgttctcgattaccatgatcttctcgggatttgcttctattcctctgccggagacgaggaagccgagtagcttgctgtcacgcccggaatttctatccaaaattccaaacgcttacatgtgtgtgaaccctcgtccaggaatcagccgaggcacacaataacaaattgataatagagtacaattaatactctaatttaaacgaataaaa

SEQ ID NO: 16229 - DNA, 1739 bp, Oryza sativa
agcatataaacttcaaatggctataacttggccatttgaactcagaattggaccgttcaagtctctaatttttccttaagaagtcaagaacccatttttgtgctttgttaatgctttttatatggagtttgttagagtaaaagccttttcttttccgttggtcgtgtagacgctgcagcttcggaggatccgctcttcgtggaagttgaagccggcgtttgggaaagcgagcaaggcaagacacatcatccttgaacatattgaatcccaatttctgaaattattttgatttaaattattgcattatcgctttatttaaattcccgcgttatcactgttttatttagccatgcctattacctttgttacgaccttattatttttattgctattattaccttgttcaccctagaataaacaaaacccccaactagtggacactctatttgtggtatcactagtatgattttaggtagatgcttcgctgattaattaggtaacattaggtggttttaaaaccctagactgtggtaatattcatatcacctggacactggaattgttggattattgtggaattggattcaccccgccccctctattcaaaactctcaaaatggttttaggctgggctcggggtgcatggttttgatagtcgcacctcggccatataaggaccggtcttcgggcctctgttgcaaagcaccaccgtacttccacatgtctaatgggtaaggcttagtttgtggctcagtctggttataaacaaaagtacacggatggagatggacgaagtcgggggattcgatggacatctctaggacaaatgaaggctacacgagctgcggcccggtagtcgagatgtcatggcacagggttggtgccctgctgctaggggctcagtcctgcctacctgtcccgggggttccggccgtaggtgggattgggtcggtactcttgtctatggctaggatgggttgggaactatgtcacgtcttccgtctgtataccgtggtggtatgtggcacgtggttacacgtgaggaagatgtgtcttgtgggtaaagatgtacacctctgatcagagtataacctattcgaatagccgcgccctcggttatgggcaagccgagcaatgtacccaagttagtgttttaattcttaaaacctgcttaacaactaaaatgtggaatggttggcctgggttggcttgggacgagctgggacccagggtcgggttgccagttcggtctgaatcatcgtaggccttgggttaaggcaggttcgtgtgggttcacggccttgattaataatattttatagctctaggatcgtgtttacaacatagctttgagcaactaagtgtcttttaatgctatttactgcaactcctaacccctatattataattccattgtactcctttgcaattatgctgcacttgtgggtgtgtcttgttgagtacggtggttgtactcagtcttgctcaatttttcccaaacccagaagaggagcccctggaagatgaaggctttggtgtctagctcgtgcctgccgtcaagtgcctgtggtcgtcgccctagtcttccgctgttcttcgttgtctttgagtgtgctgggccgtcgctgcccatgtaataattaactatttacgcttccgcttgttaaactctgaattgtatcaacttttggtgtaccttgcctcctgggacaaggaataatacacgcacgtaaggaacg

SEQ ID NO: 16230 - DNA, 2076 bp, Oryza sativa
acatcacgagttggagaggtacgctgaattccacgctctttgcaggcacgaatttcagcatggacgttgagaaagacccagcaggcttgcagggtgtgtttcctggttttgtggataggacaccaggaccttgtcacctcggaagtaatcctcgtcggctcgtgattcctgtcggaaagacaaggcttggccgcactaggatccttctcgggctcggatgttgtcgacgttcctatctccgcttcggcgggaggatccttcgacatggagtcgccctgggttgtagccactgcattctcgtttccggccattggcggaccagctgagatcggcactgtggtgtaaaccggaaagacgatttcgccgacctgagtccacaccagtgttgttgaagtaggaactccttggttgaggttggtgttgacactgttgtcgacaaagctggatgtcatagtagtagaaccttgagcaccaagtccacctacctggcacgccactgtcgacggggaatacccgtagaccggatatagagggtattggggtacgctggtacgaggatctacgtagtacgacatcaagcaaacaggaaacagagattatactggttcaggccccttggtaggtaagagccctaatccagttgatatgggattatatgatggaaaccacagattacaaagggaacagtggaactcgacgataccgacaagatcgtagtcgagttgatccgactagatctcccagcgacttggctccgataagcttcggcttcgtaggctgtggtggagttggctctgagattcgatgctttaggtcctcccgggggtcccttttatatcgcaggtcacctgtctcccagttggactcggagaaaccggaccgaacacgacacaatgacgacccagttctgaccgagtaggactccttccatctgtgaaatccatgatgaatttccttaacgtatgccgaaaacatccgtatatgcgtgaacataccatatcgatatgtgacgtatatcgaagggtagagggtataccttactcgtaaccctgacagtagccccccgacttctgcttaaatgaactggtgaaactgatcgcgacttcacatgtcgaaattgtcgttgttctcggtgtgaggacggagagacaaggagtgatcgacaacatcgagtgaagttcaacggtcatgagtgaatttaaattgaagtccgaaaaactgccacgcgtaacggacccagaaattcgcaccggcggaggtgcgtctatttaagggagttttggggatccaatttgaggtctgcccgttgaaaaaactctccagcttccaagcgtccctcgtcttcttcgctcccgcaaaaaccctagccaactcatctcggtcctttctccggcgatctccggtggccatggatcttgacaagtctacctccaccagtgtgtcactgaagaaactgcaggaggatggcgcccttcccagtcgcgggaccgcggagagggaagtaggaggtactgaaccccagcctgtcctgggtcgcatggttgcggttgaggactttattctctgcggttttcttcctccgccttctgaatttctccttttggtcttaaatttctatggtctttccttgctccatttgaaccccaactccatcgccttcctgagtatttttcacctttgtgaggcctacattggggtagagccgtttcttgacctcttccgcttttactatgagttacgctggatggaatccaaaaaggtgtccgggtgtgttggtttccgacttcgggatggcctgaagtcacgatacatcccctttcagtgcccctcatctcgcagcaaatggcgggggaggtggttctatcttcaggtagaggattcggatcctgccttcgttgttcctgaggagcagccagacaaggttccatcttggaccaccaaacctgccttgaccccgtccctccaatctttcatcgatatcgttgacgacctccgagaacgggggttgtcggggtatgaagttgctgccgatttcattggtaggcggatccagccgcttcaggctcgagcccttcc

SEQ ID NO: 16231 - DNA, 620 bp, Oryza sativa
catcgcatgtcggagcttgagaacaacttgtcggaaatccatggctcattgcgggtcacctatactggtctgcaccagctcgccggggagtgcggtatcaagtccaccatcccggcgaatcccgatgagttctcgctgacgtcttctcttgcggagctggtgacggtgatggaggagatcccctccaagcatgcggccaggatcggagaggagacgtctaatgggatctacaccggggtgtgccacgtccttgcatgtgtgaggctggcgcaccctgaactcgatctgtggaagatcttggatcagggggcggttagcgacgcgcgcaaggatgtgatggaggaggtcggcgatctgggggagtccgtcctctcgctttttgaagagtagggtcttagctctcttgtactctttagtcatgctttgtaaaacttttattggtctcaaccgccctagtgtgtgcggtcattgccttagctttatttagcattttgatcttgagtactttgttgtcctttgttaccatttcctttgcccttccgtctggatcgacttgatttgttgtgttctcgggagagaagagcagcttgacttagtcgtttccatgctgagcagatctc

SEQ ID NO: 16232 - DNA, 3454 bp, Oryza sativa
gcggtctccgacggcggcgaagcaacggacgaggacggcggcgacttggcgatcccgacggtggccttcccgagcgacggtgacggctggaacggcggcggcgcacggctggagcgacggcggcgacggctgagctagggcgcacggcgctagggcttctccgacgacgagaggcgaaggcgaagggggcgacgggtagaggagagctcggggggtccttttaaaggggctcggaggcggcggcgaaggcccacggcgaccggcgacgagaaggaaagatcgggctcaaagccgatccgaatcgacctcgaacccatcggtttccaaaccgatttagccgaagattccaaaggagataaggtcgaggagatcccggagatcatttcccctctattgattcggccggaaacggaaagggacggccggatttggaaaggaacggcggcggcggcggctaggggtttcgggcggaggccgacgcgaggaagacgacgacctgacaggtgggacccacctgtcagcgaccgaacgcgcgcgcgcggctgcggactgggtcggctgggccgaggagagagaaaagagaggtttttgagccgactttcggcccaaagccaaaagaagatttttaaaacctttttcaatttaaattattttttaaatgcaattccatttattaaaaatacttccttagctcaaataaatctcagaaaaatctaggaattatagaattaagcaaagtatttaatgaaattttatctggccccattttatattggaatttatttttaaaattagatcttcttttcaagacttttaaaaataaattctaaaaattccttttaaacaacaatttataaattttgaattttcaaggtgtgacacttgcccgatggtactccgaacgtgcacttctctggattgagcataaggcgatatcgtcggaggttgtcgaacgtttcccgcagatcgtcaatcaatgagtcgcttgtcttggtcttgacaacaatgtcatcgacgtaagcctcgacattgtttccgagctggtcactaagtgcaccttggaccgtgcgctggaaagtgtttcctgtggttattagtccgaatggcatcttaacgtagcagaataccccgaacggcgtgatgaatgctgtcttatcctcgtcctcttttgccatgcttatttggtggtaaccggagtaagcgtcgaggaagctcaacaactcgcaaccggctgttgagtccaccagttggtctattcgaggaagaggaaagtgatccttgggacacgccttgttgaggtggtgaaatcgacacacattctccacttcccgttggccttccgtaccatgactgggttggctagccactctggatggagtacctctctgatgaaaccggctttgagaagcttgtcgagctcttctcgtatggcttgttttcgatatggtgcaaatctccgcagtttttgctttattggcttggcatcgggtcgcaccatgagtttgtgctcaatcacctccctgggtacccccggcatgtcggacggctgccaagcgaacacgttagcattgtcgcggaggaaggtgatgagcgcgagttcctatttctcgcctagtgatgccccgatcttgacggtcttgtcggggttggcactggagagtggaacgatcttgattgcgccgtccggcttcggcgtcttgtttgttttgctcactttcttgggtggctcagctgtggcgggtaggctgggcgtgtgctcgaccatgtcgaggctccacttgtcgcattgtactgccagcttagcgttcccttgaatagtgattgttcccttcggtcctggcatcttgagcacttgatacgcgtagtgagatgcggccatgaacttcgcgagtgaagttctcccaatgatggcattgtatgctgtatcaaattcagcgacatcaaaggtgatctgttccgttcggaagtagtttgcttggccgaaagtcacaggcaacgtaattttgcccaatggtttggacgatgactgaggagtaattccatggaagggttgatcggtgggtgtcaactcgtttcgtgggatccccatcgcgtccaaggcgctggcgaagagaaggttgattgagctaccgccgtcgatcaggactcgtgcgaccttgatattatgaatagtgggttcgactacgatcagatattgccctgggatgacagcaatcttggggtggtcctcttctgagaattctatcttctgctcggaccacttcatcttgggcgcagccccctgccacgtcgaacagacttcacgttccactttcttgtattctcgctttgaggagtatgccgtggaacctccaaagatgtgtgagacatgaagatcggaatctgggtatgctgagtccgattcctgagtaggcgcctcagcatccttctcaaccacgtgtactcgcttgcctttttccgatgtcatgtgttttgcgagcgactttttgaagacgaggcaatcttctagagagtgtctgtccgacttgtgtatagggcaccatgctttcttcgtatcgctgccttgtgggtctgggcgcttgggagggtccgcgtattctgttgcgagaacttccgattgagctttccttttcctactcttgcgaattttcttcttgcttgactcaggtgcatccttggctggtttcttctctcctccagtcttcggtttgtcgttcttgcgtctcagtgcgtcatccgcatgagcgcatcgatcgacaatttcgaataatctccgagtagtcgtgacgcgcctcgttgccaactcttgagtagtatagcgatctctgacactggatttgaaagcgcgaattacagaagcgtcggtgatctcggggattgtgtttctgcactcgttaaagcgccgaacataatccctcaaggattcacccgggttctgtgtcaacgcatgtaggtcgtcttcgatcgcgtggcgcttgtaagttccttggaagttggctacgaactgctgccacaagtctgcccacgaagagatcgagtaggggggagatgcatcagccatgaacgtgcagagcctttcaatgtggttggcaagtaattcaccaacgcattgtcgtccgctccggcagcgtagagtaccgtggagtaaaccagaaggaactcttctgggttggtgctcccatcgtatttctctattgctccaggtcggaatctttcaggctatcggacatcccgaagtgaacgatcgaaagctctacacccagcgctgggggcggtgggttgtcggcgatcatacgcccttcgtggatgtctatctgatgatgaagatgaggaagatgatgacgatgacgatgggtcgctcggttccggcgtgcggttacgaggacgtcggccgggttctcgagaaccttgttgtcgtcgcccgttgttgtctcggcgccgatctccatcatcg

SEQ ID NO: 16233 - DNA, 1860 bp, Oryza sativa
gtaatgattattatgcaaccatgacaatggaaaaatataaatgatcacactatgtttgaatggtacaacacatacacctttgtacttgtttcgtagccaattttgggaacacattaaggcctccaagatatctgaagtgagtcagctgcggtgctcactaagaaccctcccactagtgctgaatgcagcctctgatgcaactgggctaactggaatggcaaatatgtcccatgctacttttctcaatgtaggatattgtgtcccagccaccttacaccaatcaaaaatcttgaagttttccatattaattgagactaactcatcctccaagtacctatctagctcagatttaactcttattgctggtggcctccttcaagcaacacgtgcactaattgaagacaatacacctgaattagcaagtgaatgagctgaagattctgtgttatcttcatcctcttccatttcatactccttcatgaggtcatacaaattgtttttaacctcttcaagtttgtctgtacactcctcacttgattggctagtaatggactcaatgaacccaaggaggtagtctgttttaaacttaggatcaagtatggtggccaatcccattggtccttggatctccttccaatacttatcaaacttcgcaatcatctcagttgacatttcctctataatattattgccacatgcagcctgtcgacgggggatacccgtagacaggatatagagggtactggggtacgctggtacaaggatctacatagtacgacatcaagcaaataggaaacagagattatactggttcaggccccttggtaggtaatagccctaatccagttgatatgggattatatgatgaaaaccacagattacaaagggaacagtggaactcgacgataccgacaagatcgtagtcgagttgatccgactagatctcccggcgacttggctccgataagctccggcttcgtaggctgtggtggagttggctctgagattcgatgccttaggtcctcctggggggtcccttttatatcgcaggtcacctgtctcccagttggactcggagagactggaccgaacacgacacaatgacgacccagttctgaccgagtaggactccttccatctgtgaactccatgatgaatttccttaacgtatgccgaaaacgtccgtatacgcgtgaacataccatatcgatacgtgacgtatatcgaagggtagagggtataccttacccgtaaccctgacacagcccactgcctaatttgctctttagccccacaaattttcaagagttggacattggcagtcacataattagttccagagaacacttctgtgatatcattgaacaacttgagcctattaactacctctacagcaaaagcacattcatctttactaggggcacaatcaaagagcttctcaacatgttttgcacgatcaaaagcatgtgcataaggtaaagcaatgctaagcatcttgtaggtggaactccacctagttttgcaatcaaggcctaacttgtgatccattttaactttaacatgcttagcaatttcatcaaatttctctactctcttaggcgtggctgtccaaaaagcaacactttcacggatttttgcaattgaatattttatcacctctataccatccttcacaattaagttaagaatatgggcagcacaacgcatatgtgttgatgtgaaaaacacgaggcctgggagatctgcttaactccagtgcaggtccaaaaatcttgcctttaggttcgtgagcgtgccagttgatttgatcatgcaatcaacaagaaataaagacaggaaaatagcggttaaatccataac

SEQ ID NO: 16234 - DNA, 2709 bp, Oryza sativa
agtgattgggatagatcggtcaccatgccgagacagtataaatcacttagatcgaaatatataataacaatgagattatagatgttcatagcatagccgattagatagatctagcatgtatcggcaacaagatcttaacataaagggcggatttaacatgtcaatcaagcatataagacatagagtagttaaatcaggtaagatcggctgaaaccccgacactaccctaatcggcaaccaaaagcaggctagaaattgagattttaataacgacttataaggtcaaactcaactgatgcagctataaatatgaaaagaaggacaatatctagacaatcaagctgttggctgtttcatagagtggtagataccctgtataatctaagtcaacatagatatttaacctgattggttgccttccaataatagatgttagccgattgaaggttagataacgatattgttgaagattatacataatatatgataattcgacgaattacataaacaagattagagtatcataaagatggaagcactaatcccgataacgcaacccgccataacaagttttacatctagttgaagatcgaaactgatgcagctcaacccgaaagcaagaacttgtcgaaaaaaaacaaaagtaaagggtggcgatgcgccgagattgtattgaacgtgtgttgttgtattacatggggctcggggtctatttatacccgagattacaaaatatgtccatgtcggacacgactctcatctctaacaaactctaagataccataagtctttgcggcagacttttgcccaaacttatctctaaggaaattacatgaaataccctaattaatagatacaattaccttttcaggactcaatccatgcatggcaatcctcatgaagcacattaactcaacccgacaacgtgtaccgaatcacattgtcggaatcggcttaatcggcaaccttgtccgactcgaactctaccgatcctgatcgtagccgattcggacttcagccgattcttgctccgcttctggaacgatctccatcttggattccgcttcgattttatcttcatctccgatacctaaataaccaaatttggtcgttaacaatatgcaacaattttccctccaacatcaacttagacttgccaatcttcttcccaagttcagtgattaccttgtcattcgtggtacaattatcaagagtcaaggttgagatcttctcatcaagattccattccaccaatgcttcataaagttgttcacatataacttcagttgtgtgtggagcaggcacatatatgaacctatacaatcaaagttaaacctagattaaattcagattgatgcaaaaatgaaatctaatgtcatgctgaattaaatatgtagcagtaggaaatgaaattaattgttcatcaagtacctcatgataatgcttctaagtgtccaagaatcatcaatgaaatgggctgtgacagccatgtaccctcttttttggttatcagatgtccacaagtctgtagtaatagccactcttgacttagttccagccatgtaggctagggctttcttattttcttccatgtaatagtccataatgtccttcctaaaaatgcataaatgttaattttttcttcttaattgcagatatttttaatagacaactgaaactaatagatatcattattacctaatagtgtttcgagtcaccatcttaaataatggctgaagtgcagtcacaaacctttgaaatccaatatgatcaacaatagataaaggatactcatgtagtacaatcatggcagcaagctctctcctagctatttgtggatcaaatgtgtacttctccacagatatttttcctccctcctgggaattgaaccttaaagaagactgtgcaagtgtcttgttttgtcccgccatcttgatctttttcaatgtgcaaattttcaaatggtcatggagatgtcttgttccattactgcttttccctccaagccgcttgtggcaatgaaggcattgagccttgactttaccacagatttttactttcttgaaatccttccaaacgatagaagtaagcttcctcttggtgccaaagtccacatcctcctcctcagcctcatcttcatcatcatcaccttgtattggctgagaatcattaacactctcatcgtgaggtggaagtgattgcgagtcttgctggcttctattcgcactacccgcagttgacttcgatgtgaatctgagaagagagaaataaattcagttcaaaatttattcaatggcctagtaacatactgaaatccctttacaaagctgtgaaagcaaatttaaagttcagaccatgttgacgcatacctgcatagcactataaatcaccaaacaataatgcatgtacataagtataaatatagaaaatatataacagtaacgtgcaaagaaatatcccttcaatttgcaaagaaaatatatgacagtaacatcaacaaatccatcatttagtacctaagagctgaaacattcagtacctaagtgcaatgcaatctcataagtcataaactccaacttacatattccaaattgttaaataaaagagctgaaacatataagaggggtagcgtgcttgaaatcgaaccccatggattttaatagacgaaggccgccggcaaaagatgacgtgtttagagtagtcggtgca

SEQ ID NO: 16235 - DNA, 5735 bp, Oryza sativa
gtcatccccgatggtgagaggtttttaaccattttattcctcatggtgagtagatattaaccatccccgtcacctaatagatgaattcatcacggggaaacggtaaacgggcccccattgccatctctaggcgtcaatgagggtttgagctaaatgccttgtttagtttcaatttttttaaaaaaaaacatcacatctaatctttgacatatgcatggagctttaaatatagataaaaaaactaattacacagtttgcatggaaatcgcgagacgaatcttttgagcctaattagtccataactagcctaatctttttaaatatagatttttttaaaaaaaagaagtacagttctcgttgaaatattagaaaaaaaaaatctcgcttctatatgaactttaaaaaagaacacaataccatcaagacttagaatgagaaaagcatgggtaaggaagtggtgggtccggcgggtgtaaggaagtggtaggtccggcgggttggctcgcttgcatccactcagtggagcagtctagaaaggaccggtcaatcaatatagacttgtcacactgggttcaggagaaatcagacttgatcagggtggagtacatagtagaaaggaccagtcaatgtatatagtactaatcagaagatgatgctgtaacagtaatgtttcacaataaacaaaacaattattggtgcagaacatgttgctgtcgtagaagcataacaatacgagataacactacaactttttttttccggaataagacactactacctttttttttcgaataagacactgctacctgtataattgggtctgtttggcattgcagatagtagaatttatgggttaaaatcattttcgaattttcatatatccagctagagttgaagctgtgttcaaacagagccatcatttttgaatttaaaagtttttacagggaaatggtatttgattttagagaggtcatattcgaaagtttgtgctatgatagtgcagaaagtctttttccctcaaattttgtggatccaaattctttgcattcatgccatggacccatgcaagtgtcatgcatattctgatataatagcagtaatactggagttgcaaaggaacagagtacccattgctagcgaatggattaatatagtgagcataaagcaaaggagaagtctggtaacacgtaaccataaagcagtgataatcaagacaccatcatatcagaaggctaaagtaacaacacctaaccataaacatactctaagataagataactaatgtctactcagttggcaaatggcaatggcatagattttgtggccggcttcgcttggaaggaggtcgtcagacgcccccaagtccgagcatgccgtcgtcatcgtcgtcgacgaagtggtcggggcgccatttgcgggggctggcctcctccgcccgaatcttggactcctcctcctgtttcccctcatctgcaatgagcctcatcctgaaaacatccagaagatgcttctcgtgtttacccacgacgaggcgggtaccctgggaagcatacatcgcgactgtgaccaaatcctgcatgcacgcgacaaatcgaacaggtcggtcaggtataccaagggtgtgtttagctccgcatcaaaattaaaagattgattgaagttaaaacgatatgatgaaaaaattaaaaatttatatgtaataaaaatttgatgtgacattttttttttcgaaactaaactcggcccaagccaacacaaggaggtctagggtcggagaaaagtcatcgggttctgttctgttctgaccttggcccacgcctccttggggagcttgtcggccttgatgccgaaaatgttgaggtagtatggcagcgcgtagccatcggggccgcaagcgaaactgatgcagctgtgcaggaaactgaggagcccgtccgggaatccccttgtgactgggtcgccgtggtagcactgccaaaggtaccaatggtacctcagcagcgtgcacgtcgccgccaggggctccatcggcacctcatcggaatcagcaagctccttgaggttcttgaacgtgccgattatttcctgcacgtcctggcttgcggcgctcccggccgatggcggcggagtctgctccaggaggtccagcgcctctgcagctgaccatgcgatggccttgtacggcgtcacctgacagcaaccacatatccaacaaaacagataaagattcagatatatatatatatcttcttcttttcatctcaaaaaacaaacttcagttgaggcacgcatgtatgtatatggaattgttttacgaaactaagttccagcccatatagcccaaacatcatcagccccaaacccctcccagcccaaagaatttgccccataaccaatttcctctcagcccaaactgcatgctcgtacttcaattaaattgcatcagcctggcctggcccagaacaactcattggcccggcacgctcccctaggaacccatctcacaactgtatccacgcccacagtatgcccagggaccaacgggctgatcagttcggcccattctcgaaccctttccgatcaggccatcctctcgtcaaacagattccatcccccaaatccccaacgtctgtcctcctagcccaacaacgatcatcaacacggctaacttatacttactaataacaacaagtactttaagcataactttttgttttttatatttgcacaaaaaatttttttgaataagacgagtggtcaaacatttacaagaaaatatgaacatcccttgtattagtggacagacatagtaaatatttttccttcgagaaaacaaatggcccaacaaccaccaaagatctaccgtttcttcctccgtagttgctactgcgtacgctttgtttattgatcagaagagaaccttttttgcgaacaagcctgcacgatttttttaaaaaaaagaaaactttcttttcagaatgaagaacctacgtacgcgagaaacagatagaccatgtatcaacacaaccaacaagaacggtaaagaagagctagcgtgtgaactcctcgggagaaaaaagccgaaaagaaaagcacaacgtaaactccatagaagatacaaacaaacacagatctagaccgagagaaagaacgttgtaagagggccttactacctgcaggccaacgtcacacatgcatcaagtacaacatatatgttctcccaagcaacaagctcgcgcgatctcatgtttttaccgcaagagcagattttctcacggcatcccagacccataatcctagatctaccgtttgttacagcacgcaagcatcaacaagaaaacgaccagtttttttttccctccacgtacagatcaatacgcgcgaccgaaaagaacatttttcttcttctttttttttttgaaacacatcgaatcaaatgcgaggaaggcagaagtcagtcgagacgcacaccgcaaacatcgatccggttccgtacgtactacacatgcatgcagatgcaggtagttggaaagaagagtgcgtgcgttttctcaccttggtggagtcgtcgtcccaggccagccatggacctgggttagcagccgcctgtgccaccgtcagcctgaggggacggccggcgccggcgaagcgcgcgaccggcggcggcaggagacggccacggccagcaccaccaccatggccggcgcctccaggcaggcacaggacggggcacccgaggatgaacaacgacgacatctcgatctctcgttctcgctgatgaggagatatggccgggggtggaggtgaagtgcactactgcagtgcagccttgcgatatttataatcaggagccaatgctagggttttttggcaactatgggttatgcattttgcgagagtgttagaaaaagcagtcaaactttagagagatcacctttggctttggagtttggaccaacgtaccgtgaaatgcatacggtgtatgtatgtaaattggagatcgatgtagacggtgtatatatgcatcaacaagaaaacgactttgttagtatactactactattccatattaccatttcattaactgcatgtatatgcatgtgtatttcgacatgcagtctgtctttgtccccccgcgcgcgtacagggaaaaagggaagaccagagctgcaggcgtagacgccgtcgtcgtggtggtagcagtagcagtacgcgctgcatgcatccacggcgccgcgagcgcgtggatctgtagttcatgaaccgcgggtagagtagacgcacagaccgtgctagcctgctaggtgtatggatctttcaagctccggtgtatgtatctttccggtagcacaggtgcacccatccacacgttctgccatgcatgaagccaaccaaccaagcacacaaattccgtgggtccccctctctccctcccctggacaattccgtggatgtttgcgtgcgaccgaacagcagcctagaagaagcagagatcgcaaacagatcgataattacatgcatttctcggctacatgcatttcctcgcttaattactgcaacgctgcaataagtgagcgtatatatgtattttttaagttcaatttagtgatgaaataagtgagcgtacgtgtatataactaacctagcctccaccggcaaaaaaaaaaaaaaaaaccgggtcacatcatatacagacacacatttgaagtaataacaaaacaaattacataatcagcatagaaaccgtgagacgaatttattaagcctaattaatccatcatcaacaaatgtttactgtagcaccacattgtcaaatcatggcacaattaggtctaaaagattcgtctcgcaatttacacgcaaactatgtaattgttttttttcaatatttaatatttcgtacatgtgttcaaacgttcgatgtgatggagaaaaaatttgccggcggaactatttattgctccttccgtcctaaaatataagtatttctagtacagtgacaagttaaacatttttagctttaactattagtagcaaaagaaaaaaaatcaatcatatgtataaaattgatgttactagatttatcattaaacaaattatcataatatgcaattctttatatttaaaacattttatttttattgatattgttggtcaaagtagaatctcggagactgtgtcagaatttaaaaatgcttatattttaagacggagggagtagtacatatctacatccgatcgatatttgttgtttggcaagatacaaattgccttgttaagttcgcgaaaagaaaatttttgggtgtcacatcggatgtttgatcggatatcggaagtggttttcagacacgaatgaaaaaactaatttcataactcgcctggaaaccgcgagacgaatctttcaagcctaattaatccttcattagcacatgtgggttactgtagcactaatcatggactaattaggctcaaaagattcgtctcgcgatttccccctaactgtgcaattattttttttatctatatttaatgttccatgtatgtgtcaaagattcgatgcgacgtttttaggaaaaaaaatttggcaaactaaacaaggcctaactataaaatccatttagttcagcaataaataaattaataaagctacattaatttctttttcacaggagtataacaccagtagcacgaaaagcatgtagccatcatgacccatctactcctgctgcttaatt

SEQ ID NO: 16236 - DNA, 2669 bp, Oryza sativa
tatggtggagcataaatctacacatgtattagaaaataagcaaggaatttgaattagtttctcggaccatcatcgtcgatgggtctggattgggtcttaggagattttatggtggaatgatctacctctctcattggtggagcccgccgtttcagcagtgaactcgacctgtggctgcttcaggacacagtagtgtagggattgaattcggttcgctgcagtctgtagcgtgaacactatatccgtttgatcttatttcaaagggcagagtcatccaaaaagcttcatgcagaaaatagatgtaggagtacttatgccgtgtttagttccaaaataattaattcttcaaacttctaacttttccatcacatcaaaactttcctacacacacaaactttcaacttttccgtcgcatcatttcaatttcaaccaaacttccaattttagtgtgaactaaacaaagcaatgtgcagcatgtaatgtaggagtagttatgttctttttccccttctttttcctaggtctcaagaaatatgagtcgccgaaaggatcttttctacttatatttgacggctcagatatcttctctctttttgtccttttagatccgatggttattatttgttacatgatatggcatattctagttctattttaatattaacttttcactagttaagattggaggcaaaaaaaaaatgctctgaagtgaagcgaaacgaaggatctcctatagtgtgctccctctattttaaaatatagtaatttaaaattaaatttaacatcaattagtattatgaaaagctagtatcaaatttaggttgatagtagtatactattatatattttaaataagagaggtaagagttccttaacgattgtaaacttcttcattgcgtacgtttgtgccaaactgccaagcctgtcatcaactttactaaaaaccgcctttttcattgttgaccttagaccttgctaaggtatgtgcaatcaagggtgtgttttttaagtacatttacatttactctctttttttcgtgtacggctttccaaactaccaaataatatacaattttaaaaacaattataacaaagtattattttaaaggtttttatcctagttcttaatagattctaaactaatccgtcgctctatctttcgtgttgaggtagggttcccaaaacacacacaacacaacacaccaaacccaacccgagtacccgaccgcgcgcgtgccccctttcccctgaaaacccacaccaccaccgcgacacgacacgtacgacacgacgacgccgcgagtcacgggagattagccgaagaccgcagcggcgccccccgcgcgcgcgcgcatgtgatccgccccgcctccgcgcgcccgccgatcgattccgacctgtgtcgccgccgcacgccaccaccaccacggattcctcttcttttctctcgcagccatgaataatcccccgaaccccagtatctatctatccatctatctatctgctccatcctctcacgagacaagataccaataatcctgtggcttccgtgatttctcccaaagcaacaacccgagccgtgcttcccttcccctcttccgtccgtttgttttgtccgtctctgcttgtgtttttggttggatcaggacagcaacggccgaccacaactgctgatatgatgatatatcactgctaacacccgaaaaaaaaaattgggcatcgagaggaggaaaaagaaatccggcaatcacctggcgggaaaaaagaatgaaaaaaaaaatgaatattgagagagagaaatttgatggacacagaggaagtgcaagatcggaagcttcaatggattaataattcactaatcacccagaataacaataataatgtacacgtacaacaagtacagctacaatcacctgcactgctgctgatcgctcgctcgctcgtgcatcgggatgcacgctaattacaaaacttcccgatgattagcggcggcgattagcgatcagcaagggagcaaacagaagcaacaagttccggattaagggactaatggcagattaattagctggagctagtaggagcaggcgaccctgagcatggagcggccgcggagcatgccgcggtacagcgcctcccggttcgccggcatcgccgtcgccgccgtcgccgccgcgttcctgcacgacggctcggccgccgccgggcgggacgacgcattgctgtcgttgtcgacgacgtcggcggcgaacctcacccgcttcttgctcccgcgccgcgccttctccctcttccgcttctctgcaagaaacacacgtcaggtgagaggagagtcctaaagaggagccaagaagaacagcacgcacgacggcgcgctatggccatccatggcggcgcttttgctccgctcgctcaccggaggaggagaggcaggggcggaggcgagcaggggcgtcgtcgtggtgaggcggcttgttggcgcggcagagggagaagaggacgagggtgccggagagcgccatggcggtggcggcgagggcgaggccggcgtgggagccgccggccgacgaggacgaggacgacatgggagcagctcaggtagctcgagctcggcgcgcggcggcggcgactgtttggggaggtagttggttgggtggttaaggcgagaggga

SEQ ID NO: 16237 - DNA, 5672 bp, Oryza sativa
taagtcaaaccttaggaatataaatcatgaataactctcaagttgttgagtttgaaaatgtaaaaattatatgaatagatttgtcttgaaaaatactttcataaaagtacacatatatcacttttcaataaatatttatagaaacaagaagtcaaagttgtgttttggagaccgtgtcgctgtccaaacgacttactttacgagtacggagggagtacctttgtttcattttgaccttttttagtcaaaacaaataaactatcaaaatacattcaatattagatgtaatgaaattaaattaatgctacaaatgttattatatttttctataaacttgattaaagtttagagaagtttgatgagaaaataaaaatgacttataatatgaaacgaattataaacggagggagtaatttttaaagtaatataataattaatatgatctaaaatagctaaaaatacacaagctatccgtgcccggtgacacatcaatgattggaattgggttaactaatgatctaaaaccttagaaagaaaatttagagaaaaaataccactaaaatacaagaaattggaaaatatagaattggcatgaactcatgggaaatgtttgcacgaggtatgtcgattcagctgctgtcctggtgttcttgtgttagataatcctacaacctgcttttttttttccctggccctctctctctctctctttttttaaacacctgggccctctctctctatctctctctctctcactctgatgattacttttcccaggcgtccttgttcttatcccctatccgcccggggatttgcagtacaaaacccaacacgctgtggctccccttttgtactgcgtccctgctgcctatgatctcattggtggccgaccgcggcatcgacggcttcgtcacggaaagaggagaggagaggctctccccgtcgcctgccaagtgcgaaagcggaggagaaagcgaagcatagcaaagagagagatcgctgccgtgccgtgacgcaaatcgaagggagggtcccgcgctggctgtcacgttgggagatcctatggtaggagtacggtggtggtggtggtgacaggatccgtccttctagggcgtcccgggagacgtcgctgttgggagtttggggacacttgtcgcctctgtggtgacccggcagattgggattgggatttggatccggtgcagtacctagtgtgactgcaacataagcagtcacattaggcaccttttgatgtaaatctgagggtccaaaatctatcaagtattgttcacacgaaaaaaaaactgtaaaactagcatcaacattgtagcatcagatctagaccgttcattgaaaaaatggatggctgagatgatgtgcagttcctaacttgcagtcacagttaggacttcactaaatctcaattcatcagattgagaggtcatcgctgcttggtgtggtaaaaccgtaaaattagcagtgctaggatcctaaaacctactccttctttaaaattaaccaatctaacattagattaaaagtttctttttccagatttataatagtagatttaggtaatgtctccaatcttaaattgatttattttaagatagaagtagcacgtgtgaggtttttttttttacatcagacagatataaagaaattctctatttctagaggaccattcacatggtaacaacatgacaactgacaagtagatttgtggtttcggcttaccacatctgagccatgcctccactttagtcaagcccatgccccacaacagagctacacgtgtcttgcaaaaggaatttgtgtctagttaagacgatctacttacaaaccgtattgagtgaggccgtaccctcgagttccaagcagtgaaggccaaatctggaactagggagaggcggagtatggttagatatgtcaaatatgaaagaaggcggcggtgctcactgccagggacaagtgaagagagggtgaggaagatggctgatgatgagggagggagaaaaggggcccaccaccatggatgttgcaccgatttacctctgcgccaccctaatcttattatttcgttgctccacgtcgcctcgatctgaccaaattcaacaagtttgtagctagcattggcacgctcatgaccagatttagcgaggtctttgcttgtttgatggttgacggtgaaaaatcgacctgacgataattcctcagccctaaccagccttgatctatgctgatggctagctcgtcggccgaagaagttgaggtcatatatgaggagaaatgaagcgatgacggtgcccaagagtgcttgttggcatgtgccaaggaggagcatgtcaggagagaaaggagaatatgggaaatggtgaggagggttatgctaataccccatctttagagtgtttaatgtaaaattatggacatagtgtatataaattgagataatatcgtgaactaaaatagaaattgatatgggcaacttgtaaaattaaagccactacgtgttattggagaggagtatagtctccgtctatgtgttcttatgagtggcttccactaccgttgctaccctattaaactttagtagttttcaaaatacatccactttaaactctatcaaaatttgataagcctacaaacaaatacatccataatcactaaaatttggtaacaacataatgccaaactttactaaggttatttctggcaacaattcacgtgcctataaacactagacctcggtcagctggtcaagaaacggcgatttctaaatccaaaagggatagtggagaagcgggtggacgagagacacgagacaacgcaagaggctgtagccagcatcaccagctagcaccaggaacaggaagcttctgcccggtttctccctacgtctacatccccggttgcccagttcagctcccctccacttctcaagctcttccaaccgagtagctttcatccaactgcgagagcttctagaagaccagaacaacccagagactgtgaaacatcaacctctcgaggcactcaactcttttcatcaagaagcttccttctaatcatactgcacacatggctgctcaagagtttatctgaattgggagtatccaatctacatgccacacagcagcacaaggcctctcatgagtgaccactgatgttctgataacaacaggtaaacaacaatggcagctgacagcacaccatctccttgctctgcacaaacgttggcagctattgaaacttccacaagtttctgagaatgccagttcagaaagtatggagcaagccacagtaccactgcttatggaacaagagaagactgccatgtaagcagtccagaaagggatcaacttctaacttctaagcacatatatatacatgtacacatacaatttgaggggcattttaccgtctttacactgctcaccgggtcatttgcgtattcatttaacagggtaaccataaggaagttatattggtaaagctggcagattattacatacagtaggcattgacttttttggcatgtagccaaggggcaatacaggcatgtataaccagcaccctttctgcagggcaatttcgtcgtcagtaaaggtcaagctcctctttaatttcaggagcacaaggaatggtaaattaagttaaagagtgttttcctgtgttttacagtttgactaacaaaactcaccccaggacaggggcaaaataagccttcaggaattcacgaggaccagctaactcggagcaaacgatgccttactgaaatgtcaaaagtaaaggaaatgagtcataaagaagagaatttgtccagatctgtgagaacatgagttacaagtttaaataactgaacaaattatcatgttcataaactaactcttgaattagaacagtatcataattcaccaaggatcaggccctccgtccacatataaggtattttgactatatacatggacaagtgctcccaggtgcatagctaaaatccccttatatttgtggacagagagagtaggtaacatagttcatttggagtggaattgaaactattggcaaacaatattgcagtaatgctatgaagttggctccaataatacaattagaacctgacacatgaaaagagccagctgtatattcgacagatttcaacaagcatatttgttatcagttgcatgaattgtatgggacaatgagtacaaactaagattcgttaaactctgggcatacttagtactagtttgccacggcaatgctcccaagtcctgaaatctggaatcaaggctcataacaaagaaaagataattaaattgttgtttttattcctattattttgaagtaccagggcatctagaacagaagtaccacttatacatacggttttcaaggagacaaaatagaccacaaatctcataacgtttcaagctaactattctatacaagttaataatgtttcttcattcaaagcaaacaacatttcatttcatcaccttataaagtcatatagagatcatgcttccaaacagaactgatcccattgatattccaggacatacaaatattattaacaggaaaaaaaaatatttagtcacttccacggcaggtgattccgtgattggcacatataatgaaattgaaatgtcctaatgtttagacgctctcttgtgtgcattaatgtaatagacaagatcggaggaggaggacgagcaagcagatttagctgcaaaaacagtatggaatggatttccgtctgtacctttcaggttctttggccattaacatatttgattccagatctagtatcagtcaaattcgatcttactttggccattaatatgcacacacatttaacttatactgggtccatactcatacctctgaatatcctgcagcttaactaaataataaactaaagtattaacatagtccttttcaagtctttcactttttttgaagtctattcatgataccaaggtgtattcagctatgatacaaaaaaaaagttatgcatacgatagctgtctcttacagtatgttccacttctagaagactaaagtattatagagtattaactatccatatgagcacagttaaactgtacaccaggatcagcaaattttaggcatttagcttccagtacccactgggtttctctgtcacaggatcaagggaaaaaaaggacaaaatgctcagttttcaagcttgctgattaagcataattacataagctaactcctaagaaacatcatcagctctagtcgctgtggctgctaatataagctatgttgttcactattcacttccaagtatgtgcagcagcataaagtagttgtgtatgtacaaaaaggagttgttataaagaacagaagggcatgtcaagtataactgttgtgatataacatgacagttaggaattgtaccagtacgccagcaaagatgtctcaatgatctgatggttatcgcttcatttctgggaaatgaaaattaagagagatgccaccatagcttcaaattctgtcctgaaggcaccgtcttgcacttcaaaaaagtagctacttaaccagtaaaatcatgtatcgtcattatctctacagtcagccatgtcaataaatgatggccgatttgccaaacagctccgtaattcaatcaagggagagatttt

SEQ ID NO: 16238 - DNA, 964 bp, Oryza sativa
aagtcgacaatgcattcttaccttgtcctgataacctgtaaagggtaaacacatgttgcccccaaggctcctgatacagtcccacagcccagttgtactagaggaccaggatctacacaaccatgataaaattcaagaatcaagaaacggagttgaaaagcaaaagggtaggaaacagaaacagtttctgaatggaggctcaccactatccttcaggatatatgtcttggatacgtctttcaatgtctcatatacagcaagatcaattccggcataagggacaataccaagcaaagatggaaccagacctctatagaatgctcgaggaccctcgtgcatcaatatatcccttgacaatgcaccaagactaggtactttaccatccacacatgaataagtctgcagtcgtgttttcactaaatctacgggataaattgctgtttgtgctactgcaccagccaaaccaccagctacaagacgttcagaaggaccaacttcgctcttattttctcctttgctcttcataatatattctttcagcatttcataggcataaaatcttattgcgctttctggagcaactttcacaacattcaatccattccctctaaaaaatgctaacatgccaccctggctccatatatccttaattgaatgcatgactgtagttcgtgtagtctgtacttgcatgatcactttaaggcggtcaagaggtgcagttgcagtacgagatgcagcacctgcaatccctcctgcaatcagatatttacttgcattgaccgacttacttatgccttctggtataacagcctgttcacctatatctacaagacatactctttcccagtgatgataaatattctcaatggttacttcattaggatatagcaaaagaaagtccctccactcttcaaaagtaataattccattgttgtccttgtccacatgctcgacaaaccgtgca

SEQ ID NO: 16239 - DNA, 630 bp, Oryza sativa
gtccttaattaattccaaccatctcctttgtctcatgttcagatccggctgggtaaagatatactttaaactcttgtgatcggtatatacctccgttcgagtaccgaaaaggtaatgatgccaaattttcaacgcatgaactactgcagctaactcaagatcatgagtagggtagttcttctcatgcggacgtaactgacgagatgcataggcaaccaccttcccatcttgcatcagaacacaacctaacccaagtttggatgcatcacaatacacttggaaacccttctttggatcaggcaaaatcaagataggagccgatactaaacgattcttcaactcttgaaaactctgctcacattcttccgaccacttgtacttcacatctttctgaagcagtcgtgtcataggcttagcaatcttggaaaaattctctataaaccttcgataatatcctgcgaggcctaggaaactgcgaatctctgaaactgtctttggttgcttccaattggttacggattccacattactaggatcgacggcaactcctcctgctgagatgacgtgaccaaggaacttcacttcagacaaccaaaattcacacttgctaaacttagcatacaaccgatg

SEQ ID NO: 16240 - DNA, 1089 bp, Oryza sativa
tacgtatgttgttgccagcattgttgttgaagaactgacgctgcggacgaacaacggacgaagaacttccatgtggtatggactggggtcctaaagtaagacgcggcttctgattattcccctgttgtgtcttgaattgagcaatccggcgtttcttctgctccatgcaattgtacttgttctcctggcgaatagccttatccactagcttctggaaatcaggataatctccaatcatgagtgaataagaaagctcatcattaagtccttctaagaacttctcctgacgctcttcgtcattgcgcacatcttccggagcataacgagcaagacgattgaactcgtgcagatactccgtaacagagcgtgatccctgggtgagcgacctgaattccttcttcttgagagacaccactcccgatggtatatgcgtcttccggaaagcagcggtaaattcaagccaagtgataggttcagcagtagttctgttaaggcggaaatgatcccaccattcagaggcagggccatgcaactgatgcgatgcaaatgagaccttctcctgatcagtgcattgaagcaaatccaacttcttctctatggcatgcaaccaatcacctgcttccactgggttggtagtgctagaaaaggtaggtggcctcacacgaagaaaatcagttaacctgttctgcggaggtgcatggttatttccttggttctgctgattctgaagttgctgcatcatcatgttcataagttgcacctgttgagccaggacttgggcaagagttgggttcccttcattgttattattattgggattgttggggccattcccattgctgcgagtattcaccatcttgctggacagggcacaagaagagaaaccggggggggaaactacttaggacagagaattactttaacttttattgatcttaactgagttttattacaaaactgaaaactctcacaccactaaactcaccaacttcctaacactcaaaagcaaacaaacacatgcacttacatcccatcactgatgtaaattacatgcgaagcacacacaagcaacttaaagcaagcaaacta

SEQ ID NO: 16241 - DNA, 562 bp, Oryza sativa
tgttggtcgaattttcagggtgttacagaatgtacggctggggatcctaggaccgatgtgcggccatacgttcatccaccttccttgccacctcctcttgcatgctgagctcgtagctcgataccctgtactcaagatctgcaatcttcgcctcggtatctctcttgctcctcatccgactcctgtatgtgtggatgtcctccttaaatccaatcttccagggaatcacgcctttccctcgtgttcgtcttggatgctcgggagtctatagggcgagtgacagctcatccttctctctgtcgggtcggaatctctctctgtcgggtcggaatgttccctgagaagaggctaccactgcgtccgttagtcgactggcagcctcgcgtatctgatcgctgaagacaagggagccatcaactgggttaagcgttccaccgtgagcatagtaccagaacttcgatcgttccagccaattagcggtggccggttcgatacccctctcaagcaagctagcctccatctcctcccacttcggcatcgcgacgctatatccgcctgaccc

SEQ ID NO: 16242 - DNA, 533 bp, Oryza sativa
ctggccttctgcggtggtgcttctcccttcaatgcggctagttccttctccaaacgatccaccttgtcttctagcttgcaaatcttaccacgattccgatcttcacgatcttgagccgctaacacagtctccgcacgactttcatccatagcccacagcatctcaaccaaatgccttgtggtagcatcattctcaattccttcagtctcaaggtagctgccacggtcacttccctggggttgacgaggatgatagcgatactcagtatcggccaactgatcactgtaacgatcgcggagctctcctatggcgatccttgccacctcctgacttgcatggatgtagtttcttcctccagcttcgaacatcactgaggggatatcttcactattactgttcaaggtgactttgactcggcacttctcttcatgacgatcatgaggaatctgggcataaaaggggcagtcccaaatccaatgacataggacattgtacgcactcctggacagaccctcaacaccaacaagtactca

SEQ ID NO: 16243 - DNA, 735 bp, Oryza sativa
ggtcacatgccgccggtcggacattagtcggaaaagctttccaacaagggtttttctggccaaacgccctcaaagacgcctgcgacatggttcaacagtgtgaagcctgtcaattccacagtaaacacacaaagctgccagcgcaagcactccagactatccctttcacttggccgttatcgtgctgggggctagatatactcaggccattcccacgaggacagggcggctacaggttcctattcgtggcgatcgacaaattcaccaagtggattgaagcgacacccacgggggaaatcaaggccgacaacgccatcaaattcatcaaagggatattctgcaaattcggattgccccaccgtatcataacagacaacggctcccagttcatcagtgccgatttccaggattactgcatcaggctgggagtcaagatctgcttcgcctcggtttctcaccctcagagcaattgacaagtcgagagggcaacggcataatactacaaggaatcaagacccgcgtctacgacaggctcatgtcacacgacaagaattgggtcgaggaacttccatcagtactatgggccgtgcgtaccacaccgacaacgtccaacaaggagacacccttcttcctcgtgtacggctcagaggcgatgctccccaccgagctacgacatcaaagcacacgagtacagaagtattccgatgaggatcaggaagagcagcgatacgacga

SEQ ID NO: 16244 - DNA, 12052 bp, Oryza sativa
acacgctgtaaatgaacggaatgaagatcaatagatcatccgttaggtcgccttcggttttgaacaagccctacaaggtggtcaaagaaattctattcttttatttaccattgattggctatctgttgatgcttttattattcaaccaaactggtggaggagccaaggtcacagtaatcttattaaaggtggtacttatagaacttccatttttatcggtacatgtgagtgtgagctaatgtattccatgatgaaatgcattccatagcattaggattggatgctacagggaggtagatctcggctgtgtcatgtattccatgatgcaaagtcgatgttggctattgtctcggagttttaaatagatcgaagattattagaatagaatgtaatggtgtagcttctttgggcatgatgtacaagaacttttaactcaactgatttaagcgaaggatgtatatcttttactccattaaatgtatgttaacgtgccttgcacgtgcacgctaactagtgaatttgaaatgtgccactacataccccttctaaccattataaaaattttcttgaccaaaataccccttctgctttcttcttccttccctcaccataggagtaacttgcttgctgccttgccatggtcgagctcaggctgcccaacttgcttgcttgattacgttgacaacgacgacgttggcagtagcttagttagagctagtagctagctaggcaatgagcgtgaggagcccgtcgctagatgtcgacggcagcggcgctgagagtatatttgggtcgggtggcatcggcgggttcgcggctatagtgttggagcctccgtcggcgtgctcctcattgtctccaccgccgcactcaccatctacttatgtagcagcacgtccatgccgtggccgccactagcccacccatctccgagacttgtcctcctcgatcacgccgcggcgatgacgtcgaggccggcatcgacgacgcgacgttggaggcgttcacggccgtggtctacagtgaggctagaaaggctgcaacagcattgcggcggcgacgcagacatgctgcctcgtatgcctagagaactacggcgatgctgacgttctctgcgtgctgccgaacagcggcaacctgttccagctgacgccgctcgtcaaggtgacgccgctgtctcttggcattgctctatcgtgaatggaaaagagagatgaggggaaggaagaaggaagaaaaagggtattttggtcaagacaattttgataatgcttcgaaggggtatgcaatggcacatatcaaatttctgtaaaatcgcaatggtatggtttaaatttcatgaatagtattgacatatttctaaacggataaattaataatggcatggatccaattaacccttcattcaagtactggtttatatctctatttaatatcttttcggatgaaagaaatcgttagaattgcttgctgacatattggtaaagttaaaaaatatggaaaaggaaatttgacttgcctaaaattctgttttattgttaagtcacgaaacatatcacagcaagagtacataaaagacacgaaacagaataacatatgaaaacactagttcaggatggcttttgcgggaaaggcagatcacctcgttctatgtcatagcctgaaaataatttttgttttgcgaactttttttattttgggaactaaacatcgttctatatgatagcataaatttttattttgggactaaacaatgtatttttattttgaactaacaaggcatttgccatccatttttactattctactgtatgatgctttcttataactttaggacattttctttcaatttttattagaactttagggccttttctcgccaggttacctttaataaaaaagattagtttactttgttatccatttttactattatactgttgtaaattctgaagaatcatgaagataaaattaatactgtttttctctattcagttcaaagggaaatattcagttcaatgtttttctctattaagttcaaagggcaatattcagttcaatgtttgttattttttaagtctgatgtgaatgaaaacatactcaagagcattacattatctctctttatagtttttttatttttttataaataattatagcaattaacattatttttttcgttatttatatcctcttttctatactaagtcattttaatattttcctaatttaaatttttgtatcattaaccaatttcaatgaaaaatatattgatatccacaataacaaacaaaatactatactcatatgataaattaaagttatataacataacataagacatatgctctcgtatatagtaaaaccacaactcatttgagagcaatgtttatagtgcattatgatcattagattcattacacatgtctattttatgactttagctagcattgaatattatctatatttattatcagttaagagatttatatattatgttagggagaaaatatctcttttctaaaaactagttaagcaacatcgatgtcatggtaattactcatctaaaaattattactaactaatatttttactatgtttcagcaagtaatactaactcatgtaaaattaataaataatacttcagcatgtgcagatgaactagctagtagtgtttagttgcaacatatggtggctagtgctggcaataacattatcgaaaatagaggaatttaatgtgtgaggtattattcatgacaatgtttattttttagataaatgataaaaagtttggtgttcatttatttttaaaaaagagtatatgtagaatattcctttcaatgctacgcatcaaacttcactcttcacctcctccttcaatccaccctgccactcgcctacataccaccctctcatctaccgcgatcatccgttcgagatgcccgttgtcgagagctctaccgactacactgtctccatagctgtagcgtttgtggtggccaagggggcaccgactagcaggagatgctggaactggagtacatggctttcaaactcaaccccatggtagaggatgtcacgccctgataaatccatcccgaattaagaatcactttttaaaaggaataatattaaagagagaatctattctataccactgagtttgttcgagttcaacaattcgccattgacattatctttttctataacataccgacgactttatcaattgttctacaatacaccattagtttaggccttctttttaaaaatacccacaatacctctagtgagatataagattaacaattgatttatcttattagaagtttaaaaaattatgaaaattttaatgtggacccactacacaacatggaactttgtatacatgtttcaagttttttctggtatatttagtttttagaaaaaaaatatcttatgtggtatatgagagaaaatttgcttatacgagagatgtagtatatgaaagatgatttatattaaaaacatcaataaaaatattttatatagcatataacagataagttatattttctaatatatatatatatatatatatatatatatatatatatatatatatatataaaaacttgaaacttctatacaaacttccatgttgtgtaaggatgctacataaaagttttcatatttttttaaaacttctaattggataaatcaattgttgaacttgtatgtccataagggtattttaggtatttttaaaaagaatgtccagcctaatggcgtagtgtagaacaattgataaagtcatcgatatattatagaaggagacaatgtcgatggaaaatcgttgaactcgaacaatatagaatagattctctcattcattgttaaaagtctaagagaaatctcaaacactaaaatacatctaagaaaaattggaattctgcttggagtatttttagtaaattctccttcttctaaaatatctcctcaatttttacttgaattttcagagcacaagaaataatttaaatgcaacaaaaaccaatttcagagttaattaaaaatgaaaaacctaaaaataattctctcttctcttagggccatttttggcccaaagtccttgtctccctcagcccgtgggcgaagtcttcttctctctctcgggccgacctcctctcctccggcccatccttttcctcaagccggcccaccctccttccctctctcccttgggccgcctcggtccagctcctcccctcctcgctcggcccagctggccacgtcgtcttcctccagttgccgcctgtcccatcccggccgaaccctaccgccggcatgccgatctccctccccactcattctcctcctaattgaataccaaaaatcagttcctatcctcctcatcaattcccccacgttctccctcttaattcggccttgattcctgaatttactcttcgatgaactgccgccattgatggcagcccggcgagtactccggccgttcctctcctctccccggtcaatcccctcctcctccccggactataaaaaggagtcccgaccccctcctctctccccacataccactgccctcccccacctctctctagggatgtaagtggatagtcttgctacccgtataaaaacctatttgttagttcatttttcatatggtagtacaaaatttagaaaaaaaaatgaactagaagtgagataagcgggctaaaaaaaacccgcttgcccgccccgcttgcatccctacctctctccctggccgccgcgccgccttcttttcacgtcgctaccgttgcgcaactctgaccgcccctcgccggcggtcgggacgtcctcggagcccggcgtcgccaccatccgcttcgcagcgacctcctcttccccggcctcgcctccgttccgcccgaggccagctggtgcgccggggacgccgacgtccaaaacatcgttatcctccagctttggcaagccctccccgtcgagctgggcgctgccagcccgtgctgtcgctgccgacggtctcgcctcactgtgcttgtccccggcatccccttccctaagcccgaagctcgctggaagcctgttctcgccggcgaacagtgaggacaccatcgtcttcttcctccagcagccccctcccttctcaccggagcgcggcctcactgcgcccgctgctgtcagctgaacctcgtcgccctctccctcggctgcaccttctcttcaagcgaagacccttggaacgtcaccccgtcactgtcgccttcctccggtcgccgttcctgcccagatgaagtgttgcccgtcatcatcgtcgtcaagtccgcagcaccaagtcctccagcgtccgcctcttcgtcaagcccgaagatcattggagccatcccctcgtcgtcgacccgttcgtctccgtcaccctcctccgttcgtcgtcgccgtgccatggtcgtcgccggttgtcatcgttgttcccttcccatgtcgtgcccgtggtgagaacctcttcccttgctaccttatcctcgtcctccccatgtggtcgccgcgtggattgcccacgtgtgtagctcacgtggtagtcccggctgccaattgctcgatcatttctttcttcgagcgatattccattgcgcataatttaatagtataataataataataattaaataactcagaaatatccactttaattgcacttaaaattcggatggttgtttctcggccatgcgagctcctaattgacccgtttaaattgtttaatttttgttataacttaaaagaacccatgtttgttgtttttttgtgttgtcttcatttctttcttagagttgtagccctgctttgttgttttgttgttcgtgtagttgtcgtcgtttcggaagttctcgaagtgcagatcaagtcgtcagtagaccttctcttcgagcaaggcaagtcataccatattcgttgaatatattgaatcccattattgcaaaaacttatgttgttttacttctatatgcatcattaaaatgagattcgctcgaattctactctcacgcagcgggtattcgctacaatgccattttggctatttgttgcatttacaaatcatttttaaggcaaccatgctgacgccgctgccgaccggcaaacgtgccgccgcctccccaacctagcacgcgacctctccacgaaccgagctgcacctcctcccctgaccgcgccacccaaaccttaggccacaccggctgcgccgccacccgcggctcgtctcctcgctaagccgcgctgtagcaaccggctgccgcctgctcaacattttaaggagggggaagggcaggggcgcaaatggcgggggtagagaggtggcgcaccgcgctaggaggcggcggcggcaccttagcctagtcgccttctctcctctcgctcgctcgtgagtgcgtgttgttggtccagagagtgagatgcgtggatatgtggtttggttcaaccacaaccaggggcaaaactgttcgagaaataattgttttgatgaaaaatgttttgcaaatacaacaaacaaccaaaatagtatagtagcgaatgcgcactgcttgagagtggcattcgagtaaaacctattttaacgatggtattctagcgaagtcggttcttaaggatcacccatatacaaaattctctagtggcagtcgaatacagtttgggcgtttcctgattcagtcgtcatgtaatggcattatggcagctacaccccttttcatgttcggatcggcgtagaaatagattcaattttcgctggagttccgatcagcgtggagacgaaccggaatctgatgcagttcttgctcgcgtcggcgtggaggttggatccataaataccggaaggtcagattgtttgcaagcctaatattcccttgccgatttatagaagaacaagtattctgaacaagtattaatggaaacggccgcaggagcaggccctggttggcctgagctgccgatggacatgttgttggagattctgcggctgctcgagtgcccagatgtgatgcgctgtgccgccgtttgcacggcttggcgcgcggcgtaccgcgacttgcgtcgccgtggcattgcagccagccgccagaccccctgcttaatctatagatcggctgctgctggcctgaacgccattggcatgtacagcctttctgaccagaggccctacacgatccccatccctgaccccatcagcgagcagcactggttcggctcctccaacggttggctgataacagctgactgccggtctgacatcatactgctcaaccccatcaccggccgccggatcgctcttcctccggcgaccaccatgcagcatgtcacgctggtcctgaacgaggagggattcttgacaagtacgaggtctccttctacgattggagggatccaagcaaagagcacagcgagcccgacacatactccctggaagaataccgtcgctatatgtacactaagttagtgttgtcttcagatccgtcttcagatgatgactgcatcgccatgctcatccatcagccatatgatcagctctcttttgccaaggtcggaggcaatagttggaattggctcgcagtcgattatactttcgttgactgtatctaccatgacggatggttctacgcggtaacttccatgggagtaattcatgccttcaatcttcatgggccttccgttgtgcacaaaacaatctttccgaggatccaagacaataatatgcaccaggaatacatcgttcaggctccatgggggggccttcttcggatctacagaacagtagacatccttgaaaaagagcaacgacacaaccaagtagttcgtacattggggttcagagtgtacagggtcagtttggatgagcagaagcttgtgaggatgacaggaattggtgaacacgctctctttgttgggcacaatgcttcggtttgcctttctgttaaggaccatcccactttgatgccgaatcatgtttacttcactgatgacgattttgaaacagttttttctttcaaaagttctcgtcgtgatgtaggagtgtgcaacatagagaataacactgtcacaaaagtggtatatcctgaactttggatatattcactgcctcccatttggtttactcctagtctcataggataagtgtgcattcagttatcttaataaatacagatgtttaccaagctttcattgatatagtctctataaaccaccctttcttatgatttcacattttgttattcgaattgttattatcagtgtgacagtgttatcaacggtgttataaactaccttttgattactaactccgctcatcttagttttctaatgtaatacaaacccatctgtaataggtttgtcactaacttctccagctttgctgtgcattttttatgccagcatgcttttccagctattttggtatgtgtgaattacttcggttaatttatctatggttgtgactccgtcatgtttgatgaacccaaaagagttttgttaataactattgaaaattacatggatcattctaatttttgcctagtatgttagttgcaagatatgcttcatgagatcccagtcatagttattaattgttctgaaagaagctctcacatattaaaagatgatgacattattttcttttctgaagacaagcctcttgttttaggaaaaaatatgaattatccctccaaactatcacggtcgatcgaattacctccatgaactcgacagcgtggcaaaaaaatattttacaaaataatggacccacatgtaagtctctatatctcctctctttctcttctactccctctgtttcacaatgtaagtcattctagcatttcccatattcatattgatgtcaatgaatatatatatatatatatatatatatagattcattaatatcaatatgaatgtgggaaatgctagaataacttatattgtgaaacggaggaagtacctccatctctacctacacagggcggcggcggagagtggaaaccttgtcgccgtccgccctgacatcgtcaggggaggcgtcgactgctcgctagtgaccgccgaacttccaggtccatgacaaccacatgtccatgtcgtgggaccacatcaaggcgtcccagctcgccggcttcgacgtcgtggtcaacaccttcaccgcgctatagaaacgctacggcgacaagttcagccatgtcgatgcgcgccttgcctacttcatcggcctcgttagccagccatcgcacgttgcagccgtgcaccgcagcaacgagggtggagatggagacgttgagaaaaactgcctccacagcgctaccgcgcaggcccaagcatcatacggcggaggtgtttatctccaccgtgcaagtgaagtcattgtcggagaagagggaggagaacccacccgcgacctggacagggaagcggtccctgccatggcatgcgcacgcgcgtggtacgctgcgacgttgccgctcctgacggctagctcagaaagctgatccgggccgttgtacacccgcctgagctgacctggcgcggcggacggccagcagaaaagcgcgagtgccccaacttgcaacgcgtcgatgaacgcccctcccccgctagacacctgggagaacctcacgaacggcgcgaagcgacagcggcagcagaggagttggttgcgagggcgcagtacacggtggagatcccctccgtgacggtgtaggccgtggggctggcagcgacgacaagtgtggaggatgaggcgtgggcgatgaggtggagcggcgcaaggaggagacaggtcattggatgaggtgggcggcgacggcgatggtagggaggctggtggagacgaggcgtcagcggcaaggagatcgatgggggccgggcgacgagtcctttagatccgccctccgtgccctcgcctcgcacgtcgcccaccgccgtggccttccgcccacctctcccgccgtcgacggcgtcctctacttcaccagtgcccatgtgacgaggtcggggaagaggggaaagagagaggcgagagagtctcatgggtaggccccactatgttttttaaagaaaaatgctgaccgaattgccagcgtacgccgtgtaggacaaaactactccggattgggttgagggggcttattcgtccggtacagactgttcagggtttaaaatgtctggttttatggtttaaggggtaattcggactgatatgatagtttatggggtaattcatactttttcccttgttttattacttcttatgcagctttgcgcacatgtgaaagcattgtgattttcgtcacgcctttaacttgcacttccagtacattcttgttccattgtgttcagtcaatacctcactcagcatatggcagcatgcaggatatgcataattattcaactaaacttcagagacatctcaaattttacaacatgttttcagcatgattttgaagaccataaactaatctcccccattattttggtcctgaaaacctatcaggaagaaagatgtaagcaacaaattattaactaaaaaagatttacgatgtcacaggtaagaaatcagtaagtagagttgagaaatgtgagatacactataactggttaagggcatctcagggaacgaaattgataatacaaacaaaagctttataggtcaggtgaactccataactggttgcatcatggacatgcatatgtagttaaaagagttgcagatttagaatcaactgttatgtattcataatgaaatggggctagaaaaggcgaactctgaagaaacttgacaaaattacaaagaaaacaagaaagaggctggagtagttcaatatgcaaaagctaaaggatgaaccgtgtttacttatagatctggctggatactccgtccattaagatggtaggttctaacagtactctctcttattcatatataccagcataaatggaagtaatagatgactaaatgttttacatttcctaattcccatgcttaaagtaattgattaacttgcattccgaactgtacctgttttcatgagattgggcatcatccatataggaggcaaccaacttttccaaggttcagggctaaccacatttgatagagagttattttccaagctgtaaattccaacatcccgtcgcttatgtctaaactcaagtagccatagatactcatcgtcggtaatatagacatgatttggcatcaacatatggcaatccttcacaggaaggcaggaggaagtattatgcccaataaacagcgcataatcacctatgcctgtcagtttgacaagcttctgttcaccaatatcagccttgtatactacaatgtcagatgtatatagctctgtttcttctatttcaggattcccattgcgcggaattattgtcatcctgtttactattaggatatcgccccatggagattgaactatatacatctgttcataccctagtgttagcatatctttaagaattcttttgtgtacgacagatggcccattcagattgaaggcatccactgctcctaaaacactgacggtgtaaaaccatcccttatgatagatgcaatcagtataaaacaaaccaataggaatccaattccaatgatcttctcctactcttgcaaacgagagctgtgaatacggttgatggatgagcatgacaatgcagtcacctgaagatggattggacgacaacattgccttgtaatagacttcacgatactcaggcaaatcaaattcatatggtgtttcctccactcttggaatcttgccattatagtatggcatctcatacttgtcgagaaccccatcttgattgaatataggcttgatatgctccatggtcgtcaccggcggcaatgcaatctgttcgccagtgattggattaagaaggatcagattagacttatcatcagcagtgacaatctagccatgagatgagccgatccaggtccggttgctgatgggagggtcagggagcgggattgtgtactccctccgctccaagagac

SEQ ID NO: 16245 - DNA, 1178 bp, Oryza sativa
aaagtgcgttggtatagagagagatgaggaggaggatttgggtaaggatgctcaccagaatgcggcggaagcatagggacaaccgacggcgccattactcgcgggagggatggatggggatcggcgcaggcagctgcgggcgtcggagtcggagccgacgccgagcggaacgggaaaaagaaacaccgcccgcactcgatttcctctattttttttttctttttttcgactactagagaaaaaaggttgataaaagagagcatatggtcaataaaagctgagtgagacagtattgtggaaaatctgaaaagcaaaatataacaaaaacaaaaaggcgtgtatgtgtgttggtatttctacagatagaagaatccataagtacatggatgtaccgatgtagcacttcctctacggagtattccaaggttatcgaatcatagggaacgtgtgtggtcaaatcttccttcggtttatcgaggacaccaagcagatgataggccaggatatagaggattttctagtgagaaacagactttaatcctaatgcaatacttcatgcactagcaacccgctgttcccagatgtcgctctactacgtacccggacagggaggacttgggtgatcttgaggcctgtcaccacctctatacctacctcaaacacatactgtgggatacgcagcaattactggataacaattgactaaacaccacgtctaaacaattaatatctactttaatgtttataactcaccaaaacaatcactatatttcagttgattatagtgaacaataatcccgtatgttacttaggaactaaccaagagataattctcacaagataaatctaaattactcaagaagaatattatattgaattcagagtaataatcagaataaaagaaataggagaagattaccgacaactctggaattcttctgacttcttctactctactctcttcctattctagtatacaatatagtacaatagagcctcttataattcatctcaagcttggaagtgtgtgagtgaagtgagggagtgatgtctttatatagaggtaggtatgacggttggcgaaggagaaatgtccaaagtgccctccaaccgtcattagggatgcatctggaacgtccacgccaaaccccacatccaacggtcgagatggtggttcg

SEQ ID NO: 16246 - DNA, 49795 bp, Oryza sativa
ggtattttgggctgcttctctgatgttttgatgaagtttataacccatccttgtatgtatacataattctcctcactttagtctagatttcctcccaacatcggggtttatcacctgcatacaaatatacaccaacacttatggaatttgtgagattaagcatctatcactatgttggatgttttattatctgaactttatgtagatgttggcggtatagaatcgacatttaacagttgccaacaatgtgaagattggaaaaatatatatatgaatttttaagtagatactccctcatgtattttatatacgtatggcctttcgtcttattaaaaaattaattattatttattttgttataaattgatttatcatcaaagattcttcaagcattactttatatatttattttagtttatatttgtttaaataatactatgggattaactatatatttatcgtcaatttttttttaaaaaaatgacagatataaatatagtacaatcgtgatgtaattacatataagttgtatgtaacttttaaaaatcccgaggtaatatgttgccaaatcccctaacacgtgcgtggggtgtacttttctgctacctccctggcatgaattttaaagcaaatagaacggttcaaaattatattatagttacatgctagttatagttacactagaatggtactatatttacagttgtcaaatttttaattatcgacaaatatatagtaaaatagtaagaggaatgattaaaatatgtctaaagttaatggcgtcgtatattaaaaaccggggagagtgtatttaaaaccatatataagaatatatagggataaggaagagatagatatttatcccaagttgacagatgaagctgtagataaacattactatatatcaaatattaattcacataaataaaggaaataaaaacaaaaaaaatattaactcaaggttatacgctgttccgatcaatataataatataatatggtggtttcaaaatatttctagatttgatcacttacattttgatcaaatttattctgctttagtatcatgttgctcactttgcatagtgccagtccatgtttttcttctaatttattagtttccgttttttccgtggagtatatttttttactttgccagagcctacagtaaaaataaaagaaacagaaaaattaatagaaaaataaaaagaataggaataggaaaggtcggtttccatgttttggaattcatctctgatccgctgaggaagtgtgcagggtttacgcctgcttttggtaatcgtcttgatcgttatgatcctttggagttaagactagggttttgtcgtacacctggtctctttcaatcttgggaagtctggaaatcaaagaggaagtttagtccgggtcggtttccttgggatgcaaaagggatatttccaatctcgtttgatctccgctataaagttgtggtattcggcaggccagtaatacaatacaaagttctccaaggttttcccctcctggttgcaatttagggtttctacctcataagctcaaaggacgatccatggcggttgctgacggtgggggtgataaagggattgtcactttgatgatcacccacccgaagctgatcggcggtgacgtgggtgtacctgtgggatcggtagatttgggggaacaagagtcgatgcaagcgtcggtggttaaaacagggcttgtgatggattctgataccggggtgtccatgggaccagagatttttacagaaggagaggtgcttgaagaggaggaagatgtgattgaggtggttctggaggaagatgaagttcagaaagcaggatagtggacagttctcgcaaggttccgaatcaggtggctttgttcgaggatatgcggagggcgtcgagattccattcggacatgagctacaagtcgctaagggataacatgtttatcataacctttactgtagaaggtgattatgagtttgtcatccaaggggggccatggatacacagaggagatgctcttctagtggccagttttgatggattaacaagcctatcgtctgttccactagagtttgtacctatttgggtcaggatttatgacttcccacttgtgctgatgacaaaagccagggtgaatcgtatggtagcaaactggggcgtgttcgtgaggtggatgttggtgacgatgggaggaataggcatgacatcttcagaataagggtggatcttttggttaagcgacctttaaagttgaagctggccataaaaatctctgtccaaggcaaggaggtaacacgaaagtttgatctccgttatgagagggttccacacttctgttttatctgtggtttcattggtcactcggataaagagtgtgtgaaacgtactgcaaatgaagatcacccttttcagttttatgcggaactgcgttactcccctctaaaaccttttgagaggaaggtgtgcaggtgttatgaaaatagatgcacaacggagacacagatttttacgtggaaaacccttgcgtgaaaaaactacgggcgccgaccggcaatgatcactatagaggagttgattataaacgtaggggaataacaatgggaacgtcaccccttcccgtacggtttacaagagtatatataggagataatagaaagacacctaataggatagacatgaagtcctagtaggaaattcatccgaatatattgtgggcccaaaattcagatcaaatatttaacaatctccaccttgagacgaattttctcttgtagcataaaaacatcaatcaccgaacatacctcatgtaggtaaaatcaccgcgcgtcaaatagtctctaggactatactgtaacaccaaccaagcttgagcaaagttcaaacttagtagcaggaattggctttgtcatcatatcagttggattatcattagtacttattttgcataccttgacatcaccttcagtaatcacacttcgaataaagtgatatctcatatcaatgtgctttgttctctcatggaaaatttgatcctttgtaaggcatgttgcactttaactatcacaaaatatatcaatgcaagacgtaactccacaaagctcggtgtacaaacctttaagccaaatagcttctttacaagcttcagaaatagccatatactctgcttcagtagtagataaggcaacagttgcttgcaaacttgccttctaactaacaacacatcccccaatagtgaaaacataacctgtgagcgatcttctcctatccaaatctctagcaaaatctgaatccacataatcaacaagtccatctctagatcttccaaactccaaacaagcactagatgtaccacgtaggtatatgaaaatacactgaacagctttccaatgctctttgtcaggattagccatgtatctactgacaacactcaatgtgtcgacgggggatacccgtagaccggatatagagggtattggggtccgttggtacgaggatctacgtagtacggcatcaagcaaacaaaagacaaggattatactggttcaggccctttggtaggtaatagccctaatccagttgatatgggattatatgatggaaaccacagattacaatgggaatagcagaactccatgataccgatgagaccgtagtcgagttggtccgactagatctcccggtgacttggctcccgcgggctccggctccataggctgtggtgggtgtgttggcggtgatattcgatgccttaggtcctgcccagggggtcccttatataccgcgggtcagttgatctccaagtagtactcggagatatcggacctctcacgatatggtaaagacctagtcttgtccgagtagaactccttccatccgtagataccatccctatcacgtgatagatttccttaatgtatacggaaactatccatatacgcgcgggtataccgtatcagtatacaacgtacatccaaggatagagggtataccatatccgtaaccctgacacaatgcatgtgataagtcaggacgagaacataccatggcatacataagtgaaccaaatgcaattgaatatggaaatctagacatgtactcaatatcataatctgactatggaaatctgaagataatctggaatgtgcagctcaaggagtactcactggttttgcatcatgcatattgaaacgacaaagaactttttcaatataacctttctgactaagatataacttgctagaatgtctttctctagtaatttccataccgagaattttcttcgctgcacccaaatccttcatctcaaattcactactcaattgtgccttcaactttgctatctctgatttgtcttttgcagcaatcaacatatcatcaacataaagaagcaaatatatagctgaaccatcaacaattttgagacaaacacagctatcataattggatcttctaaacttttgagaaagcatgaaagagtcaaatctcttataccactgtctaggtggctgcttcaacccataaagagatttcttcaacctacagactatgttctcttttccaggaacaacaaaaccttcaggttgctccatataaatgtcctcttctaactccccatgtaaaaatgtagtcttaacatccatttgctttagttcataatcatgcattgtaacaatattgagtaaagtgcgaattgaattatgcttcacaacaggggaaaagacatcattgaaatcaattcctgaaatctggctataacctttagcaactaacattgctttgtatcttgcctaatcacttggagatataccttcctttcttgtgaagatccacttgcaacagataggtttcttctcctttggcaacttcaccaattcccaagtatgattcttttcaagttatccatctattgtaatcatcagaaacaatagcctcagaatatgtagaatgttttgcattaccttcaatttattctgccacactcaaagtataagcaactatgttcacttctttaatataaacttacgaggagacacaaattaacatgctcagaatttcagatagaacattgagaggcattttgtagcattaatacaaaccacataatgctagcagtgaacatgtacaccgtggtgattttcatcatcacaaaatttagaagagccaccttacaatccgactggatgagtgtcaagcatgcaaggaatgtcaaaagcaagaaacattgtaggcatcaagatgtttgactccgtcagaagcacttagttggcagaggtgatcctatcaggattcaggacatacaccaaactgaacgaactatattttcttttgattaatatattttcaaacactcaatcaaactctgtagtacgttccagaaatatttggtttgcacttcttcatcatttaagcagcaaatgctacactacaaccaaaccaagtagtaccaaattaaacaacatttgctcacctggtgaggggggaaacgatgagctcgacattggggaggtagagatttggactgaggggaagcatcacctgtatgtagaagaggagttgccctggattggggagaccgtgcactggacggatggccggtggtgccctgaacggaggacggcgaggtgggcgatgatttgcggcggccccgagcggtggagacggcggagagagacccgagagacggcggaggcgagggatccgggtggagggcgcggtgatttgccggtgggtggggaggcggtgctcgttcctgacgcggaggggagggatgcagacgaggcgcagcgattgcggaagagagggagatgcgggagaggatgcggatcctgacgcactgtcgcgccgatgcggaggaggcgcggtgattgcggcgagagagacagagagaggggggctgtgggagaggatgaggagcgacatgcgcgcatccgggacgttggatccaaattcttccgatgagtttcgaccgttggatatgtgatatgatgaatgatgaatgagtaaaaccatttattcaactatagggtagatatattttccggttctcttgtctttgtcctgtagtttccaacactcagagatatcatgtccatctctcttgcaatatttgcatgacttatacctgcctctggactttgatctcccatgatagatacttgaacttttatctcttgatttgctgtttgtgttcttctcctgttgcctacgccaaacaaccaagccttctgcttgtgaatttgaatcttcagagggtaccatcttcttcatcttttctttggcatgcaaagcaccataaacttctttcaaagttagattatcacggctataaagaatagtatccctgaagtttgcatatgagctaggcaatgaacacaatagaataaggccaaaatcctcttcatcatactttacctccatagactcaaggtcagcaacaatttccttgaatgtggagagatggtccatcacagacccatcatcttgcgacttgtgcaaaaataatttttgcttcaggtgcatcttactggtcagatccttagtcatgcatatctattctagcttcaaccacagcctagcggctgtcttctccttaagcacctcctgcaaaatattgttagatagatgaagatgaatatataacatagccttacgatcccttttcttcttatcatcagaccaatcctgtgtccttttgttatatccagaaagcgcatcatcgaggtcttgttgtgcaagaatggctcgcatcttcacttgccaaagtgagaatcttgtgtcttggtccagaagtggtagatcatatttcaaactcaccatgagaattaatcctgaatttactggtaagaaatttaggtaaaccttgcaaaaacgtgaacctctggtgcactttccgtgtgcacgtagcgaagtatgtagatcaactaggtacacaagcttggtagccatagaaattttcctctggaaaaatcaagctctcggttgatttgtttttttcacctcaggaaccatgcgctggtagagatggccttcttctgctgctgctttaaccctgcgctgcttctgtccgactccgatggcaatttcgacgagaccgacgaacgatatgcgccgccgccaccgcgaatcaaattgatctcccctattggaaaaacatgccggtgactgggattagcagattgatctccaatgctctgataccacttgttataaaaatagatgcacaacggagacatgaatttttatgtggaaaacccttgcgggaaaaaaccatgggcgccgactggcaatgatcactatagaagagttgattacaaacgtaggggaataacaataggaacgtcaccccttctcgtacggcttacaagagtatattaggagataatagaaagacacctaataggatagacatggagtcctactaggaaattaatctgaatatattgtgggcccgaaattcggatcacatatttaacagcagggtcaaggctaccccatctgaagggcccgtaacttgttcttttgggggagctgggagcgctagttcttcgtcttcaaggaggaagcaaggagatcatggggctaaggagatcccggctagagtggatgctcatgatggttttgatgtaagagaaagtgcaggagataagaagatagatgaacaattggctaaacatactcagaacctcaaggtagatacaaagcagaagcaaccgagttcgacacatggggaggaacctgtacttcagggtgaaggggttgtgaaatcaactactgctatatcggaatctgagatgattccaactataaagaacattgaccagcaggtttcctctggcgatgggtcatcagaggatatgattagggataaccgtaaaagaagtcaagtgcaaggggtgcgcagaaggctggccgtgtcaagcaagcgctgctagagtatcagcaaacggtggagagtggtggcaactcctctttagaaccggtgagcgcttctcgggctttgaagcggatcaggaaatcggttgaggggacaggtaggagtgatatggaggcaaccagccctggggctgctggtcaactgacgggacctgtgagagggtttcgtcaggagcaatgagttgcctagtttggaactgtcgtggtatagggaacgctacaatagttcgtgatctttgtgccttggtgaaagaggcgggttcccacattgtgtccttaagagaaactagacaaaaagtggaaaaggttagatgtttgcgttcaagattgggacttaaaggttttgtgggtgtcaatagtgaggggatgagtggggggcttgctttgttttggcataagtcagtttgtatggaagttaatgttttgaacgaaaggtttattgatgcttatgtgcgattggtcagtgatggtccggtgtggcatgtaacttttgtatatggtgaaccgagagtggaacatagacattgcatgtgggatttgttgaaggcaattaaacaatcatctcctctgccatggttagttttgggagattttaatgtggcactctggcaatttgagcacttttctgctaagaggaggggtgaatctcatatgcaagcgtttcaggatgttttgcaaacttgtcaattgtttgaccatggtttttcaagagttccctttacttatgataatagaagagaaggacgtagtaatgttcgggtgcgccttgatcgtgccctggctgatgagagctggagggacatctttagcgattcccaggttgttcacttgacatcaccgtgttcagaccgtaaccccatattgttaaggttctcctcggaacaagacaaggcctaccggaagaagtgcttgcattatgagatttgctaggaacgagaagctacatcagaggaaataatcaaggagtcttgggacgacacaggccaaaaattacatccaggtgatattaacgttactctgtctaaggtcatggggacccttcggacatggagtaaggtgaagtttaagaatgttggaaaggaacttgaaaaaacaaggaagcaacttgcagggttgatagagaggaatgcagacaggaaggaaattagacaagctactgatcgtatgaatgaattgttatatagagaagagatgctgtggttgcaaagatcctgaattaattggttaaaggaaggagaccgtaatacaaatttcttcaatagtagaatggtctggagggctaagaagaatagaatcacaaaaatccgagttaatgatggtactgtttacagtacgacaaaagaaatggagcaacttgctacagaatatttaaaaacatctatactgcagacccgtctttggaccattccagggtttcacggttatttcaacagaaggttacttctgaaatgaatgtagcgttgtgtaaagattttactgaggatgaaatatcagatgtgctatttcagattggccctttgaaggctcctggaccggatggttccctataagattctatcggagaaactgggcacatatcaaggctgatgtggtgaatgctgtgaaggagttgtttcaatcgggacatatgccggaggggatcaatgagacttctattgttctaataccaacggtaaatcaaccagtcgacttgaaagatttcaggccaattagtttgtgtaatgttatctacaaaattgtttcaaaatgcttggtgaacagacttaggccgattctggatgagttgatttcagtgaatcaaagcgcctttgtgccgggacggatgatcacgaacaatgcacttcttgccttcgaatgctttcaccgcatccagaagaatagacaacctaataaggcaacatgcgcttacaagctggatctatcgaaagcttatgatcgtgtagattggaagttcttggagcaggcaatgtacaagttgtgttttgctcaccggtgggtaagttggattatgacgtgtatatccacggtgaggtttgcagtcaaatttcatggaacccttctgaacacatttgctccaactcgagggttgcggcaaggagatccgttgtcaccctttctcttccttttcttttcatggttgataggttgtctttactgatggatgaaaaaatttatcaaggagcgatcactccggtgaaggtctgccggagtgcgccaggcatttcacatctgctttttgcagacgacacaattctgtttttccaagcagagaatggacaagcaaagattataaaggaggtgctagctaactatgctacaggaactggataactcattaatccggctaagtgctctattatgtttggtgattcttgccctttagattgccaagaggctatcataacaaccctgcaaattgggagaaggggttttgaggataaatatttggggtttcttacacctgaaggaagaatgcacaaagggaaattttaaagtttgcaagagaaaatctggaagaggattatgttgtggggagagaacttcttgtccagcggtaggaaggaaatcatgcttaaaaatgccattcaagcaattccagtgtatgtgatgagtctcttcaagctgcctgcttctgtttgtgatgatcttaacaaaatttcacgtaattgttcgtggggagtcgataaagggaaaaggagaacccattagaaattttggaatcatgtcacgagacccaaacaatctggtggtttaggcttaaaggattttagattgttcaattaggctctattagctagacaggcttggcgactgatagactgtctagacagcttatgtgtgagagtgttaaaagcaaagtatctccttaatagatacaagcttcggtggtaatgtttcgccagggtggagatcaataattcatggtttggagttgcttaagaaaggaattgtctggcgagtcggtgatgggcgttcaatccgtatctagcgagattcgtggttaccgcagaatcacacacgaagtcatataatagtgaaaaggaactacagagagagatggatgttcggatttgatttccgaaacagggacctaggatgagcaactagtgaatcataccattctaccagttgatgctgaattgatcctgaaaatctggttgtcatctcgtactgaaaaggattttttggcctggcatccagataaatgaggcatcttctcggtgagaagtgcttatagcctagctctgttgttggcaagcgaggagtgtagctctagctcttcggaagtgagtgttaacaaagtgtggaaccaaatctggagctgcaatgttcctcaaaaggtcaaaatattttatgaagagcagccactaattgtttctaaagagacggtaagcaacactgcataaagctaaatggtatgcaatttatgctcaattccctcatatggttttattgtttctctacgatggtggaaagattgatggccaagctcaactccctcatttattgtttctttatgatggtggaaagattgatggccagtgaagggccaggctaggagtggtaagtttttgtgagatacatgaccatttaatgttgttcaatgtttgttatctttaaactctgatgtgaatgaagacatactcaagagcattaccttatctctctctatagttttttattatgatttttttataaataattatagcaattaacattgttttttcgttatttatatcatcttttctatactaagtcattttaatatttttctaatttaaatttctgtaacattaaccgatttcaaagaaaaatacattcatatccacaataacaaacaaaatgttatactcatatgataaatttgaagtcatgtaacataacataagacatatgctctcgtatgtactaaaaccacatctcatttgagagcaatgtttatagtgcattatgttcattagattcataacaaatgtctattttatgactttatgtagcattgaatattatcaacctgaggccaacaatggaagaaaatttggaggacaaagatgcatcaatttgccagcctgtgctaggttcatctgcatctgatgggtgtatttccatctcaggtaatgctggaaattaggattacttctctattactacctggaaattaggattacttctctatccaaaacattgaagtcgtctgactccggaacttatttaatttttcataccctttttttgcgccttgcatgctttctataagctgatgatatttctatgtactgctttttatttaaacagttcagaaaaaaagtgggcgaaatatttatttagtttataccatgctaaatggttcttcaaacagttcacagcaaaaatgctcagcacactctaccatgtgcatataccatgatttgttttttttccgtgtacatgttccaccaattccgtaaattgggcaacctatgctacttagatagatcttaataaatcccttggtttgaatgcctacttttttttttgtttctcacgtgccatgcatggatgcgaaatgtgcagatggttttgctgccggctgataaaccattgcagcattaggagaggctatctactatcaaatctgcataacatatatagtacatgctaaactgctcatgggccaacgatgactcatatatatatttgacggaagtttacatgaagatttgaaaattttctttcccattcatttttcaaagcttaggcactcatgaggtgcggctttagctttggactgcgcaatatggagcccagtctatttggagaatgagcttgggccaccttatttgagaacttttagggtataatatattaccagtatatactggcagtatataaaagggcatattagaaatttgatagaaaataaaacaacaaatttttggttcaaattgaatctaattgagagtacccggtcctggatcttattgtgcactaggggaggagcatcctgagcgctatttgatgacaaagcacgtgacgatagcacaatttgatgatagaataacgaagaaaagacaaaattaccctttcaaactttatactgcaatctaattaaataaaaaattaaatcaatctacaccgttagatcatatatacttgcagtatatactatgagtatattgtaccctaaaaatcctcccttatttaggccagctcttttgtctacctgaggcaaattaaatgtgttttggctaatttttggttccggatggtatttgcatctcgtcagtgattgtgatgatactgaccaaaatgtattcgccaagagattaattgtagtgcaatgttttacgttatacgagttgttcaatcaaaatgagtcctatgaacactactgatatacttcctccattccaaaatgttttaaaaaaagaaatagagggagtattaggctctcgaaaggctctcattttgttgaatcgttgttcgtcgtagatagtactcctatataacaacttatgtggtactgttctgaataaaaatgtgcttctggtgatgtttcatttggactttggacttttctcaatcttaaggttggactttaggaagttgaggcccaagacatattttcagtcttcagtttggactatctagagctggccagcagcggtcagagaaattcctgttcatgcctgccaaccagttatcgttatttttctgaacacgatcagtcagctccataattaagcacatcgtcctcgtcgttttgcataattttttttcaaaaagattagtacttggtcaattatgtcatcttatattctatatagtagcggcaggcataatgcttcatctgatctgacaaaggcagccatgctgacaaaggccatctgatctagagatcgcagcggccatggacccatcacccatggttacagttcgcctccttttgcgatcattgattcttctgttctcaggaaggaattctttattttcctataagactttatttgtttaatctcttgtctaaagatatttgagtgagatttgttgagaataatttcacgcagtgtgaaattaatccctcaacattttaatccctcttataagaaataaccgaacaagacataagtaaaagacataagtaagttaaggaataatggttgattccatttagagcctattcgttttggacgaatttcaacaaaaggaaatagaaaaagtggaggaatagaaatgcattcacgcttcaatccatacgaatttttccataaggtttgtggatgaaaaatttcctttgttttctcttgacaacttgtacgaaatgaaaattttcctgtggttttcttatatctacattcctatgaaccgaatgatattcataggaattaattcttagggatccaaatcctttgtaattcctccaaaatgaatagggcctaaagtagcatatgatcaaaacaccccccacctatacaagctctgtttacgaaggatatgaagctacgtctactctgttcgtgaaaggatgccttagctttgcccctcattcgtgaaaataattttcatcttttcgaaggccaacaaaaacaggggcaatgcaagtttctagtagcctcaattgatgtccgcaacggtgctagactgctagccatgtggagcggtggacctagaaactgcgttttgcatttcataggaacatgcggataaatttaggaatgatagagctgagaccttgagtaatgacttggttttcacaggattatttatcaaaactttgtctagaaaatctaaaacatcaaagttccactacgatgctctttactgctagtagaaagcaatttgaaccattaatcctattccatcgaagggttcacatctatttatattaccaccttagtttacggtagtagaagtatgaagggtattattataaaaaaagtgcaaaaagctataatcgtcatttagcagtgactaaacattgtttttctttctttttttgattttttaggtggaatatgagtgatgccaatacaatggataaccacatatattgatctagccatgaaaaaaaatatgaataaccaaattacccctaatcactgtcttagtaaattactgatttaccctggataaccacgtatattgatctagccatgaaaaaaatatgaataaccaaattacccctaatcactgtcttagtaaattactgatttacccttaatagtgagcaattcagatcatttttactggtagtggtagtataatactagcaatagagagaaccagaagcatcgctcaacatcatctatttaagaacaaaatcaacattgtaaaacattataaaaaaaagaatggaagtagcagtttatttatgaacactgttataactactagtctaaatgaatatctacactgtttggggtagctgaaaaattgttagaaaaattgtagctataataaactccctcaaacatggctagaatatgtcggtacccacttagacaattccagacccaattaatgatttggcattctaattccatctcttttccggtgtcatttcccaccatatcgttgataataatctacgagaagcgcttgggcttaaccagtaaattttgagtttcgaaacgtgaccacctgtaatcctctccttcattcttcttccctcttctctgtctttatttttcacccatccccgtgtgcagccgcgcagcacaaagagcccacaatgcctattgggcgggtgccagcaaggggtggaactcagcgaagcgctgaggacttgatgaggacatcctctactattacccgttagcaaaaacacaaaagtcggacggcaaccgtgtgagcctctgaataatcccaccttacttagcttgggaggaggaagccaccttaaaagggagagcgacccttcctctattggactagtcttttagggagattgggcctttccccgagtgggtgtgtctaagaactgttggggtccgggcaaccttaatttgttaggcctcggccaaccccacctgggccggattgttatcatttggtatcagagcgcagttgtaggtaatttatcttcccataaccagaaaattgccacacaaaaaatatttattctttacctagacaatttgagccgttgcattgttctattagattttgctttattgaattctagattgcatcgtcatgttgagtgctggtttagttttagatttaatttttagttttgagtattgcatctgttcatcacttaggtctagtgttcatcactcgtgtcgagtgctggtttagttttagatttaatttttagttttgagtattgcatctgttcatcacttatgtctagggttcatcattcgtgtcgagtgctggtttagttttagatttattttttagttttgagtattgcttctgttcatcacttaggtgtagggttcatcactcaagtcggtgtgagttgtgcgtcagttttgggtccagtttttcatctcgtcgattgttgtcgggaccttgaaaaattaaatcgtcttgtcgttgggtttccgtttttgtggtttggagaagtttacatcgagtggttttggacttgttcagttgttagggtttcctgttgacttagccttaacatgattgccattggccgagaagagtattaagcgattgattttggagatgatagatcggtttagctgttgtagtgggactatcgtttggtcaaatcgatctgtacttatcccctataaaaaaaaggaacgagatcaacagccaaagccgactcgaagtcctggggcatgttggatctccacgccacttttgctttgatgaagagaagattctgttgtctgcaagagagagaatttgcataaggttaaaaccgatacatcagtttgcagttaatagaattgacaaaggaaatattcttacttgagggacagcttcagggaaaaggtttgtcaagtacatggaagccgattgatggaataaatgtttcttccactctatccacgatcggtcaaaagctgcacttctcaacatcctaaatttgatattgttgatgctgcaaaggtggtcctggtagatttagcagctgatccatcataagcaatgatgtgatctctcctctactttggatcttgtcggcaaagaataggctgatcggcagctgacctatgccgaattgtcttgcagcacatgttggatgataaaattcataggtcatcttgatgttcttgccctgatgaatgccgacaggaatgatgcaaggtctgatagctgctgaaaatacctccctggatttgtcatatttttcggagttgacctcatcaaaccaaaaatcttctggtagctcaaaaacactatgtccttcatatgcaaaccagattcttgcattcttggggaacccatcatagaagttgttgaaccactctccaaagggctcagccgatagtttggatgcaatattaaccgatgctgcttctccgaaggacctacatcggcgtgtggtgctggtttctccatcatcatcagtgatcggctcgaatcttggaaattctgcattggctaatggcggccgatcgataaccttcctagtgtgcaagtttagccaaatttgcaataaccaccatggaccccctgtgccgatttactttccagaagctatcttggttacgacagtgttcaaggtttggtacagatatcctagcaaatactttccaagaggaaattgtttcttatctatcaggtttcggctacccgttgccagtttgtagttggaccacagtttggactacagaataggaattttttgagccacatcataaggaaagctgcatgttcccttgaagaaactggcccagttcccatgttcttcgcgtcataacctaaccaaccacctatggtcctagtcttgaactcatgattaagttgggcatccaagcaagacaggttagccgatgaggtgacatctagactagtgatcatgatgatatctaagaagattggggtcatcggtccttgagagaaaaggaaagtattcatggctgtagaccagaagtaagtggcggctgatatcataggttcatccttcgccatatttgttgcagttagggcttaggcctgggatatgctgatttcttcccagtgagttgatttgctagccgataccctcttgtaccaagcaggccaactgttttcagccgatagccaagacttgaaggtgtttttccaacaactgagatctgggttggcaaatcggaagggaatgtggttggtctcaccattaatgaactctgtgggatctaagtcaccgattggtccgaggaaaaactgaaacttatcggttatgctagggattgcaacttggtgggtgagatgctataaaggaggaaaatcagggattgagtgagagaagaaccaaatctgcgaggtaaagaagggatttagcctatggatacttacctcaacgtattcggcggccgatgagctcggtggactagcggaagttgacattgtcattggcggaagttggagtcgccggaaatcatctctggatcgctgaaactatcgagggtgttgccgaagagctcgaggaagaagattggggaaagttttggctagagcggttaaaacggaaatgacgctgtgaaacgagaagagcggtggttactatttaaaagggagcacggtaacggtcaaaacggaatcggttttggaaaccctagatcggctcggaaaaggaaattgagcaaatccgccactttacaaatatagcggacttgggggcatgtgttaacgaccaaatttggtaatgtatgaatcaggtttgatattggaatcaacgcagatttgacaaagagatggattcgaagaacagagtatgcatcggctgcgatgacgtcggctggagtttgcatcggctgagatggattggacagaggacagccgatagaggtgatgcagccgattccgattgcggtggcttgagagttgtttctagaatcgatcaaagtgcttcacgaggattgccacgatagatataaagctctcagataggcaattatatctattaattaggatattttgtatggtttcgtcagagatatgtttgggcaaaagtctgccgcaaagacttatggtattttagagtttgttagagataagagtcgtgtcctgcaaggaaatattttgtaatctcgggtataaatagaacccgaacacatgtaatcaagtatcacacgatcaatacactttcggcgcatcaccaccctttttactttcgttttatttcgatgatttcttgctttcgagttgagctgcatcgattcgatcttcaactagaggtaaacttgtcatggcggcttgcgttctcaggattagtgcttccatctttatgacactctaatcttgttatgtaattcgtcgagttatcatatatttataatctttgttagtttcgctatataactcgccatcagctggtttttactgttagaaagtagccgatagagttagatctcgttattgatttagattatatcgtatatctaccatctttcagaggttttcatcatgttgtttagatcttacggttatctttatgcttaatgttgcatcggttgagttcgatctagtaagttctatttataattgtgatatctagcttgttttatgaatgtcaatagagatagcatcggagtttcagccgatcttacctgatttagctatttatatcctatgtctttacttatcatgctaaatctgccctttatattaagatcccgttgcattaaagttatattaggtttattatttgatatattttatttgtctcgatatcttgatatagagtggtatcggagtattaaccgatacacgctagatctatttgatcggctatgctataaacatccatataatctttgttttaatatatatttcgacttaagtggtttataatgtctcggcatggcgaccgatctatcccaatcacttagtttaaatatatatcgaagtaaaggactatatgatgttgatatctacagccgatcgaatagatttagttttatcttatttattaatcactgccgatcgattcaaacctgacatcggctcaaggataaatgatatgtcatcggcaactagtcgatcggctatcgtttttggatttaactgtgttttcttatcttttatcttgttgattgcaggatcaaatcaactggcacgctgacgaacctaaaggcgggattttggacctgcacagaagttaagcagatcttccaggtcagtgtgtgtttttcgcatcaacagttatcaaccgtactctaaacccggttgatctcgccgagaaggctaatccctacatgcgaatcaaaaaacacaagcaagaacaagatagattgcaacacaattgcatatgaatgattaagcactcgaatttggggttccacaaaccgatctagcggtgaaattgttcttgacagaataatctaagcaaaacccgactctaaacgatgacagctactgaataaatgcaattaaggacatcctagggttgccctagggcgcacaccgccttgggctaagcccacgacacaattacaaggcccaaaacccaaatcagattcggactggataagatacgtggcttgttttgcagattcctgacagctcggtaggaattttgacatgggaccaaaaccatctgaaagtagactctataagctttccaacaagtactcaagggccctgaaatttcttctatatcagcggctaggtccgtttgaagttgatgctgtcaagaggcccgaatccgaatacaaaacgtgtagaactttatctcttgtcttctatggaccaaaagtgacatggtgagatgaaataagacttagagaaggtcttggtttggtccccaatcaacttcttcaatcattcatgcattccttacgctcggtctcttttctttcgcccaagcaagtaactgtacaaacaaaaacacaggaaacttattgtgtagcaacgtttgttcaaatatataataagtaaatctaatgtagaacatatgtacctttgattgattaatacataaggtagtcatggttatatccgagctagttatatcctcatcaggactgatcatgggagtgtgctggtgagaggcggagcttggttagggttctagacggcaagagcgaggcttgaaagacaattccggtgagagcggagctcggggaggcttctcggacaagtaccaggtgagaggtagagctccaggaggcttcaaagggtgtcggatctcaacggaaatcagtgagttcgctctcaatgggatctcacaaaatcgccacggagctctgtgtctacagcctcatcctccactgcctccaccaagttacgccattgtcatgagccccgagatccgctgcctccactgtttcactccttgttgagcttgtggaggccacgagtgagctcaagacagcactggatgagctcaagttggtgaggctctcctcatcgagctttccgctgcaatgatgggctacttcgacatccaggagctcgtggagatatagggcgacggcggcagcgctctgaggaggcgaaggaggtctgtgggggcggcggcggcgtgatgcggttagtttctggcttaaatgtgtacatggtttgacataatagggtcaaacaagcaaacaagcaagatataacagggtcaaataagtaagggcaaaatggactatttaccccaaaattaacaccgttaactcacccaaacggaatagggtcagaccggagctttgtttttgaaaaggaaggtcaactaagcaaacttcaaaaagtatagtcaaattggtagttacagttcaaaatggggtcaaataagcaattgccccctataaaaaaacaactacgtaagtgtgacatgagacggtgcaagcctcagactaagaattctagattaattgatgaattagaccattgaatgaaccaacttatgttatatgcaatatatagagtggctacatgtattgataatttcggattatccggaaaacgacctatcggataatccgacagaaatattgaataatccgtatccgccggattttagagacaccatatctgtatccacatccgcatcatactattcgccagatttctaaaagctcattccatatccttgttttggacggattcggagcggatcagatcggatattatacgatccgttttcacccctattaagggtctcattaaatttatctcacatcttagagggaacgccgtcctatagatttcctgtaaaatttgtaatctgtacgtccacaagcacataacacattctcacatgtggacatcacctcgtccatcagttcagaaaaaaaaaacccttcgatcagccgcgcgaccccgtggacatacgacccacgcatacgtactgctactcattaatttttcttttagccttgatgctgaaaacgccaagcgatcgagacgtacaccagcacaagagcccacacaaactcccaagtcaagcgtgggggcacgctgccggcaaaccggtcgacgcccgcgcgctcccgccgcgagcaggcccagtgcgcgcgggcgatcgagctagcgccgcgctctcatctgcaaactctctagctcgttcccgcggatgtgtcccgtaatatttaggccattcacagtacatcatgagccatgattaaacttgtgatgccacataggatgaagctcctataaggtattgctcggtttagagggggttgaatgggatcggaggggtttgaggaggaacaattccacaccacaataggtgtcgaaaaaatcccctccaattcctctctcttgggaattaaacatggcctaaagcaacttgcttcacagtgcaactatttttaatgggtcccacccccactcgcttttcacctccctctctctcttccactctgtctccccaccggtggaggaacacacgaggcgtctgcccatcttccgccaccgccacgacccacctttgcgccgttggccacgtcaacgccggcgcccctctcactctcccccttccgtcggcgcccctctccctcccccctcccccttccaccggcgcccctcttcccccccttctgccggcacccctctctgcccctaagagttatcacaaccggcgtggagcgggacagcgcaaagctcaccagtgtggagtaggatggcgtggaactcgtcggcatggatctggtggtagatgacctcgagctcctctctgtaaaatcaatgtgtgtttgattcttattctatgatgaacaattggcatatgaaattattggttttgatatttggagattattggcgaagtagttttggagatgattggatttgtaggtgatggacaggtactgctgaatgtttggtccggtcaaaccggctgggtaaggccggtcagaccagtggtatgcggccagcccgcggtctgaccggccgactctgtcggtttcggttacgggttgtttcattggatatccatggataatttgtgtttatgacttctagatggatactatgcgtatgtaagactgctgtttgttaacaatgagtcaagttagagatagctttgtctcggagtatggtttcttgtttgattcacgtgtaggtatgttgacgaccaaattcaacaaggtaatcttgacgcctcgggagagtgttgccggtgatggatcggaagtcaacttggagataaggtgacgtccggacggttagatatcatgtgggacacttaggctaaagatgaatgcacgtggttggtgaagattccgtatggcatacgatggagatattatgtgcatatgagacgcggagtcaaatttggaaggagtccaaatttggtaattggagtttgtaaagttggtttcttgtacgggaaggtttcctagagggattataacttcttgtatgagttttgtttgtggctttaggctgtctacctcatgtataaatagagagagagggtgtggcctcccgatatcgttttagaaagcattgagttgagagaaaagttagagtttcgagtttagttgagattttcatgaggagtgctattgttgcactttgtaaacacagagagaagtaataaagttgtcatctattttgagagttctttgatttgtatttgctcgggttcgacagtccaactgacgagtcaccgacggtcagaccgacgggttcgcaccggtcagaccggcggcggtgataagaggaagaggcaatttcggcaaggttagaatgggcaatctatactggtcagaccggcggcataggcacagccagaccagcagatctatttcggttagaccgattgacatcgattcaagggtatattttaattccactaaaagttttggtttttaagtactacaaccattcaccaccctggttggcttagttcttgttgttcaatcctacactctccggcagcgtggatctggcgcgcagtcgctcaccccaccgctgtcgtggctctccctccccactgtcagcgccgctctctcccccaccaacggcgcctctctcatcctctctccccaacaaatctggcgatggcgggtgggagaatgatggaataggagccgtcggctggcgctggcaccgccggatgggacggtgggagctcggactcgacgcggatgcagtttctccagtgagcttcccctctccacactctctctccggctttctcaccatcgatgtggatgcgattccttttttatgagaaaagttgttttcttactgacgaggctctcgcagcccaagaaggatgcacgaacatttctcctccacacatgcattttatcaacatggacagggattgccacacactacatatacgcacagtgaatagccttagaattattgatccatcgatcatctctggcatggtgccagaccaccggccggcctgcgcgcatgtcgtagcagatcgagcagctcgcgcgcaccgcgccgtccgatccgctgcatgcgcgcgaccctcgtaagctgacaagaaaccgaaattaattcggaagcagcagcccatgtcactgcatcgcgatgcatgcatattgtactcctatgtgcgagcgagggtgtcccagctcgctggatcgatcagcaacaacaatgacagcaaggggaaagggtcaaggtttctcagcggctagcggtgacacggacgtacggcaacctgccgttgcgagcagcgtcgtcgctagcagctagctgcatgcacacacatacagtatggcccctgcaatgcattggtcagatcaggggtgtcacctctcggctgctgcaccggccctccggtggttaatgctccacagtgtgtcccctcgtcgacatctcgagcttgcatcggatcactccaaattctctagtaccagtactactactagcaatgcatgcaagtctctgctactagctggctgctactgtaccgactgctactctcgcctgacctacacacacaagctgctgaaaagtccagcccggcctgtgtgtgttcgattttaatctggatattgcatgcatggttgaaaactttcatgtacattcttcaaacaggaggctactcctgattgctcacagtcgccacagtagcctctcacagccgtaacagtggcctccattttttgtgttattctggaggagggatcgcaggtgacaggtcagtggatgggggaacagtgcttactactgttaccaatcctcaaatcaaggggaaatagggtaggcgagtagcagcatgccattgcaaagaaggtcgtcgaaattgacgcctgcgcgtgctgaccagtgccctagcctataatatatagcagcttgattgatctcttcagtttatgcagtttctatttccttttctactgttttcgaaggggattggaattggtttggtagtattttgcaacgtgtgtggttttcctgaactgatcatcggtcaatgacagaatgaagagcttcagctagctactactccctttatggggataattcaaaaaaaaaaggaatatatatcaaaagagaggggttgggggtcgggttgaatgcatgaacacttgacttatattcatgcaagtatgaccagaccaagtaaagctaagacaaataacatgtgtagaaagtaaggccacagctatgcggttacgatgtgccatgcaataggtttctgaacttgagaaataatttataaggtccccacacttctccatttcgtcaaagaatgatattttcgccattaattaatagaaaaaacacacaataaagaatgatatctttattttcgctgcctctgcagcttttgtaacttcttcttccatgtcttgcagaccttccttttgtacagttttctcccttttcttttggaaaattttattcagtttggggttatatgaacaatatgttataaagttcagtgggctatatgtcctgttccaaagtttaggattctagatagactttcaatcaaagtttacgggtaccttttcctatataatatactccctccgttttagattgtaagactttctagtattgctcatattcatttagaagttaatgaatctatacacatataaatgtctagattcattaacatttatatgaatataagcaatgctagaaagttttacattgtgaaatggaggaagtagtatagaaagtatcaagattcaaaacaacacgttcaacttagaaagtaatgcagttttgaaaagtaatggagttattcactgattgaatataatgagggcatagagaaggccctgaagttgaatataatggtgccatccatgtccttaatcaccataaaaatcacgctgttgcacaatttttttgatcttgtctatagtaattgtgttgactaacttggctacatataatagggaatactaatctatctctaatcatttgacaaagacctttagtatagttttctctaagctaatctatagtgtgtttaccagctgaacactagctagctactcgggcaggaaagaagtgcatgcttagcgcctgattgggaaaatcttatcatgcatgcatcttttgttcaaaacctataaacttacaggacaaaccaatgatagtatagctatagctatctctagctagctaactatttcattcatgatatctcttcagtaatacaatattgataccaaatatgattttaaagtaccctgtattaattgttatgaaggataaatggttttttttttgcacataaaagtaatatatttgctatgattgatgctaatgtactgccacaaacaagtgcgagcaaatggtaattaatagtaaaaactacatataggcccattcttttctccaacaaaagttgaatgaaaatttggatattcatggcacgcttttcaaagtgctaaatggtgcagtccgtgcgaaaactttctaaaatattagataaatatatttttcaagtttataataattaaaactcaattaatcatatgttaataccacctcattttgcgtaaaatatttaatcttcatcttcatctgcatgagtttcaaacaccaccatatattaccccgtgttgtgaaacatttagccaaataatgcaagcttacgtataatgatataaatgaatttattttattaggttaagttgtcatggttatattcattttaatatataatatccacatatgcaaattatctactacatatatatgaccgtttgaaaaattattcatatattgtttagaagacaatgcaaatatacgaattttaattgttgtacatgctcattgtaggcttagttatatctacgcctggaaaataaaatctgcaaactaataacgtgcatgactatggctttattaagttacatttatatatcaaggtattaaacttactgaagtaatgtgacattatatcttcaaacactgtatcctaaatcagatgtttctgtaaatttgggcaattttagttagaatctggccacatgaaaatttatctatatatgattcacattgatgtccaacgaccatgtgttaatatgttagtaactgaaaatgcaattactattgcagtttaatttttagttagttcatactacaaattaatcctatttaattaattaaactctgacgattgccattcatttttgtataagcataacgcttcctttgaaacaaaggaattgaactactaattaattcgtttcaaactagtataacgtttccaaaagaggactaaattgtgggaggaaacaatatactaactataactgctatacggacaactgacgctcgttctgttaacttttttatttttaaaaaaacttcaatactgttattgagcaatatattgggtagattataactttagaaaaataaatgatgaaataatatggacctacataatacattatgttgacacataaaaagaaaaggtgcacatgtgaatttgggatggcttcctatagacatcagtgctcatgaaataagctatgtaaaatgtacattcttcatgtttatatttgtttttttttccttttcgtttgcagaaagaaaaataaacctgtttatatgagaactcaagaaattatgcaaattaactaaaatattgattatgaccaacatgctcacagtataaaaagtatcagacagataatttgcatgattaacagacttactactaatgtggattttaaatttgcatttcatataataagatatacttcccaatgataccaagacaaaaaatgggtctgatcatgcatgtgaccatatgaatagaaagttagctagaaccagtcccacacccagctaatgcatgtcactctgaacataagatatatatgtattatatatggtctggaagcatggttaaacaaaattaacagtcttattaataattaatctcatggtgcagtgtgcatgtcttggaaggccttgggacaagtacttgaaagatctcactccaatgccttgatcgacatggtcagatccaaagtactcagccccagagcggccttcttgctactgctgctacctgtcatctcttcctctaacctcccggcggcttctgcgccgccgccgccgccattgtcgccaccaccccggagcgacagggaaagcgtgagtggcagctgctgcttgtcactgtccacctcctgctcactcaagaacttcctcttctcgccggctgatctgtgatctcccgcgttcgggctcaaactcagctgcaagtccggcgtcctgccgttgatctcctccgccgccaccgccgccgccgtcatcttcaccggcgtctcgaggcgcatcgcctcggtcgctttcgtctttgccctctgcagcgtacacaacgccattgttgtgagttggtgtgacgaactgaacgtgtcagtgtgacagtggtcatcacgtgcgtaagcgtacctcgagcagggaacctagggcagcttcgcttgcgaccaccggatccgacgacgccgtcgtgttcccgctgccggcggcgccgcctcgccaccgaagatggtggtggtcgcccatggtagccgccgccgccgctgacattgtcctcgtgagcggccgggaggagctgctcccgatccaatcaaagttgccggccttcccggcgccgtctagccggtggtcggcggcggcggccgtggtcgccgaggtcacccgggtggaggcgatggcgtccctcacgtcgaacagatgcgacgtcggctttccttccttccggaagatcatctcgtggatgagccctttcgccgggccgtggccgttgacggcgccggcggccctcgccgccgcgtgctgctggttgaacgcccactcctggttcctactacgcgtgcaaacgagacaccgattagggtttcgacatgatctcgcagcatcaccaccaccatcgctactactactagctgatcgatcgatcgggcttgtcctttatttcgctttggttaattacctgaagctattgcagttcttgaagtcgaatttttgcatgggagcttgctgccggcgttggaagagaccgtagagccggctggactccggcaagccgggattcctcgaagcgaagaacccgccgccgttctcgtgcagcatcctggaggagaacggcgagacgccagcggcggcggctcgctggaagaacatgtcgtggtggtggaaacgatggtcccctctcctcatgtggaactccatgggcgaaaacactgaaaaaaaaaattcaagcagctaacaaagcttaagaaaatggattccatggcttactctctgtatgcatgctagtcctgtggaggagagcaatgaattaaaaatttaagggagataattgagattgagacaagaacctgatgagatggctcctctctcgtggccagactcgtggtctagctttttgcttctgtacatctgaaaaaagtggacaagaatgaagaaggaaaaagtttaggcacaggaaatcttctgtgtgaagatgaaaagaaacaaaaccagcatgtacacagcttctgctaactgctaagtaagtagtcatgactcatgagaagtaggctggtttttttcatcctaatctgctttagttttacctgcaaatggcttttgacatgagcaatgctgagccccctcacattcatcatctgaagcacaagctttggtgttgctcctgccaacaattattttgacacacgaaattttagatgtcgacgaatcaaactaatattcaaattagaaattttaatttaggatgaaattaacacagcacaagaagaaaaggctagcctacgaggttgtactcactttcttggccgcccaacctctcgacggcgtggacgaacgccatgtggaggtcgggcgtccaccggagccgggggagcttagaccggttgtactgccgcaccgtcggcaccctgtcgccgccgccgtcggccttgctgctgctgctgttcatgtcatggtccttgtcgctcccggaattgtggttggtgctgctgttgttgctggagctcctccctcctccggcaacttcgcttgtgctaccgccatcgtcatcgtcgtcgtcgtcgtcgtcctcatcatcgtcttcttcatctccgtcttcgccaactcccccttcctcgctgccctcgccgaagccctcgttgaggtccagcaccatggctggtggcacagagttttcaggagatctgatcttgttgtcatgatcatgctcaaaaatctctaccacctcattctccttcacctcccccatagtaacaacccttctaattaagctagaaatcttctctcttctcttccccttctagctctctctatatttctctaccaccaccatgataggattggaatgatgtggggtagaggagttaggaaccagggaggaagaagaggaggagagtgtgatgggagaataagggaggggaagaagcataagcaagagctaatgatgtgggggataaaataaggggaggagcttaggagcagaaatggacaagtattccactacattgactagttttcaagactgatatatactcccatttctcccctttttctatagtgtcaaggaattggaaagctatgcaattgctgtgctgtgagagggtggtgtggggtacatatgctaaggagggtgtgtatataattggatgtagtggccctggaaggggctgattgtcaattagcaactggaggtgggaaaggaagcaaaatggggttgacacttgcttaggatgataacaactgtttgtgtccaggattttatcatattaatttgtgttcctaatccatgtacggtgtaagatttgaaaaccgtgcatacctaaagggggtgaaatgagggataattaatccttgaggtgtgtaatgaattgaatttccccatatatataactatactaatttgtgctgttaaaccaaaattttctgttcaaaaaggttcaaaccaaaatttatgcgtgcattactttttttccaaatattatagtactaccgcttccattcataaaacaaatatcatatcgatcggaccctacatttaccaaccttctcttcattaacttaaccaactagttcaaactttggttctgccatttgtcatgcatatgcaagatattaagggcatgttctatggtatagacgagtatgatatcctagataatacaaaattatttagagaccgtgtctctacaatagttgagacaacaaatgctctaattaatcattaacttaaaaatattattttattgtcattatttccttttttttttctcatgcaaccattttccagaggctttgttgttacaccatcattacccatagcaattatgttttatctcttcactttctctctcttccatgtcagccaatatacctaattagcaatattaagagacacatattaataaccatcgtacatgctagggtttatcatgttctctctctgtttttttttactgaaagttggttataattcttttaaatgtttctcattgcgaaaagtcggtttttaagaatattcattttctactaatgcatttatttattttttggctagttagatatttttggagcactaaatatgtgcatgaatagtatgtttctacaagtcaataactgcattggtggtagtatggactatatattatttctttttaggagatcaatagtagtatgaaattatataattaagaagagttggtggaactgatcgtaataatcaagtgtattctgcttgtgttgaagttatatagcttactggctctcgctgacttggactcggcagtagaaatggaataaacaaaaacaaaaaaagcacatttttcaaactagagttagctacctagattcagctgctattaattataaaacaattaattaaagtaaaatattttttataaaagtacgcagagtaagatatataccgtgagcatgcaaaccttataaagaacatacatgtacttttataaaaaaatattttactttaattaattgttttttaattaaatagcagctgaatctagtagctaactcctagtttgaaaaatgtacttttttttacctgttgacgcaaaatatatcgcaacacacaatggtctaagagattgcgggtcctaaaatcttgatgagattcgaacatgccagttagtttgatcatgcgactaacaagatgaaaacaggtcgatgatcaagaatccgaccatcaacttagagagccgaacatcaacttagtgaggttagccaatgttgatagggttttgattaatcagctatagatctaaggtggattcaaacaattagataaacaattatataaagatatgatagaaagaatatgaccaatgaaccaatcgaccgatattaatatagtgatagatgtagatccgatggttgaagcatacatcggcaaaaaaatctgacgcttgcagattttgaatgtatatcagctaactaaacaatacatatgatagctgaagctcacaattatgataactagttagctagaactccgatgaacgttgtataaaaatctattggcttactagaattaaacttattagcaataatctaatagatcggatctaaccgacacagtacaagattgaagataataagaaaaatctatttagccaatagatatggatatattgatcaatctaaaacagcagtgtgatgagaaaaatatcaacttagtcagaatgtcatacctaatcaaggaagtcctaactaagccgatgcaaatctaaacaatgttgcagttaaagataaaatcaatatatctgataggcaattcttgcatcaacttagttagaatatcggacctaaccgatgaaattctaaccaagctgatgcaaacgaaattgacggaacttacttcctcgctggagatcgaatttaaccgatgcagcccaacttgatagcaagatagtatatctgataggcaatgtttgcattaacatagttagaataccggatctagctgagtaagttctagccaagctaatacaagtgaagttgatggaacttacttcctcgctcgagatcgaatttaaccgttgcagcccaactcgatagcaagacgtcgaacttaatttctcacctaagattgaacttaatcgatgcagccctaatcgaaaattaagaacccgtcgaaaggttggtgatgcgccgaaatataattgtattgacctatggatgatattatagagaccttatgtgtacatatacctagggttggtacaagtccatattggacacgagataagatttcctaataaaaaaaactaaccctacttatttaagagatatactgaggaaatacgaaactacattaccatgaccttcacaactccttattaaattcagtttttatctagacaaacttttatttaccaatcagtttcttttcttaactgaatttactaagaaaccgtaccaaatttttgcgctaacaataccataacctcaacatataaatattattttttccctttctcaaaatataacaacttttagctataaatatgaataaaagcatgtttggatatatagttataaattaatatattttgagacggagacagtgtaacggatgaaaggaaaaaaaaggcttgagctttacaaattgatgtcacgggcaatcacaagtcatgcagccacattcacacgcattcctgtacgacaagaaatataaattaattatggctgattcagcaaaagaaaaaaaaatgcatcaatcaagtagaatgaaatgggagttgactagggtctgcaaaaattacagggtcaaagacgcactttaatacaatttgtttgcttttggatttcctgatggatcgatttgctgattgacgtcgaaagatacacattttctacgtacactttgtctcttggtcatctatatgacacgccaggcttgtgtatgaacggattgtgctgacgcgtctgattccattgcttaatttttaacacagctctataactgttactttcactagctggaatgttttataccctattattatttgattaactgcgcgatcaaactaattccagtggtgcattcattaataaccactcaactcgcgatttacctttttttgtttgaattaaaaactaagacatttaccttaatatttactctggctaataaatgcctgtagtttctttttcaattacacggaaaacatacacaccactagaaaatacaacaccacgtttatatatacacccgcaaatgccccctgcccccctaacacacggcaaaagagatggaaaccagcgacgtatgacttttcttactaaattccgattaaaatttgcatgcacacaatatttatgggcaccaggatttaaacacgagtgaaaagagttatatatgcatccactattctaccacgacaccaccggttgctaccccgcggtcaacttaattaattaattaattttaaccacacacgaaatctagtaatactcatgtagtccatcaattcttgggccatttggaacacacgaatttcaggcaaaatcgattccaagctgtcaaatgttctttttcttagtgcagaagcaactactgtattggaaccaacataaattagctaaagatataaagaaaacgagatagttatttatttctcaaattggattgatttatggtgccaaacttttataaaatagtaagataagttcaacaacatgcattttacactataaattatctatatttacggataaatacccactagtgcaaaatcgatcatttgtatcgagttccgacacccatctatatcggcagaggccagagggcttggtcatcgataaggcgtgttcgattggcttgtgtggatagaaatttttagcgcacgcaaaatgagaaagcacaatggcatagcacataattaattaaatattaataattataaaattgaaaaatagatttatttgaatttttaaacaacttctacatagaattttttttttgcaaaaaacacattatttaacagtttgaaaagcatgctcatggaaaccaggaaattgaagtttgaagttggaaaaaagaaatgggcctaagtaatcagtgatgtgaaaactcatatgtttcaggcgagcgaccatcaccgttgtcatacatcttaaacgagtttcaatatcaacccgtcatcgatatggttcacccgcgcgagcgagtagattacaacttgtcacggatgactcaattgtgatgggttacaactctaacccgttaaaggtgactggtgaccattgacaaggtactttagagcccgtctcggacgagtcatcggtgatggggttcagttgtaacctgacaatgatgttgctcactcatgacggggttattggctagcttcaggaaattactagccatgcccattacaaaatgatagaaacacagatatattcccagaatccccaaaatatcccgtacatttcatgtacacacattcatttacatactacgtactcacaatcacatgattttcaagtctccgttatttgtaagtctcaagaattggattcctcacataattatattaattctcacattcagtaaaactttaagttgcaagcctcaagaacttacaaaaccgcccatacatcttccaaagagaaaccttcacaatctgcgaattcagttacaatttgaaagaagtaatagaatttgtaaaccaaatgttaccaacatacacagcatgtacacaagaattagaaattgttttacgtacagtatataaacaaatatcacttagtcaactatttttacaccatcatttaaaattgtgcctctatctcgaacgttgttgagtttatcaagcacaaaggcaactatttcttctccaatgttgttgaagttgtgatgaggaatgttataaatggttgcctctaaggaggttttcttacctctctaagtggtggagaggtataggaggtatatatctcctagggatgcaagtgggtagtcccgctatctgcataataacccacttgctagtttattttttacatggtagtacaaaatttagaagaaaaaatgaactagaagtgagataagcgggacaaaaaaaatccgcttgcccgtcccgcttgcatccctattatctccaaggatataagaaaacctcctaagagagacgtggagttagaatcgtatgtaccacatcttatactgtaaattttctaatgcttaggccgtgtttagttcacccccaacttccaactttccatcacatcacatcacatccaaaacttttctacacacataaactttcaactttttttccaaacttctaactttcaccaaacttccaacttttttcaggaactaaacacagccttactcattgactaaacaaatatttatatatactagtacaaattaaatcacaagtaaaatgcgacaaaaacaaaagtttaaaaaattatcagagaatatgaacacagacttacacataagggagagttagcagttaaataataaaaaatgagtgaaatgaagctaatatatggcaccacctttttttagcaaaaccatttttaaggaacattaatagaaaacatagctagatcagtcccatatatataatgattctctcttttccgagttccaaccactagctagctaggatttgaaaaaatcatggtactagctaattaaggaagttgcttatgtactatatacaatattattggtagattcagatgtcaaattacatgattgatgaacaacttgggatgtagttagggtttggtttcgagtccatttttgcaagaacccacatatggattctatatataggttgtttggttaaccacttcggaatttcgtaataccactgagaatcatgaaataatcatcagcatggtaggaattaagatgtgcaaagcgctatttgttaattaatattgcgcatggtcatcactaaacgatactatggtaaagtagtattattcctcttacctgaaaccgtgccaaatatatattgaaatttgtagatataaacatcccatctgccaggtttagttgagctatttttgggaatttgatggtacgtacaataattaagctagtactgaggagaacacatcagatcactcctcttgagccagtcatgtgaagcgtgtgcaatataatagactaaaaaaaattgttttttgagggaaagagtataggagagcctcctacacatttcactactcaaaattagtagagaaaattcccaatctagcataaaaaaaattgctcttccctatatagcacccaaacttcaaaagttctctatcaatgcaccctcaaaatttttgttccctatctagcacttccgttagttttgaggatgacggtgttaattagcatgagaaaagatggttttgcccttatgtattttatactttttttccctttctctattcacagttttttttgttctttattttttcatttagtgtccagccgtgttcaagtctgtgcatacttcttttttggccaatataatatgagaacattagattaacaacgtacgtacttcttttttttagaaatttgacagaacaaatttaagagaacttacatgcaacaatagcatgtatgcaacacaataatgaaccaaataaattttagagagcatccaaattcacatccataggcctgtaacatcaagaacgacatgcatgcataagagctacatctaatcctactgccattgagtgctacaaaattttcaagaaactcagttgttgagttcgtcgccatgccagcctgtttgcccgcaccatccagggggttgctgcccgtgcccacctgggagctgcctgcctgtgccgccgtagccgtgagccgcctgtcctgcgccctcctgggattagccggccgagcaggcctggggctggccgcccaggttggcagggcgctagcctcccgtgccgccggccctgccctcttgtgccaccggcgctgccctcccgtgccgcgacggcctggtctcccgcgccaccggcgctggccgttcgggggagcccgccggcgccaatccttacaggggcgcgcctgattcgccgtcctcgccgcccggggggtcaccatccacgctgtcggccatgggggcggcgatctagggttgcggcgacatggagttggggagaggcgcggtcgcgctcggtcctgggactgatccagaaaaaacgacgacagaaatttctgagggtgggtccatgcttgttttgatagtggagactaacgggagtaactgaagtgctagatagggaaaaaaattttgagggtgcatagatagggaatttttgaagtttggatgctatagagagaaaagtaattttttctgatgctacatacggaattttctcaaattagtaagcaaaacttactgattcatgagataccatgtttgcggtcatattaatttactcagacacactaattaagaatatccaatgaaaaatattaaacttcatcaagaaattgaacttcattttttttcttttctacaaattaataatcttgaataatgttgctgcgggcatgcatatgtgtacagaacacatatttcgggtgaaatagcataattaatttttcacgggattaattcctgcaaatttcacttctcgagaaagatgtagtttaaataatgcatatttttcaatagttgtaaatttgttcatctatgtacaagagactatctttttccccaaaaattaaattgcaacacattatacgactgcagttaatctacataaaaaaacactactccctccatccctaaaaaaccaacctactccctccgtcctataatataagggattttgaatttttacttgtactgtttgaccactcatcttattcaaaaaaaaaattagaattattgtaaattttttgtgacttactttattatccaaagtactttaagcacaacttttcgttttttatatttgcacaaattttttgaataagacgagtggtcaaacaatgcaaacaaaaactcaaaatcccttatattatgggatggagggagtagctagtactggatgtgacacatcataatatactacgaatctggacatacctctacccagatacgttgtattagaatgtgtcacacgctgttggggaatgcctcattagtcccggtttacaaattgcaacccctttagtcccgggttgcaagccgggaccccaaatccgggactaaagatcataaagtctcgttgtattttttaaccgggactaaaaattgatctttagtcctagttaaaccggggctaatgtggtttttgcatcacccagcaaagatcacttctccggtagtgacatcttctgtgagacggagggagtatacgatatagctagtaagctagatatccattcttcatatagcactgtgttagaaactagtcaccaatctagtgtggggacaatacatatcaccgaagaattaattgttcgttctgctgctgtccatatacagtccattactattgaaatgcagaaactaacgctatatgtgtatatccatcaatccaatcgttaaatgaaaactgtcgatttcatctacgaaatgattaggcgtgtttggacgccacaatatataacagggaaaaagaaaaggaaattatatagaagactaattaataatgcacgcagttgcaaaaacatgcattcagaggagaccaattaatctttgaacaaaagaaagaactccgactaattcttgcatgatttgtaagggtattcacaaaatcacaatgcaatgactagataatatctatataattaaatgagttatcatataggataaaatgtaatgtggcatatgggtaaaatgaagaaagaggaagaaacaatgttttacattagatatacatggtttctacataatatctaagatttggtgggataagaataacattaaattcgaatatgaattagtagtgttaaaaatagtttaggatgaggatatgaaaactattggcttgcatcgtgattgccctgttccagtacaggcaagctcgatcaatcgatccagccagcaatttaattcagtgccagttaataacacctgatggctttgtacgattgagagggtaaatgattaactgagatggataaaaattaaatattaattccatgccgcagtagctggtaggccatatgcatacatgcatgctgcattgccagcttcgaagctgctactcttgaactgctcaacttcgtcgaagctggagacacgattggtctctttcagaaagcgacgctggctgtgctcacgggccaggattgggttccggtccttcaggccgaccggaccacgtagtagctcatatattcagtcaggcctctacacaaaggcatatatatagtagagttcattaacctgactagctcgacccatgtaatctgcacttgattcgtttgaaaaataatatatatgcacctccattaattagtccaaatacaaaaaaataatctagattagtattagcatgcatggacacatgtatttctggtgtgtatatatatatacaaattaaactgtgtgcatgtcagcactgtgcagttctgaccagctttgccaatgcaattatctttttctttaggaatctacattaacagcttcttcttaacgagcttttagctaggaatagaatctctacttgcagccctgcctgagtgacttaagatgcatgagaatacgtagcatgttttttttaagcaaatatagcatggttaatgtttaaggatgattgtgcattgcctttgacctagctagctgaaaatcaaaagatgctcgaaatatagctcatctttagatagctgtccaaaggtatgcatgtctagaagttgcttgtactttttctcctgaaaccacaatcctacctagcaactttaattgtatatttatatacctaactaactatatgacccattcttttttttatatatgaggtcttgctagaaaaaaaagtttccacggatccatttatactccctccgtcccaaaatataagagatttgggtcggatgtgatatatcatactattatgaatataaacagactcctagtctaaattcacatatagtactaggatgtatcccatccaacctaaatcccttatattttgagacagagggagtatcatccttttcatatgaatgtagataaatctaggatttttttttcttgtgtgcaggggcagggaaaaatctacttaattaccagccattaggaactaacagaagatcactagctatagtactggcattaattaatctggtgggtagctagctagcaagatgcacgtcgtcatgaggtgaatgtgcaatatagtactttacacagcactaagatcttttttctaggctgtgtgtatgcacgagatgggagctcacactatagtagctagctcagctgagctgatcgatcagctcatgtgacccaaacggccaatctggctcgaatccaaaagcaatttgtttttctaagctagccacgcttcgattgggtcgctgacccccttgtcgtgtggatctgagtgtcttctccgtgacacaatgaaaaaactaacctttgttagttgacctctgcctgcaagcctgcacacaaatacatgagaaagccttctttctttttatcagcaacttgttcagaaagagctagatatatagagaggagaaagcaatttaaatttgcaattgggttggtcacttcatgacatgcatggctatatatttatttgtcagaatcatgtctacatctatcgaagatattctctttgcttgtagagaatgagcccccttggacattccaaggagattaattcaacaagagctaattaataagcttaaaatgtaattgttcttctaacgtttccaagcctccaagctctttttttttccttctatacgatcagcatatatatgatggctttaggagattactgactagaacctacgtgatttgttttagccttcaatttaggtgctcttttccatcaccccattctgtttttctttcttcttaactctaaaactcattgatctattgtgtgtttgctaatcatttctattatctaacaaaaatatatataatatctagcattgacaacttaatggctaactgttttagtacttgtggccactaatggtaatattatagtatcagtattatctccagtagagccgccgtagaagtaattcgaaccattgatttataagttcaactaccattttttttttgaaaatgttgtaggaaagattattcatacagtacatatattaacatcactgtaaaaaacaatcatttacaatactaccaatattaaggcattagtataaatatgtatgattctggattagaaaatatggacgatttagattgttttctactactaattaatatagatcattgtaaattaaatatctctaactttaatttttacaccagaatattgttaatattttcaattttgaccccattcattttaatacttataagttatatttatattagatgaataatcgatgttgtactatatgtgtcttgttttccataatatctggattaattttgaagtggccttgttttcatgttccaagatactactaaattcatacatatattttttacaatactagtagcagtggcatgtctaaaatctttttggaactcagacataaacccagccacgccggtatcatgaaacaactagtagtgcggcttaaccgtctcttaccaccatggcttacctgtctcttaccttagcgagcctgagcagatggtgactgcccacggtagtccaaccctatgtccaatatatcctgccctatgtccaaccctgattgttattgtatcaaatatattgatggtgcacagcatgatgagcttgaagcagacacaaccagctcatagaaagacatatttgcttagtttccttcatatagaccatgtaaaatcaaggtgttgattaagtcttggtgatgaaaattgtcaaaggtaatgaagaagttattatgttgatattcatgaagtggtgatgaatttggagaagtgtcggaacatgcaaagttagaccggcagggtaaggtaggtcagatcagtagtatttgcacagtcaaactttttgggtaactgaggtctgaccgagctatatgagcggtcagaccgacagactctagggggagtcggttcttttgttgttttgatggaatatgcggggtataaatgctatcgaacaatatgcgtggttgtgaagattccgtatggcatacaaaagggattgtatacgtataggaagcgaagtcaaatttggatggagtctaagtttgggagtttggaatttaaatttctaaaaaataagtttgatatgtgtaagggtgagtttttctaagggattaggagtatttgtccttgttggattcatgacgtctcttgtgcagccacctcaaggtataaatagacgagatgttgaggctctcggcatcaattttggagagaatagttttagagaaaattagggatccaacctaggtttcgatttaagtttagaagttaagagaggagtgttatagttgtactttgtagacacaattagatgcaacaaagtcgatatactttcaagagctccttcgagttgtgtttttctaggtctcggcagacagatagaggttatcaggcagtcggactgatgtgcggtgcaacaggcggcgtgtagtagattggatcggcagcagaaagtcggttggactggcagtaggaagccagttggactgatgacatctgtacggtcagaccagcgcatacatgataatcagatcagaactcaggtttgataattaatgagttattacatgtcaaatactcattaattatcacttgtacatgtcaaatactcagagttaaattaagtcaatacttcctataaaaaaaaaggaagaaaagaaaataggtttctcagctctcatgatctgtgctgcttcctaaaaggggagaaactactcacacgaacgctggtccatgcatgcatcgttgcatcacggcttacatgccgatctccaactaacacacaccatggtggattattgctggaaagccaaaactaaaggaattaatggcccggccacccgtgtgcgtgcatgagcgtgacaatgacgagtttagtcgtccattaatacggcagcacactgtcttgtgaatttaaccacataaagttgcaattcctaggctagctagacagtggcgtggtatagtttctttctggttgatcttttctttccttttcatggcatggagaaactgttgggtcattcggttgggaggttattatatatgagaaaagaaagctgagtatgtctcaagtaccttttctagttacctcaaaaatattcatatagtttagaaatactaacaatattcataaagtattgttatattgccagggataatttttatgtactaacaattctttcatgtaatatatgccctataaacaaagtaatgtaggcctagtcaacaaataatcaatgaaaatgatgcatatttactactctctccgtctcataatataagggattttgagtttttgtttgtactgtttgaccactcgtcttattcaaaaaaatttagaattattattcattttttgtgacttactttattatccaaagtattttaagcacaacttttcgttttttatatttgcacaaattttttaaataagagagtggtcaaatagtgcaagtaaaaattcaaaatcccttatattagagacggagggagtagaatactatagatggaatatagccatctagtaaattgatcctagatcaatttactctacatatctacgtattctaaactagctgggctagctaagcactatatatataaaaaatcaaacttaaaatatgtgtccaatttcttccataattgattggaagtaggagagaaacattacaccaggccgatcgatgctgctcatctagtaaattaattatctagacctatttcgataattaaatttcaacatgcgctgctcatgttggtccagtttcatttttacatggaaatttaattagaacaaggtgagtagcatgcatgttgaatttcctttgtttcgtttctggtctaaattaatactccctccgtcattctagccactggtggagaaaccctttgtagtcccggttcgtaacccccctttagtcccggtttccaaaccgggagtaccaatccgggactaaagatcgctatctttagtcccgggtgaaataaccgggactaaagatagagctgatcttttttttttgcatgcccctgttgctgcatggtttatatatatatatatatatatatatatatatatatatatatatataaaccatgcatatatatctttcaatacatatatatgcatacatatatatatgtatttatacatatatatgttatgcaaatgcatatgtatatagatatatatatgaacaaaatatatttacattatagaaaatgtgtacacatgcatatataaacatatgtagtcatgtattaattacaatccattatatgtcctagctagctacgatttcgacgtagtagtactcgctgctaactcagaagctaaggaccggtgaattgtgtttccgtcgtagtagaattcacccttgggatcaaggatttcttcgttgatgaatcccatgagttgttcttgaaccgccgcgataaattccttgtgtgtggtcaggttatccctcatgcgaataaactatatgaatgtatgaaattgattagtaattaaagaagaaatcgctacgtaatgaaattttgaatttatttgtacgtacatcgagctctcttgtggtgatgatttggtctgcaaggcagtggcaatactcgcacacgtaatagccgcacaagttagttccctgcttttgctttgcgcactacaaataaatgacaaacaacgagagatctaattaatatacacttgtatgtatttgaatcggagaaatataaatgtagagcatgtgtactcacaggaaatttgaacttccgcctaagtctttctctccatttgccgcggaccaaatgacggaaccgataccaagccctacatggagtttaaagctatgattcgtagtagcaattaacataacaagattttcttaattaacaaaggaacttatgacggtacctgtctataagttcgaaaaccttgtcaaacgtagactcttttttatccattgagtcatatacgttgacggtgcaggcctccaggtcgatgagtaaaagcacccagtggaatctgcaatgtgcgtgggatgcattacatatgaaacacttagcaagttcgtacgggaatgaaatttggtatgtaggaagacagtaaaattaaactaactctgtgttgtatggcaacagtatgaacgtcttgtaatgctgcgccttcaggagatggacgagattgtcctctgtttcttgtggatattggtcgagcattgcgacgtttactttccgagggtcgatgaatccagtatcgcaaaattcgatgacctcctctgttccataacccttggcgatgcttgcctctggacgagcacggttacgaacatacttctttagaacgcccatgtacctctcgaaaggaaacatgttgtgtaggtacataggcccgagaatacggatctctttcacaaggtgacaaagcagatgcgtcattatattgaaaaatgaaggtggaaatatcaactcaaaactgacgagacattgcaccacttcattctgaagggcttctaatctatccggatcgatgaccttctgcgaaattgcgttcatgaatgcacatagctttgttattgttgcccggacattgtctggaaggataccccttattacaactggtagcagttgtgtcatcaacacgtgacagtcatgagactttaggtttgtgaacttcttctccttcgtgcttattattcgcttgatattcgtggagtatccagacggtacctttatgctctccaagcattcaaacatactttccttctctgccttgctaagagtgtagctggctggactcaagtaatggcttcctttctcctttggttccgggtgaaggtcgccgcgttgttccatatgcttcagatcattacgtgcttccagtgtatctttcgactttccgtatacacctaggaagccaagaaggtttacgcaaaggttcttagtgaggtgcatcacgtcgattgcgtggcgtacgtccaagaattcccaatatggtaactcccaaaatatagagttctttttccacatcgccgcgtgaccatcttcgctctctatatgctggcttccaggcccctttccgaacactactttaagatctttaaccatagcaaacactgttttcccgctgcgatgtttaggcttcgtacggtggtcggccttatgttcgaagtgcttgcctttcttccgtaccgggtggtttgctgcaaggaatcgacgatgacccatgtatacaaccttcctacagtgcttaagatacgtactttctgtttcatccatacagtgagtgcaatccttgtaccccttgttggactgtccggataggttgctaagtgcaggccaatcgttgatggttacgaacagcagcgctcgtaggttaaactcctcctgtttgtcctcgtcccacacggggacaccttccttcttccacaactgtttaagatcttcgaccagtggtcttaggtacacgtcgatgtcgttaccaggttgcttggggccttgaataataatcggcatcattatgtacttcctcttcatgcatagccagggggggaggttgtagatacacatcgtaacgggccaagtgctatggccgctgctcatctctccaaaaggattcatgccatccgtactcaaaccaaaccgtatgtttcgtgcgtcctttccaaattctttaaattttctgtcgatgtttcgccactgcgaaccatcggcggggtgtctcagcatcccgtcctgttgacgctcttcagcgtgccatcgcaacattctagcattccccttgttcctgaacaaacgccttagccgtggtattatagggaaataccacatcaccttagcaggaattctcttctttgttagctgcccgtcaacttctcctggatcgtcccgtctaatcttgtatcgtagtgctttgcaaacaaggcatgcttctaggttctcatactcctcaccgcgatataggatacaatcgttcggacatgcgtgaatcttatgaacttccagtcctaacgggcagactatcttcttagcctcgtacgttgtctcgggcaatttgtttccccccggaagaatgttcttgacgagtttcaataaatcgccaaatgccttgtcactaaccccattttttgccttccattgcaacaactccagagtggtatccaactttttgtgcccctgctcgcaacctgggtacaacgaagttctgtggtcctccaacatcttgtccaatttatgggcctccttttcactttcgcagtcttccctggcgtcctgcaacatctgaccaagatcatccgcaacgtcgttaccatcagcagctatttcctcctcgcccgtttgatttccttcaaatccaacatactgagcaaagtccggaatattgtcgtcttccacttcatcttcttccatttcaacaccttgctctccgtgggatgtccaacaattatagcttggcatgaaccccgactcaaacaagtggaaatgaatagtcctggatgcagaatactccttctgattcttacacttattgcat

SEQ ID NO: 16247 - DNA, 15408 bp, Oryza sativa
  unsure (1)..(15408): unsure at all n locations
ggatatcaatttcttccaagtgaattctcgatccatcatcagcaatactctcccaaggcctcaagcaacacctagacatgaacaaaccaaaaaattatatccgagcacaagttctttctcaacttagctcaacattagcacacaacatacgtattgaaatcatctcaaagtcataaacatgaagtgatcacaaaaatcaaaatatcaacgtgaaatcaactccaactcacagtctgccggccagccccgcagtatggatcgtaaccctaacccttttagggtttcatctttatatatactccctgtaagccgccgttcaacgttttgtaacttcacccgatatagtgaatttgtaggctggcacccgtagctttttctctcctgcacgccttaggagggttttccacgttaaatctcatgtcttctgtgattgatctgttgttcttcatcatttatctattgatcgtttcctaacaatcttgtgccgtagaaaaatcattttttttaaaaaaatatcattacacaatgagggacttaattaaggcttgaacactaggttatttgcacacacacaccgactggttttacactggtagtgactagtgcgccctgcttcaattccaagcaccgcatgttttggcagcattaccatgccgacaaggttggaattttgctgggtgtcaaaagagagaaaaaaaaaacgttcatctctcagctgcaagtccccaaacctgtccaaacgatggtcacattagcccgtcacctaatcctgacatcctgtgaatgattcttcccacatcacacggttgaccttctctgccccctaggctatccatctcatcctcaatactttaattcatttgcccataattaactaattttaggatccagctgattagttcgtcacactaatcacactactaaaccgctagctatagctagctaaagctcagcttgatgccctagatgcactagtagtacgccattatgttaaacaaatgcatcggtgtgagcccctcgaaactgcaaataattgtagggttttgtcatcttgtcccaatgccacgaccatgacatactgtccaaaattccattttgacatgcatgcatgtatgtgtgcattgagcaaatgtagctcagagagagatcatagcaaagctggagggttcttcctgaaagtaatggcttggactgtgggaaagagatgggggagatatcgacacttgatccctttgtgtggctagagacaaatgcttgccctctgtccatgtgccaaatcaatagtattttatttgaagagcttaaattaattttctggtccttgtatagtgcagcaatgtatatgtataggagtataattatatgctgtggatgaatgaataatatgctgatccatatgtcatatattttcaccttttgaagacttgagcactatagaggagatctaaacatggagagaattagaagatagcattagtctataagttcatttaattgcgctttttagtttttgagaggattcataattcaacatagcagctgcaccgggactacttcctttattctagctttgatatggttgcaaataaacggcactctaaattccatggtgattagtgacccactaataaattagcaggtttagttttacatttttcagattgatcctatgatcaattatattatttctttataatttaatttattaatttgaaagttacaaatgcatctctttcaaattaataaattaaattgtaaaacagagggtatatggaatttgtattgatcatgcatatcagggggcatcgtctggaattctggatgctctgtacgtaagttaaattatcttagattccttgatccataaattacacttgattattcacgaggatgcatggacaatacaaacgatcaacttggaatgagttggggctcagtaggattctttgggaattattacaacctcgcaactctatatattaaacagtaccttttggctgggtaaactactcatctgctctcaactaacacctgccacactgtctctgcttgttgatccattagagaagactgcaacatgctaattttattactgtggaatgattttgagatggatggccacttaacaacacacagacacatgcatgtagtactacactactactgcaaacatgcacgactttaagcatactagctgaaagcatatatttctgtgaggtcattattagtttgattagttttgggtgttggtgtgcgttatcttctttacaaatcccttgacatttttatccagtacacaaattttctagctagctagtttacttgtgtggttgcttcagaaggcatacttgtactatttacaagtatactaatattattgaatgttaattgatgtattgagctgctttaaaaatgtaaaatatagattctatgttaattaattagctgaggcttgttttttaaatatcatattataaaaaaataataactcatgtagttcccaaaacaaataagtctacatacagcttacatatgaagtgagatttcagttgactgccaatgacaaagctaatgcatgaatatgctaggataaatttagaccatctctagaatatgctgaatgaaaacaaaatcttgtcctgatgttctctcatatacatgtcattgatctaactatatcaagtagcccgagtggtgaattatttgatttagctagctatgtaaaaactaaaattaaaataaaatttcctgactatatcttgcaccatccagctgagattgaataaatgtagccatattacattcttggtaataatagcacattgtatgattgtaatattcttgttgaaatcaattatctgttctgattgaaataaacaaataggtggtaggatagaggagtgcacagacatcccctcatggtagcatatagaggaacaattggatgctgaataattaattagttaaccaataagggggttagcccacattggaataaataaataaataagatggactcagagatctagctcagagacccttgtccctaccttaattaattaaaactctgttcagtgtgcttgcatcctcgatcagttgctcagctctagtagtttccttgtggacttcggtgtgccttcatgtgtcgtactttctctagtttcttattttcttctctgtttttaatctgtgcataaccactgttttagctgaagacccgccgcaaacacaggcgatatattccattagatgcagatcttctgcaccggagattggtgtgcatattcataatgcattgattggtggccttgtacgcaccacagaattcagaaattaatttgtttgccttgtgtattccaactttcatgtgggagaacaaatggtactagttaacatatcttttcagtgtgattttgttgtttgttaaccatgtgtagttcattagaaatttgtcttcagctagaaacatatctttgacatgaatcatcagattgtattgccttttaatttagtatgattcttaaccatccatggtagataaataggcactatgtcaagaatataacatatatatatatatatatatatatatatatatatatatatatatatatatttcaactgaaaataatagttccctaaaaaaactctgccaataaaggtcatcctactcaagttatcaagtaggagccatataaccagaaatattggaggaattttctttttatttttttatcttttttgcaaatcctctgtgaaactcatcttctatttctgaagatacctcactaatagttcatttgtgtatacttggccacagcgatggcaaccgcagaagaaggataatcaccttgctaaacatacatggatgaactgtgtgagggagctgctttcactgacaatttttgtcgtacaactcccatccccatgtaatccaatttcagaatcagataaaacaacggggatgcttgtactcatgtgcaaattttggttgcatccctagcttgtttacttgtgtgcgtgtttctaactttgtatactaattaacaccattcatctaaaaaagtagaattccctgttgaaatgagtgttccggtggtatctttctccgtttgaacatatctgaaaagaagaaaccggtccaaaactgcatctgcttttcgacaaaagtgcagatttctctttggttagtgatgacaagattagccaactcgctagaggtgcctaattttatattgttttttaggagattctccatgtagtcattgcctcatgggtgtttcttggagatcatcggccttcctatgctaggccggcataacagggcgtccacattttcacttaacataccaagaaaaagtccactatacatcccttcatctaagggtctagtttcaatcgcgttcctcaactataaaactggacataacatattccccatgttataatataacagtgcaaatacagccccaaggtagtattgagggtggttttcgttaacatagcatccacgtggccgcctagtcgctaaataaattaaaaatagatatggccccacatgtcaatgcccacttcttcctcttctcttctttcccttgcacagtacgggtgttgacgacgagctcacccgtcgtccatgcgagggagatggaggtggtcgagggagagggagacaaccagccagcccctcgaagctcgagctcaaggacaaggacacgggccttctcctctgttgaccaggtgatggcctcgaggaaccgtgtgcacacctcgacacacgcgtcgaagaggagctgaagcgtgacggcactaacgggcgagtggatggtaccaacgagatcggatgtcccaaggaggcggaagacctagacgtgggtgggaaagggtgcaaggagaagtacagagtgccctctaaccaaggagtcgtccttgcatgtcgttgacaaggatgtcggtggtggcggcggctaccggccaaggacactaggtaacgagattgggagtagagaatgggtgcgaaaaagagagggggggaatgggattcggctcctctaacttcagcgtgtgaagtcaaaggtgcacagtaaaatgagtcttgcgctacagtgcctctacagttgatcactgcagtaacagtgaaaaatagtggaaaacactgttatgctttactgttcgcaaattactgtagcgattgatttcgaccgtcggatttacatcggacggctgagatggggtgnagtnacaggtnntgtgcttntnngnccccaccccctaaagtcagaggatctcatttcgggggatgggactaacaagtgcgccttcagtaaaggtggggccggccacatgctaactcaagtatggtcaacaaccacgaaagccgataccactgaggaacttaatttacactgcttctaaaagttaaggggttctatatcccttttttcgaggaatatgattgtaactcgactcttatttttgtgggatctaaaagcgaactttttcctattaccagtgtgctggacaaggctaggttggacttggctttaagttagcggcccagctatttatcagaggagtgcaacattccacaacggccggggtacaccattaacaattcagatgattgaactcaactgaactgtgattttcattattttcaatggagattctttactcaactgaactaagtccttgccagcttggtgacagtttcaaactttcaaattagcaccgttaatggatccacagttatattgtgttctatacttttgctcccccaacttttgttctttcatttctacacacagtcgcgcatgcttctcaaattgttaaacgtcatgtttttttaaaattctataacaaagctttctttagaaaccatataaatcgattgtcatgttttcaactaatatttaattaattgatgcggggatggccagatggcggatgggttcccaaacccgtaggttcgaacgcataccgaccggagtcttgggccggagattagccagcccaacaggccgatcttgaacttttgtttagcaatttgaggctcccgtatccgtttagcaaactgacccaaaaccaaaagcatcccagaagcggctggctaaacaccagaggcaaggcggccggcgaggcacgacgagcagccggcgcgccacagcgcgatcggtcgaagccctcaccgtctcgcggcagcaagccggctaggccaggtcccggtaagcttggctactggctggacagtggacgcacttattaaagattgacaggttgttgcaatttttttttctatctcaaataatttggtggcaacattcatcgttagaaaggtacaatagatcgtctatatatattctaccttcatttttataaatgaatcatttaccacataagttgaattagagaaatactaccagtgagcaaactacaagcacagataattggagattcaatcttcaaagaaccatctaatgtcaggttatctttgctttgtaacatactacaccctaaactaggatgaacagaaattaaaggagttggagagggcagggaattgttgcttctgtttagtgtcatatattatttgtagtatattttgaacatatgttgtgtgattttctgtgcatcatattgatcttggataaatatttacctgttaggttacacgtcctcgctgaacctataatttattcctgtatctgctacttaattaattaatgagatgtgatcagtaaaaaaaattctttgtaactgctggttttctgtttgacagatttttcctgtactagtaattagaatgaaaaaaagggtaatacatgttcattttagtttttacatctttttttccgataggcgggagaatttattatctagcatgcttgcatttacaataatcatttcagtttatgtgtatattactttatgacaactatgcgctcttgaataaatccactccctttgcatgtgaacagcatatatggcattgccacattgctagatttgcatttggaatgtgctttaattcgctttatttgatttcataatagaagactatctgaaaaggcagaatttgaccattgtaaagcaaaaagtttcttcagttgtctctgccacattattattgaaatggagcatatataggacatctatatcactcattattgttggatataagttcaaatttatgaagaaaagtgaccagtggatgaaggcaactaatcaactctgctcctgttgatttgtgaaaatagttgcatgggtgagcttttctccattataactatgcaggcaattataggccaagcgatttaattgtattcttgttgagaggtactcactgaaaggtactcagccattaatctgcagcttatgtgtcaaaatctttcttttcaaatcgtatgcaattccaaactgaatactactaagcacaataaggtgtcccacgaaatcaatataagcggccattgtttgcatggcccgacactgtgacatgccagctcttggttgatgacaagaacttgattaggagtcctttgtttgttgggttaccgtacattcccctgtgatttcaattattcaaataatgtggattgctatttcagagatgaacatacaagctacccaattatctgctctcactaaaacgagggtataatgcgaatccatgattgcctcaatgaattgcaagtagcactatgggcgtaaccaatttgtattcttggcaagttgatgtccaagattcaattctgcactgtcaccgagctgtagctgcagattatgaggctcttattagttttgattgatcgtttgtttgtttgcttgtgttgtgtgggctgggggttgaataacttatctgatttgttcctccaaaatctgtaaaaataaataaataaattctcctgcacaccatattatgtgttcaaattttataggactatgataatgttgtgcctacgttaccacactgttcagatttctgtttgtattatcaccgttaattcatggatgcagagtgtgtaagagagagaatgatatttgtattacaaagagtaatcagtttcaaaggcggaaaatttgagaaaataaggatcatgtcaaactgaagtttggaaattataactgataaaacctgaggaaccatgccaaacagctgaaatgtgtgtttcagaaacagacgaatgattgcgtatctcccagttccttaacctgaattattgcgcagatatgatattcctacatagtgagcctgtcctggcagcctgcctgccatttgtagaactagattcttctaatttgtcctaatcttgttcaacttattgttaggttaaccatcatggttcaggtaaagaagacagacatacactcgggcgaaatttagcaagaggtgtgtatatttacttctacaaactgcagtcacctgcattaacaggtgtaactgtcaaagtgtcaattcctcgatcgccagaatcacacaaacttccagagacatgtttccacgggtgtacatcgttgtttatctgtgcaaaacaacgatggagaaaaagaagcatatggaacggttataatggaacggcttgttcttttccacgcgacgaaggtgataagaagtgagcaaaagtcgatttagcaagaaacatttaagagtagcaaatgatgatcaatcgatttagaacacaccatgattgaaaaataatgcaggtaacgcgatgatatttcaggtggagacacccgaagacaagtcgccttcttgagtccattattatgaagaaaattggttgatgtgctgcaaatatacgatgtgagcttttcttttctgcctttttgaaacttcagcggatgctgataggtgcgtatttaaatcaactgtttggacatgtggctcgtccaaagcaatgaaccattggtttggtacactttgatgaataataatttgtggttttcattgccttacctgtgctggactgctggtagttataatccagtactctaatttcagctaatttccaacaagagaatcagcagttcagctgtagtacctaggttactgccagtttcagtagagaaaggagcacacaaataacagcagtaaaattcagaatgtacaatactgatgtttttgggttgcaatccacatcgggcatgccatattcagcaagttgcaatcagcagaagagtggttcagattgcatggctactcatccaggttgcccaaacaatctcaccaaagaacagtggtgctatcaagcaagatttgcccaacctgttgtacaggctagataccacacaacaaaaaggaaaaggagaaagcgagcaaatgtccaaaacctgaagtttatggcagagattcttctacgatataggaatataggatagttttcattccatccaaaaatagtttcagaactacagatatatatcatatgttagtctccactgcatctttctcctttttgataacctctccaattggccaatttatttttgaaaaagaaggatatatatataagttttcctttgtctcgatagaacttttacggtacaatatattgccagtatatactggcagtatatagaagggcatgctaggaatttgctagaaaataaaataacactttagtaatttttggttcagattgaatctaattgagagtacccggtgctaaaccttatcgtgcactaggggagaagcatcctgagcgccattgttgacaaagcacgtgacaatagcacggtttgatgatagaataacaaagaaaagacaaaattactctttcaaactttatactgtcatctaattaactaaaaaatcaaatcaatctacaccgttaggttatatatacttgcagtatatactggcaccgtaaaaatcctcttctcagttgcatatgtttcctcgtaacagcagtctacctacctaccatcatgggatccttttgagaatcatacagggaatttcaagcctatcagtttaaggacactttgatatttgcatcaagagattctatatctcaaaatgcattcgatataagtcaaattggcatgattacaatttctatgccaacatcaacatgaagcattaagcattaagcatgacccctgaattaaagcagggccacaaaatatttcagacaagaaagaagccaagaacaaatgactctatatgtttcaacttctacttgcaatttaatcgagattcgttatagatgtttatctctcggagcaattttatagtacttgaggaggtacatgaggtaccattttttctgttataaatttgatacctcttgatacataggagtaggtactaggaggtaccaaattttacagtaaatttttggtacgtactcaagaactgtaaaattgctcctctctcgtggcaagaacatggatatacaataaaacgccaaagttaacagctccataggcttgccaatgaacaatctttcccaaatttaatgagcacaactacgagaacagggtattagtagcagcatttagcagcctaattaaacagcaacagtgccacatgatacattcatcaggatccaccacacaatcactgtcaaaaatgctaaactagactaataaactaatcaatgatgagtaataaaatgaaaaacaattaaagatactgggatcaatccttgttgaaagatcaattctttcgagccaactgatccatcattcattcggcttcagccgcagcagccgcgccgccatggccgccgccctccaccggaggcggcagggcgtcgacgacgaggccgcgcaggccggccttgagctcgttgtcgcagaacctgcggtactcggcggtgtcgccggccttcttgcacacctggaccatgacgagctcccgcgtgagctcgaacaccttggcggagatggcgagcgcgcccttctgcccgttccgcgtcgcctcgatgctcacctggcagtccttggtccgcgccgtgaagctcaccatcccggcgatctcctgcagcttggcgataatgtcggccaccggcgcgccggacacgaagcgcatcctctcgccgcgctcctcgaacagccccgacaggtcgaagctcggcgacgacgcgatgatgtcgaacgcgttcaggctcttgggccgcggcatgcgcggccggggcgggagcgggagcgggagcgggagggacgcgctgtcctccatgcggtcgagctcggacagagccggcgccgacaccgaggtgtgcatgccgcggggcgttccggccaccggggtgggagattccgacgacgacgaggactcgatcgtgtcggtgtcggagtcgtacagctccggctcgccgtcgaggccgtcgaggctgcggaggcggtcgttgctgtcgatgtagtaggtgacctccttgaatcccctcttgaaccacctcatctccatgatctctggtatggtgatgcggcggtcggggtcgggctggaggaggcggcgcacgagacgggcaaggtcagggctgaacgacggcgggcactggaactggttctgcccgatcaggcggtagagcctggagacgtgctcgtcggggaaaggcttggggccggtgaggagcacgtagaggacgacgccgcatgcccagacgtcggccttggcgccgtcgtagccccggcgcttgaacacctcgggcgcgaggaacagcggcgtcccgcagacggtctggaggtgggcctctcgccgctccatgtcggcgagcgcggagaggccgaagtcggcgaccttgaggttcccctgctcgtcgacgaggaggttgtccagcttgatgtcgcggtggaacacgccgcgggagtggcagtaggcgacggcggagacgagctgctggaagaaccggcgcgcctcgtgctcccggaggccggcggcgccgccgctggggcccctgcggaagtagcggtagagcgcgccgccgcggacgtactccatgacgacgcagatgcggcgcttgttggccatgacctcgtggatgcggacgacgttcgggtggcgcagccgctgcatgacggcgatctcccgcttgatcagctccgtggcgccgagcctgacgagcttctccttgtccatcaccttgatggcgacctcctcgccggtggccctgtgccggccgaggtacaccttggcgaagttgccctcgccgacgagcggcccgaactcgtaccgctccgtcgtcatcgccggcggcttcgtccccgtccccgtccccatggatcggaacatgcacgcacgcgcgccgcggcgggcggcggcggcggcgagaggacgcggattctgctgctgttaggggggatcgaggcaaagggcggctcgacgattggaaggtggttaaatacacggatcacaagggtttagcacgcgagacgctcgtgagttcgatggaaatcgccagccgtacgccgcgccggtcaatcctggccgttcttttgttcatgcggctaggattttctggcccgtgtataattgacagggcatatggactcatggaggcccatcatagctcccccttcactttcgttgactagcgggagttttttttcttacaataatgtgagaaaaggtgattaattgaaaagcttaattaggctcgactcgttggcattaatatatcattgggtatattgtaaaagacagtctagcctgtttcgcataagctaacttcagttcattttttgtttttggtatagagagtgtatcaatttgccattgagatcgtgtgcaggtacaattcgttaaaggactgcagctaatctcatctattgatttttctgcctcttctactaccgtagtatctttgtctaccgcaaaacacagtactacctccataccaaaatgtttgacgctgttgacttttttaaaaatgtttcaccgttcgtcttattcaaaaaatttaagtaattgttaattctttttctatcatttgatttattgttaaatatatttttatgtatacatatagttttacacatatcacaaaagtttttgaataaaacgaacggtcaaatatgtttaaaaaagtcaacggtgtcaaacatttaggaaaggagggagtatttttttaaccaaaaatgttttcgaaattagatcaaacagatctggtgtgtgaccgtttaagttacagtcacactattgactgcatgagaccgaatccatcaattcatatgcactgccgctaaactgaccattttgtttggctatggttgtacatatatataagcacccgctccgaacctatctctctgtttcatattagaagtcatttaattttttttattagtaaaatttatttaatattgattaagtttataaaaagtatagtaacaattcaaatataaacaaacatattattaaaatatatttaatgtaaaatttaataaatttaatttgttattatagatgttgttaaatataaagaaattttaataattaaaaagtcaaacgatttataaaaaaaatgaaacagatggagtagtaatcgagagcaggacaacggcactcattgtacatagttagtacggagtacaatatatattcaagaattcttccagccatgtccggcagattagtgacacggtgccccttggtgtctgtttggcgtacgtttctcctggcagataatcgaccaaccaacaaccgtccagtggaagacacctgcacgagatcattgcatctgtgaattgtgattctggtcaatctcgaccatgattggatttctaattaaccaagtcattaattacaataatcgtcgtcgtcgtcatatcatcacgaggacctacaaaaattaatatcctagctacaggagctagtttaatccagctaattaacaagctagccgactcaaacgtcacgcgtacaggcaactgacgcctggatcgtgcatgatatgcatggttttgcctgacaaacgatcagacacacagctgggaatgattcatgtatacgcgtatgctgaacaagtgatcaagccgcgaaaagaggaggaaaatgttaccccatcttttgcaaaatataaaaagtttcagaattgaatacgagtattatgaaaattgataaacttaaagaaatattatgattggttaagaaaagtaggtagatacaaaatttgaacagttaaaggttatgatttgttaaggaaaaattatagatgaaaaattattatattttgaaacaaaatttaaatgttagaagttgttatattttgtgaggaagtgggcttttggtcttgaatctttactacttaaaaaattcatagtggtggtggtgagtcctgaacgatcaaatggttaacattcatcggagaatcctctcacaggaatcagcggatgagattttctcccacgatccacccgtcgcaccccttctcatctccccgatccgcatcgcgctccctctctctccgatccgtaatttcgcatcgcactccccagccccccatccttcctcctcggcgcgctgcctcctcaccccaccgacgcgccgccttcccatcccgcccaacccacgccttcttctccggttgtcctccctccgtattgtgccgtccctcgctccgccccctccctctccatcgcgccactgccccctccataaaccataacctccctcaaatcccgatcatctgcgcagccgtcattatcgtcagaccgagttcttcgatcatcaccctccgttgccgccactgcatcggacccatcgaaatggtggataggaatgcggacctcagtatggttgaggggtaggacgagatgatggcggtggttgcaggcgcgcccaccagcacaatcgctggagtgtggagctagaggagcgcgcccgctgctgcgagtcaccggcggtgtcgtcggcatcatcgtcagctagctctgcatattaaaaacataatatgagttgtcaagtaaagttagtgcaatgtaataagatgtttttaatttacctatgagaatcactattagtatttcctcttgcatcaatttagtggaagatatcaaaaaacaacagaagatattcaaaagggaactatttggatggaaatatgcatatattgatggattatcaacacctggaagctaatggtaaatacaatttatttttctcgatagcctagcaacataatttcattaggataaaacctttattcgtacctaatatatttccctcttgctaagatttagctcagggtattcttcattcaatggcctagccagatccatgctgcatgttaattatgacatgggttgtgctgtttcttggtggagaagatcgttaagtatctcctggcatgcatgccgctgccattaacattctttcttgatggctgtgagcttgtcatattttatctggtgttatcccggctgatgagcatcccattcgattttttttctttgtttacattggtt

SEQ ID NO: 16248 - DNA, 1623 bp, Oryza sativa
ccctggcgagatgcatcacaataaacctggaagtctttagtctgatctggcaaaatcaaaacaggtgcagataccaaccgcgtcgtttgagttcttcaaaactcttgtagcattcagcagtccagataaacttttcttccttcttcaatagctgggtcattggcttggcaatttagaagttctcaatgaaccggcggtaatagcccacaagttctaagaaactccgaacctgagtaactgtccctggtggggtccacttggtaactgactccacatttgctggatccagagccactccttgggcattcacaacatgaccgagaaactgaacttccttcagccagaagtcacacttactgaacttggcatacagttggtgctcctataacttttcaagtaccagccgaagatgctgctcatgttgttccttggacttggaatagataagtatgtacatacgatgaaaaccacgacgaacttgtccagacattccataaacaccttgttcatcaaattcatgaagaaggcaggtgcgttggtgggtccgaaagacataattgtgcactcgaacaacccgtaacgagtgatgaatgctgtctttggaatatcctcctcgcggatcctcaactggtgatagcctgatcgcaggtctatcttagagaacatagtagctcctttcaactgatcaaacagatcatcaatccttggcaaagggtacttgttcttaatagtgacctcattgagcgtgcggtagtcaacacacatcctcttggttttgtctttcttttccacaaagattaccggaacaccccaaggcgacgtgctcgggcggatgtatcccttctatagctgttcatcaacttgcttcttgacttccaactcgttggctcccattctaaacggcctcttgtggatcggtgcagttccaggtgccaagtcaatccggaactcgatatccctttttggtggcattgttgtcatatcctccggaaaaacctctcgatactctctgactatgggaatatcctccaatttcttagtggttttctccattgctacctcttcttcttcaccggtggcctggttcagactgatccctggcttctgcggtactggagaatggaaggttaccacttctcctttcgccattggtcaacttgatggtgcggctagtgcaatcaatcactcctctgtgccttgtcaaccaatccattccaagtatgatatctaggtccttggattcgagaagaatgaggttggctggaaaaatcaacccttggatttcaactgtcactgatgggcagtagtgagttgtggtcatgccacctccaggagtatgaactcgcataggtatcttaagcttcactaaatataacctatgtgcaccagcaaaacgcttggaaatgaaggaatgagttgcaccagaatcaaacaatattgttgccggtatcgagttgacaggatatgcgcccaatatgacctctggtgctgaccgtgcctcctctgtagacgcatgattgagacgggcctgaacaagcttgggtccagcacgtcttggcttcgggcacttaccaaccatgtgtccaggtttgttacaattgaagtagagttcgggcttttctc

SEQ ID NO: 16249 - DNA, 3686 bp, Oryza sativa
gagctggactcattaatggacttggagtcggattgaggctgtgctgctcgctgttgctgtgactgccactcttgtagttcttgttgaagctacccgggtggtagggacagtgctgccggataatcatggtggaaggtccaccctgatgtcccgtcatgaagcgaggcttctaactgttcccctggagagttctgaactaagatgctttcctttttcggttcattttgttacactgctcctcctgatggatagccttgtccacaagcttcatcaacaggttgatcaattcattatcaagactagaccaaaacttctcctgcctctcgacatcagtgcgcacgtcctcaggagcgtagcgcgcgaggcggttgaactcgtgcagatactctataactgttttggttccttgttgtagagaacaaaactctctcttcttttgtgccatgatcccctcaggaatctgtgccttattgaaactttgacagaactatgcccaagtaacctctgtcccagctggacgggtcaccatgtagttgtcccaccaaacagaagcggcgcccttcaactggtgtgtagcaaaagcaaccttctcctggtcgttgcattgcaaaaggttcagcttcttctcaatagcatgaagccagtcgttggcctcgattgggttggtggtgcttgagaaagtgggtggcttgacatggagaaactccaacagcttggacttgggaggtggaggaccaaaccgcaggttctgctgctgcggttgtgcttgctgctgcacctgctgcaacacctgatgatactgttgctgcatatgttgcatcatcattgtcatcatctgagtctgattgtcaaacacctgagcgattgttgggttctcgggcggtggagatgaactgctgtcagatgcatagcagacacgtgctccactgatctgctcttcactgccactgacgttgttggagtcacggagaccattccttatcttcaccatctagaggggattgggtagaaatatgagaaaaggaagaaaaacaggaggcttagaaactaatctttcttataaatttaagtgcaattatcttaatcttgattgaaacactgaaaaggaagcaaacaactcctaattaaggtagccataccactcacacatgatatcgaccgccgactaaccaacaagcaacaaacctaaacacggaaactagcaagcaaacaaaactaagaaggcgacgaagctaaaggcagtgactctgaagctcggagcggcgcttgcgatcagtgaacaggtttgacacctaagatggacaagggatagcaaccaaggcatgctcaaatccaaattaaacatggcaacaaatgactcaaatgaataaccgagcatggtgatttctatgcatagaacatttttcgtgaacccagataaagaaacaaatgcaactgactaaacaataacttaatgcataaaatagatgcatagttataataatatgcataaaattgccccattgaacatagacacgacctaatgcatatcacccgataaattcccgactgactttcgaataaactccgaataaaatattactaaaaccctagactgagctaattataaagatccgatccgaatgaatgactaagatttttttcgcaaaccaaagaggcataaaccccaaattttcccgaaacgaatccaagtgcaaagagcatatgcaaatgaaaaggggttcaaagggctcttaggtttccagttggcttgtcctacggtgaaggtcggctctgataccaacttgtcacgcctagaaattcatgaaccagaatttctaagctgaatgtgcattaaatcactgtccaggaccagccagggtacacaaatgacaattattgacatacagatccacgtcttacaaaaatataaaagattacaaatgcaacggaaaagataaaaccagctaaacttggaagcttgacttctgcagcgggcgactccactccacaagcaacccttgacggcagcgacgaaaccaaccctaacaagacagcttcaacttggaagatctttagctctggtgtgggggaaaagagagcaagattgagagcaagactaagtcataccagaagaggagaaatgatgcaggatataactaaaggaggctaatcgttcatttgcaataaagcaggcttttaaaaatagtagttgaaagcagtaaaaacaattgtagtaattaatcaatattaaccaatcactgtccaacgctacaccgcgttgcaacaggcccaaccaaccacctgaactacactagttcattaagctaaactaggggtgagactaatcacggtgaatctggttgatcgcccataaccgcgggcacggctattcgaatagttttactctggctagaggcgtacaactgtacccacaagacatgattccacacatgtcgccatgccccgaagtatcaccatgatattgcaaagggggaaatcgtgacaagaccctttgcataacccgcccctaaccatccacaccacgctaagatttcacccccacccctcaaaaggcagtgagtagtcccctcgtgcgctacggtgaatccggcagctggacaaccggacaacccggccgacccaactccatcacgcccactctcgccaccggtatctaggaaagggtcgagctatactacaagtcaagcagttacccactcctgcttgtggcaagcacggtaagactcgcagggtttcccgtgaactggtccttaactgcaagggtgcgaccagcaaaatcatgcacccacagcccaccattcagtgtattttaattaactaacaccattgcggtggcacaaatccaaagctatgctaatagtcaaagtatatgtaataatgtgatctccatttgtgtactagttgaactaagcacggctaagcatttcctaaaccaacatctaatcattttgatacccaagttatcaatggcatatggtaaacaatatatggctgagtaataggacccataccacatgacattgtaaaagaatgcaacatttaatagaaatacgggatatttgtaaattgagtataatatgatcaaatgtaatgcatcactttccttgctctcgcactgatgagacctcagcaacgtcttcgagaaaccgtggatcgacgaaacggccgaaatgctataagactactgaaacaggaaacaaaaccatttttaataaattctagggatttttatgaatttactgagacttgaatagacttaatcggagctcggatgaattagttatgattttaagaagataaactttttttattaataaaggaaaatccttattcgatttattgcgcaatattgccccagggctgacgtcatcaaaggaggggggcgccgacaggtgggccccgcacgtcagcggcttgagagagagagggaggagcgccggcatgcgggccccacgggcagcggcacaaggtggaagggacgcggctggcggctcggcacagctcaagccggccggccatggtgcggtggcggcggcgcgcggccaccagcggattgcgaggcagcggcgatcggcacgaaggcgacggcgcacggccggagcggcggctcggccaacggcggcggcgcacgtgggaagggagagaaaaggagggggagggagtcctcaccggaggaagcggtg

SEQ ID NO: 16250 - DNA, 6244 bp, Oryza sativa
tttagaaccaaccgattactacagattcaatttggactaaaaagggggatgaaataaacctcataaatacaagaaggattccactagattactacaacaaccaatcgaggaagactcaattggtcagatcgaagccgcgtgaagcgcagatccagcaagaaggaagaagagggttctggcggttcaggggctgaagagagcatagaacggcagggggattgtgggcgccggtcagcaaggaagagaagattgcattattgcaacgatgaactcaccgtggccactctagatccgctccaccgctgatgtgtgcagccgtcgtcgaggttgtcgcccccttcttccaatctgccaccccacctcatggccggcacaagaaaggagagcaggggcgccggcaccatctagctcgccatctggcgagtggggggcaaaggcaaggggtgtaaggaacgactgaccctggcttgctcttgcgccgccaccatcaagctcgtcgtccgacgaggaggggcagtggaggcggaggctaggaagatggcgagggagaggtgagtgccagcggcacaagatacgccgtcaccgaggccactccgccgacccctaggaggccaggacaccgccgccatggagccctctgccgatggctcgcgcctcacgtctgctgaggggctgatccgaacgctgccgcctggggagagaggtcaccgcagaggggagtccagatccggcggagatgggcagcatgctcctactctgacccctcacttccatatccaacgtcgccaacaaggggacacactgttcaccaagcaccataaatcctagaaagagaaaagtaaaatggaaaaggaaaccatcacctcgctatggaactgttcgagagggaggcaaaatcatggtggtgctagctggctttgtggcttcctgggatagagctgtcgatggagaaagtaaggggcattttgatttatagaaaaaatgtagaaattttggaggatttcaattctatgaaaaaaaaatcctacgaaggtctttgaaacaaaagattgtatcctatctaatcctttaaaatttttatggaatgggtaatcctatgtatattttggaggaaagttagcaagagatctaacctcttggaacattttctctgagtctatctctcttatcttattcctgcgtttttcctgtgatccaatcaaacggccattttctctgagtctatctctcttatcttattcctgcgtttttcctgtggtccaatcaaacggccattcctgtgttttttctgtattttgcaatcctctgttttataattgtattcatgtcagaatcctgtgttttttctattcctgtgttttttcattcatacgattcaaagggccctaaaagggaaaaggataaggcctttcacagtgcaagcgtggggaatagagagactgagaagattggaataaacgagagatttcttctgctttccttttttccacttcccgtcggctcagcttttatttttttttatgtattttttttcttccggtctgtttggcttccatttttccccaagtataaaaattaccctatatttattgatatttcacttcaaatgaaatttacaaataaaacacaatactacctaagaaaaaaaaggaaaagtttgaattacacccctgaacttttgggtgagtacgacttacctctctagacctaaaatccagacatctttcacccttaactatcaatactagatgaaaaaccaccacgggtagctttgtaagcggttttgatcctacgtggtagtctagtcaataattcttttattaaaaagtcgatagggcccacctttagatctctctcctcattatctatttcgctcctcattatctatttcgcccctcagacccctctctctcttgtcagatgccaaggaggagacgcgtcagcggctgcgtgcgtctcgcggcggagggccaaggcagtggccaacgacagtgaggaggcgggagtgacagagcgaggcaagtggcatggtcttagtcgagccatgtctcgaggtaggcgtgatgcaagatgtggctgcaggggggcggttcaccaccgcatccgcctcgaatcgcactaggtagacgtggcaggtcgtcgtcggcccgcccccatcggccgccgagagagatggaggtgagggaaggaataagaagagaggggattagggaaagagagagaggggaggagaaagagatatagagggtgagagactaataggtgggacccgccgattttttttaaaaaaattactgattggactgccacgtaggatcaaaaccacttcggcttgagtggggggtgggggggtaattcgtccggtattaatagctgagggtaaaaaatatctggtttttgggtttagggggtacttcgctcacccaatagtttcagggtgtaattcggacttttcgtaaaaaaataatgacatcaatttttatgattcagatgttccatcagctctcacaagtccttgtgtcatgaactcgaatgttcccttaatcaattccattcatttttcgttaaggtactaaaaatatattgatttttctattcatcacataaatttacatgtgtcaccttctatgcaaaaggagacgcattaatttgttcaccactcgatcctcgccattaccatcaggcccacacacgtaagaagcgtcatccacatcgtgcaaatataaagaattaattatcaaaaacaaacataatctttttataattgttcatatcgccgatgcttataatcatctcgtgtgctttggataaatcgtaaatatcaaacttcagccacccttcaatacccggtgcaacgcacgggtattttgctagtttttatagataaatatattaatatttacaacaccaaattagttcatttaaatctataattgaatatattttcataatatatttttcttgggttaaaaatattattattattttctacaaacttagttaaacttagagcagtttaactttgaccaaagtcaaaatgacttatagtctgaaagggagggagtagtaatcttcaaatggttctttctcctagttaattattcatatgttgagattcaattacaccattatatttattgcacacatgtgctcacttcgagctacaaagctcggtgctgagatcacccgtttcgctgggagggagtggctggcggagagaatcgatgctaccaggatggtcgagttcttggtcaccaatatcgttggcgaggaaagggaggtggccaacaagttgtcaaatcattcagttcacgaaggtggatcccgacgcatccgccaaggcactccagatgctcaagtccgccatcgtctatggctagggctacgctatgctttgccagggcaatagatgaggttgtatcatgggtgtgagaaatatgatgaaggatggcctcgatgctgcccaggccatgctgttggatggtgtcacttggccaaggggggtgcactggagaaggagggtgacagtgaggtgaatttgacaagcactacgtcttagtccatgagcgtcaataggagatagaaggaagaggtggtacgactagaggcaagaaggatatttctcctctagctttcatgatggtagtcggacatgtcatgtcacgtgggaaaagtggcaagggactatggatgcttttccattggcaaaaatttatgaataaaggcaaatgtggcatttgaagaattggcaagggtggcaaataattaaattctcttttgcagagacgtggagagagataccgctttctccgtttcctactcgctgcatcactcatccaagcacagtgagcccaaaaataacattgggccaatgaacccgagcccggcctagccgtccctcgtgcgggcgattgtcacgccttgattttttttcaaggatttaaacttatctaataaaccatttttagaatttatattcatgtgtaaatttattgacaagtgaagtaaataagggaaataaaatttccttaataaatcatggttagtgttacttttcttaaattctccatgcctgaaaatactccttggattttctcaaaattcccatatctcaatagctaatttgaaaatacaaacatcattacagtagtaatcatcaaagtgaaaaccgctaaattgtcaaccactcatgcccgctcactgctccttctccccacctatcgttgcttctcacagctagatccggcaaaggtaagcttggagtagcccagatctacgatctgcgagctcagcactgcacgttgtagccaccaaagcaggcaatggtcccttcaagctcgggcagctagaaggctgggcgagcattgacggcaatggcgatgcctacgacgatcgtgcagcaacggagaggagactacaacgacgactcaagaggagtcaaggaagcaaataagggaggtgggatgcatccccgcctcgctcaccatttacaacctcgcatcccgacgttcgtccacgcaactgcatgcacttagtcaggtgagaagtgaagctcaatttgagcaattccctcttgtcttgctagtcagacgattttcgtacatgtagagcttatccctacaggccatgctagcactaccaaaaaattgatacaacaaaaattgatttcaaacaaaaaagcccataaaccaaacctacatggcctataggataagatctttgtgtacgaaatctatcaaattttagcactagcaaatttaaatttgatagtatagaattggttctgaggtgaaaaaaaaaacggttagccaaatacccaagttatactagcaaaagaattgataaagataaaaattagcttcaatcaaggtaaccaaacacgccagagcttcaagccttcaatccagttagcccacaactgatccgggcggcttttttttcttaaaaaaaaaaagggacccgggggcctcgtgacgacgtggcttctcccaccaccgtaactcccgccccctcgcagtctccttcccaacaactggtccatacaccaccaacccccatacccccgccgtttcacctaccacactcccggctctcctgcaccgggcgcacccaattcacacccacaaacgcacgcccgcacgcgcgcgcgcgcgctcagagacctccgtcgccgcccgccgcacgccggcgacccaccgcgccgcacgatgccgccgacctcagtgagcccaccaagaacagcgccggggccggcgaacccgagcccggcacacccgtcccgcgtgcgggtgatccacccgggcggcgggaagcccggtgggccggtggtgtactggatgctgcgggaccagcggctcgccgacaactgggcgctcctccacgccgccggcctcgccgccgcctccgcgtccccgctcgccgtcgcgttcgcgctgttcccgaggcccttcctcctctccgcccgccgccgccagctcgggttcctcctccgcggcctccgccgcctcgccgccgacgccgccgcccgccacctccccttcttcctcttcaccggtacgcgcccttttctttttctttttctttttctttttcttttgtctccatccgtgacgatgacatgtgggccaccccgtcttgcgaaatgtgacgtggctttttctctggctcgctgacaggtgggcccgcggagatcccggcgctggtgcggcgccttggtgcgtcgacgctggtcgccgacttctcgccgctgcggccggtgagggaggcgctcgacgcggtggtcggcgacctgcggcgggaggcgcccggcgtggccgtgcaccaggtgagcgtggtggcattgctgtttgcatcaatcttccaagaaagttgggaatctttttggggatggataatgaattcgccggagaatttagagattcttgtggaattcttcgaatgcaggtggacgcgcacaacgtggtgcctgtgtggacggcgtcggcgaagatggagtattcagccaagaccttcagaggcaaggtgagcaaggtgatggatgagtaccttgtggagttccctgaattgccggcggtggtgccatgggacagggagcagccggagggggtcgactgggacgcactcatcgccagggtttgcaggtgcggatgataattctaaggtgtattgggtggtaattttgtttgtgtagatatggatgactattgattcttggttgtttgagcagtgaggcggagaatgggcc

SEQ ID NO: 16251 - DNA, 2149 bp, Oryza sativa
gaccggaatgatcccacgaaaccacgggcattgtctgggctttcaccataccttcattttgggcacatttcggcacagcggtgtgcgctcgaggcaaagaaatgccgacatcttagtcccaaggtgctgttctttaactgatttgttatgattaaaagagttatgatcctcttgcaatgtaataaattgttagatggcattgtttttctttaccgtgaactggctagaattcttagtgatgttgtttacctaatagatgtttgaagtaacatgtgttctgaaacagtccgtcgatgctttcttggaggaattggttgtaaggagggaattagctgacaacttctgctattaccaacctcaatatgattcgctgtctggtgcatgggaatgggcaaggaagacactgatggatcatgctgctgataaaagagagcatatctatacgtgagtaagttgccctttataatttattgtcacaattttaaccaaattatcttcctgacgatgttaaggtaaaagatcttcgctctaattggttatttgttaattgtcattttgttttggctaggagggaacagcttgagaatgccaaaacacatgatcctgtaagtgctattggacgtggtgtactctgttgctgatattgaagttactctaacacactgagttattttttttctaaatgattatcagttgtggaatgcatcgcagttggagatggttcaccatggaaaaatgcatggattcatgaggtaatatatcatgaccagactcttacaaaatcacgcaagtataaaatgtttattgaacagttttttttttatgaaactgcttgttatatttcttctgtacccatggcacattctagttagttgcccataacctattggcccacttgttgacaacatatggttattttacccatcatactgatggtgtggtgctaacctaaaggcattggattgcccccaccccatctttgctgacataactgattagtttgctttgttggatagatgggaattttctgacgttgtggtttactttatcctatgtcagaaaatatgaagttatttgaaaaaaagcattccttaaaaaattagttttctgtagagtttgtgtagttccaataaatttatgatgatctatgtgatatgtctggtagcaagcctttggtgcacataattctctttgattctgggcaaaccttttacactatttttgttcaacttttgttttggatctggaaagaaagaaaagtaagttgttttggcgaacatcaaagaatgatgttatatctaattgattcttagttctgaaggtaacagtgcctgtaaggactttttcctttcctaatgtagtagttgtctgtagaatgtactgggccaaaaagattctagaatggactagtggaccagaagaagcactttcaactgcaatttatttaaatgacaaggtaagacctatacacatgtttgggaaatacagttgtgttattttgaatttgtcctttttatagttttgctagttgtagttaaaatagctatatttcaacacatggaacatgataaagaaacatggaacatgataaagaaactgctcacatgaaaaattgtaattgaatagcaacttggaagagtctgcccatgcttaaattagttcctgcgccgataaccgaaaagttggagtcacatttatcaaattaagaaatatataatttgacattcttttcatgtaaggcagaaaattgtatggttggtgctcttttcattatcttatcttcccttaagttaaaaacatcatccttctagggacaaccagacaataaatcagcttcacggtcgcctcggataagctggactatcctttttcttggttacctgtcagaagaaagatacaaaacagtaactggggaaataaattttcaggaatgtgaaattgctcgaagatattttcatagttgaacctacaattctttccccagctggattgttctcgttctttaataggagtagttgtttgcattgaagtacttctacggattttatttatgcttttcaacaaagtcttacaaatcaatcttgtggcagtatgagatagatggcagggaccccagtggttacgtcggatgtatgtggtccatatgtgg

SEQ ID NO: 16252 - DNA, 1346 bp, Oryza sativa
ctgtagatctgtttgtctgatatccttgtaggcttctaatcattcaaaatttgctagcattgttaagactttaagacatacagtgtcacaccagttgaattcaagtgtacacattgatctaacactgaactaaagtactgcttactgcctaacaaacagtacttggcaaacgatgcctactgtgtaatgagaaagataaaagaaaatgtcttgcaggtagtgacgtttttttttaagtaaatttcacaaaactatatgtattttgtacaatttatcataaaactaaagatttaagagctttcacaaaactacagatttagtgtctccgtttattataaaattataggtactttgtacaatctatctcaaaactatagatttaagaatttatttcacaaaactatagatttcgtgtatttgtttatcacaaaactacacattcagtgtcttcatttatcacgaaactacagatttattgtctctattatcacaaaactacatgtttttaacaatgctcaaacttgtagttttgtgataatgaagacactaaacttgtagttttgtgataaatgaagatattaaatatgtagttttattataaaagtacttaaatctgtagtttgtgatatattgtgcaaagtacctgtagttttgtgataaatgaagccactgaatctttaattttgtggaaaagttcttaaatatgtagttttataatagactgtacaaaatatttgcagttttatgaaatttactctcttttttttatattaaagtaaatgacaaggataaaagaaaatatcttgcacgtagtaacgttatttttttataggaaaaagtacgaattaccccctaaactatcgtggttgatcgaattaccccctaaactcgaaaaccagacatcatttaccctgaacttttaattccggacaaattaccccccttacctcaatccagagcggttttatcctacgtgacgtatacgtagcaatccaatcagtattttctttttttttaatggtgagtagtcatattccacaaacaaaatctaccactgtgttgatagggcgtggtttggtagtatatgctaatttgaccactgttagtggacaatgatttcgtacagtcaaagattaatttacaaacaaatagttccacgctgtgccccctccaagaaatcatgcttaacaacagacattctgcatttcttattattttcaccccttttttaatagccaacgagacaaggcacaggttcttatttccctagaacgacatttttgaactgaacaaccaaagcatgtacatctgatttcacaaagagagaaacaacaaaaagggatcca

SEQ ID NO: 16253 - DNA, 588 bp, Oryza sativa
caaggacggggtgatcaatcagccctgccacttaccgccttcgacaatcacactctcaggcttggtgtcatcgctcagttcttttcgcacatattggtcataaagcttgagcagaaacttctcctcccccaacttcgccagctcggcattcacccagtcgcgcaactcgatattgcccttcttcaccgccggggcaatcggcgcttcatcacccagcttctcttccagcacgcggtaacccgggttctgcttggcccagctgaacagcaccaggttgtcctgggcataggcatcaccacgcccggccgacagagcttgcagcgactcggagttcttctcgaacttgagcagcttccagtccggatggttcttggtcagccagatatccgccgtggtgccggtggtgacgatggtcgtgcgggttgccaggtcagccaggcttttgacggcgctgtcattcggcaccagagcctgcaccgcgactttcaggttggggttggtgaagtccaccgcgtccttgcgttcaggcgtcacggtcatgttggcgagaatcaggtcgaccttgtcgctttgcaggaagggggatcc

SEQ ID NO: 16254 - DNA, 969 bp, Oryza sativa
atctacgactaaatttccctgcaaatcctcttcttggcaacagacatcttcacttgggatgaccaagcttctaattggttgcatcttgtatacaacccactaatcacgcaagtctcgccttcgggaaggatattgcagataatatacttgtgttgcttgatgagccatagcaaatggttcaaagtttgttaattttgaggtagactttatttctatcattcccaaagttggtgtggatcgtttgccccgaatggggtcaaaccaacggcattggagcagcactatttcaatcttccggccagcatcaaatgttagttttataatgtcttcgatgacaccatagtagtcaagttgctggtcatcagaggtgaacgaggacaaacaaacccctgagtttactgtggtcaaccttctacgagatttttcatatttctcggacctaaaacgatagccattaatatcataagaattgtatgacaagaccctaggcttgcatccagtagctaaattccacaaatcatcatctgcacttggatcatttcgacactacaataagtaaataatttagaaattaaaaatatatattttgaacattataggtaagaaaatataaggatatatatagagtttttacagcattcttaaaccagtcaacaaattcctctctcatcaattgatcaagcccctcgactgaaagattattatgcattgcatgcttctcttcagaaaactttctacaaataagatatgattagaaattttgtttgtaacaaactatatataatgaaattttcatcacatactcttgaaatttgtcgaccatagagcaatttgtcaggacatataacatcgcaacattcaactcttgtggactaaggtctcgaggcacacctctaccatgaagcatgccctgttcctggaacacatctaaggtgcaaccatcattttgcaccactgtaccaccattgt

SEQ ID NO: 16255 - DNA, 9686 bp, Oryza sativa
  unsure (1)..(9686): unsure at all n locations
atgcaaatatagttctctttgtcacatattattgccaaaggtaccattgtgaaaccatcggtaaagttatgctcctctcggtaattttttcctgtacctttggaacttataaccatttccgagaggtatattaaacccatcggttactaatataccccgtcagtcactaataataatttccgagagttatattaaacccctcggttactaatataccccgtcggccactaataatcatttctgagagttaaattaaacccctcggttactaatataccccgtcggccactaataatcatttccgagagttaaattaaacccctcggttactaatataccctgttggccactaataatcatttccgagagttgaattaaaccactcggttattaatataccccgtcggccactaataataatttccgagagttatattaaacccctcggttactaatataccccgtcggccactaataatcatttccgagagttgaattaaaccactcggttattaatataccccgtcggccactaatgataatttccgagagttaaattaaacctctcggttactaatataccccgtcggccacttaaaaccattttcgagtggtatcttataactctcactcattgatatatcccgtcggccacatgctaaatagccgaatgttctcataacaaccctcattaaaatttcaaacggtcggccacctaaatcttcctgacggtctgtaggattttttgtttggacgcttggcaaatcttaggattctagtagtgcatgcatatgatgtacgggtaaattccaagggtggtgtgtggctatttgcataaagctacatttcgcaaacctaagacctagcaattttgactaggaaacatgttagattaacgagggttcatccacctctacaggccttgcttggttcagtttaccctcataagttcatttacttcaactacatgagtcaaccttcctatcccataggcaaggtcacaatgtcatttcatgtttttaagcaaggttaaaatctatgagtctaatcaagacatgtataagtactagcgcttaataaccgtgagcacggctattcgaatagattagtttactcacactgcagtggatgtacgcttttaatcccgcactccgcggcttgcccaacacatgagcctagtcccaacacatgagacttgccacggcccggcttttcagttgctctcgcatttcagcacccactccaaggactatgagcccccattgcaccccggcacttcaacctacctactactggatggtgaggggagtcctggcgttcttgggaaaagggatatttactacatatacttctagggtgtattttaagttattgacatcatttaccaaattgacactgcactatcctcaacatactcatacagaaccctacccatgatctgaaggtgccncggtctccacgaagagcttctctaatccatcaggtctaccaattcgtgaaatgtggtcgtactcagttcgtttcttgcatagcttcctaactcgatccttaactgactagggtcggtgattaaccatttctagaaccacccatatactactcatgccgccccagtcaaaatagctttgtttcattaagttttgggttttcgcaaaagtttgtgtgaggtaggtggcgctcatgtctccacccacagatcgttaatcgcccctactgggcaacctttcatccatagtcttattgtacttgtatggaatatatacaaaacgtctacaagagcaacgctaagcaattgttggtaatcgactacgcgtaagtaatggactcgggcgtcaaggaggtataatacatgtaagggtaaacaatatcatggcaggcatcattcaagtgtaggtacgcaattataaataacatgcaagtttatttgcaaacaacacatttgtaaataggctcaatatgttcaagaatggggcgtagaaacttgccttgatcagtcaaggtctcaacctcaactggctcgcactcctcctcacagacgtaacctgtttaatcgaatgcgggaattaatgactaacttacgtctaacgccaaggctaaattgcaagaaaaattgaaaaaataccaaaccagcgtcatttgaaagatgaagattctagaagaattttggcgaaggtttcatcgaaatccgagttgaaatgggggagatataagcttttgaaagttgggttttgaataaatcaattaaaagtgaaagggctgacaggtgggaccggggagggttcggctgattggtccaacggattttaaaaagagcggggcctgcgtgtcagcctcagtctccttctctctgtggtcctctctctctctctcgcgcgcgtgtgcaaggcgacggaccatggcggctagggttgtgctaagtggcggtgttatgggatggaagtggttgcggccagggagggtggtatggtgaagggtacagctaggttagggaggcggtgcgtggcccagggaggtgtttggcggccagcaagggtgggtgcggcggcggccttaccacggcacgacgccggagatggcggggtggtggcatagcgtgggggcggggcgagatggctcgagaggagttgcgggtaggtgtactgaggggtacggagtcggtggctttgatcaagacggccgggagagggatggcggcagtgcggctgatggtggcggtgaccagaaaggggtgtggcagacatggacacgattagggcgtggttggctggtacggggttgcagggagcatctccgaccctagaggagtcaattcccctggctggtgtggccgaaagcgttggctaggggtgtggtgacgatggcctggacacgatcacggcggtgggcgcacggtgtccacggcggggctcagccggaggggatagggagggggatgggcatggtacgcggggtggctagcgatggtagcaattttgaggcttgggtggctcctaggaacattttggagttcggctggtggggctagctcgaacagagcatgcccgtgcgcggcacgcacgcacatgtcccgcggcgagagtggcgcaatgggtaggaggctagacaggtgatgcggttcatgaggaaggttgtctagcgtggtagcgttgtagctggtgaaatggcggctagcgcaggggctgggtgcggtgtttcacccttcgtgtggcaccgtgccatgtcggcggcggcagaacgagagacagagggagagcgagcgtcggtaagggcgggagagaagggcatagtcacataccttgtggcagttgtgtagcgacacaacgggcggtgatccctgcacgaaacaatggtcgtcgaggtattgcctggggatggtcaacccgcggatcgtcctcgcacgccaagtgttcgatcgacgatagcaaataaacacacggcgttaaggataaatgatagtgggttagggcgagttagttgttaggggccagttagctcaacaggaaggtacaagtcaacggttaggggttagtgcaaacgaaatcgaaagggttatcaattagtcgtcccaagttagttgttagccgttcttaggatcgatcaagcgtggcagcctatccacctcttgctcgactgaggcccagccgaagccggccgtggcagagcaagcagggagacggcggcttgtgcgcgggagagaggtggtggagcgaacgggcatgagtgaggacagaggggaaagagagcgtgcttgcgtgcatggccggggcagggtttatataggtgacagggatgtgaggactccccacgcgtgcattgaagaatgctcatcgccatgcgcgtgttggtagggtggtaggcgaggtggcggcgcgacggcacggtgttggtgacggcgcggtgccgtggcggcatggcattggcgaggagggacacgagatggcgtctggcagacggcgccgtgcgtgcggtgccttaccggccaggtccacgggcggttaaggcggcgacggtgatcggcggctaagccccagcggttagggcggtcgttggccaggagcgatgcaagtcgtggcgaggagtcggcacagcgagagtggaaggactggcgatggcagtcgttagcgacacgcgacggcattcgtcggtcgtcagcgagaatcggatggacggagatagctgtagagccggcacggcgatgggcggtggcgcgcgcactactagaaaaacgattttttatggcgttggcctattatttttgctggcggaaaaatgtgaaaaccgccagtaaagtcgtaacgagggggtggggggcaccgcccgccagcgaaaatatgtctatttttgctagcggtcacttaggttcgccgccagcaaaaatagataatcttcattggcggtcaaatttttgctggcggccaacaaatgaaaccgctagggaaaacacccaaaaatacctgtcacatattaaaaccacccacatacctcatcctcttcaccttctctcgtcttcttatccacttctcttctctccttctcactctcctcctccctcccggcctccccaccagcaacggcggcggcggccctggtggcggtgaccggcggcggcggctttggaggtggtgactggcggctccccatgccgccctgccctcccatcccctcctcacccctctcccagatctatccgaggggaggaggccgccgtcggcgtcacaaccgaggggagcacacagcgcggtggagctgacgacacggcgggcggtaggtgtgcacgcgggcggtggcagatctgacgacgacgaccacgaccgcggcgacgacgacgacgacgctgcaggccgtgctaggtgacagaggaggcctgccacggcggcgggcggcggatgtgcacgcggcgcgggtagcacgcgggcggcggcgaatctgacgacgacgaccatgaccgcggcgacgacgacgctgccggccgtgctcggtgacagaggaggcctgccatggcggcgggcggcggatgtgcatgcaccgcggggagcacgcgggcggcggcggatctgacaacgacgaccacgaccgcggtgacaacgacgacgacaaagctgccggccgtgctcggtgacagaggaggccgatgggcggcgccacagcataggggaagcggcggcggcagcactgccctcccctccccctactgtgttttcttgtgtgttcttgtttgtaaagatgtttattaggatatgtgtgttgttaatctgttctgttgatgatgtcaatgttgaatttggattgatgccaatattatgtatttgtgatgctctggatttggattattgtcaaatatgaacggttttgaatttggccaggtggggaattttgaatttggggtaggggattttctagcggttctcaaccgccagcaaaaaatcttttgtccgcttgcgaaaatcgatttttgcaagcggaccgcaaccgctagcgaaaattattttcgcaagcggaacgaaaccgccagtgaaaattttagatcttcattggcctttactttgtggcggctctaaattccgccagcgaaaatcaaaaatggtcgccacgaaagatggttttcgtagtagtgtcggcagcgtgcacccaggattagggggtgttaaggtgggagaaggggagggggaagtcataaacttctttattgggctgcccgagcaagagggaggtaaagtagacttttcccgaggtatttctcaggccgagacagggttcagcagaggggggagaaatagacttttgccggatcaaacaaagcgacataacaacaaggagaagaaaatcgaaatattcggaggagaaaagaaaatgatccaaaattaaatgcaaaacttggcatgatgcaaactaattgtgacaggtttttaataatcggatttttcagggtgttcccagtccctcacgccgccgcaagctccccatctccccgtctccttctctctacgcgaggcagagggcgacggaattggcggcgctcaagctcgagctctcaagcgatgagagtgagttgggtggcacggatccagcctcgtgctcgctggatctgccgtcgttgggctccctttcctctgtcctaggcggcacgggccacaacggcggtgttgcgaccacaacagcggcggcagatcctctccccctcccttcttcgcgagcgtcggcagtgctcctcttcgcgagcgtcgcatcggctggcctctcccatcccacccctttctcgtgacggtgaggggccaccggcagcggcggatctgaccatgagcacctactcgtgaattatacactgcgcatgctcttagtgcctgcgtacaacatagtgcaatcgggataacgtgcaatcagtactagaaaacaacacaccttataggtgcctgtttgcttaaaacctacacctataacacgttttacgtcttttcttggaataaaattaagaaccaatatctataaccactcattggaaccggtttataataaaaaccggcataaatagtcctcaagtaataggtgtcggttccttttaatagaccgacatctgtgaacatcatataggtgccggttcttataataaacatgtaccaatgagtctggtgccataagtaccggtttttattgtgaacctgctgacgaaaaatccgcgctcgcctgatggtgccggaactgtgttggcgcaaactaagttaacgaacacaacggcctagaagatctgtttagctcctgtgcagatccaaaatattaatgagatgcgggagtgccagtcagtttgatcctacaactgacaagatatataaacaacagctcaaacagctggtcggttgtcaagccgatggagtagttccagccgatgctgatactagccaatgtcgatagggtttgagcaattggctatatgtccaatgtagataatgatataaagacaatcggctgaagatagtttaatagaacaaaaatataatccagcagaaaccaatcggctaataatgatatgaatatatgatagaataaacactgatccgaaggttaaagcatacatcggctggaggtccgacgtcataaaatccacaagaatagataagcagtgaaacatttgttgtgatcagttaaaaccaacttgtatgcaatctttgtaagccgatggaatgtccagataacacatcggctgaaaccccaatgaaacccttattataatcaatgataggttagcttttatgattctaagcatgactaggatgatgcgtcgcaaagtatgcgaagaagcataaagtctgaacaatcaagcctttaatataatctagcaaagggatttagtcgatactggcataaacccagaagcgaatctcaaccgatacaagtaaatcgagctaccaaactagattaactaagatatatcataaataggtagataaacataccaaccaaaccagagcgatccaagaggttgaaaacgatgcagccttatacaacaccaatgtagctgatacgattgccagggccggtgcaacgtaggacttaccccttcgctggagatcgaaagccgatgcagtcctgcgtcaagtgccaagttctgccggtaataagtaaaaacctcagtaaagagggtgggatgcaccgagagtaattgtattgatctgtgagataaattgcaatgacaccgggtgtacatatttatactcatgggtagatacttgtccttgttggacaagaattaaactttcataaagataaaaggaaaacataaagttcttattggacattaaacatactttcttaaagataaaatggaactaacaaactcttcctaattaatagataaactgacatgccgcatcctccttgaactcggtctcttctggataaacttcttttaatagattaaattccttaaccgaatataacaagaatccaactattggcgacttgataattctcatcggccgattccaagactctgaagccgatactgactctaggccgatgatgatttcggggcttaccaaatttcactgttaatcacatatgtacctgttcttgataaaaatcggaaaatataatttcataggtttcgattacaattaaaacctacatctatgatgccacggctcgtgtatatgtattttttatctaccttttccatacgaagttggatgaaaataaactttgtatgaaatttttagagttctatgagatctacagctttgttgttaaaaacgttttgattggaggttgtgtgggtatccgaaaatgtatggtaaagtctcagatctatatgaataagtgaatttttaaaatttttgagcgatgtcagatgaataaaaaatctatatgaaagttgtagattttggatgagatctataattctgtaattgacaaaattttcatttgagcttatctatggttttaaatatgaattataagttcggataacagtggtctcaaaagaatagcattttctactgaagacaataattgttctgaggtgtgatgataagtagctttgaatagagacagaggccttgggttcgaatcaagctcggcatatttcatgaatatgggatgaaaaaaatgagaagtgaagtgtgagtgtggtaggtgcctaataaaatgtgaaatatttttctgtatctttttcgcatcttagaaccggcaccaatgaggggtagtaaggtagttggtgccggttttagaaccagaaccaatgactaccctcatagtgccactaaattgatgccgattttgggggtttggaaccagcaccaataaaggttattgaacagtgcaattaatggtacaaatgctgaaacgcaactttagcaacgctactaatcggcattggatcaaaacatacaaggtccatatggaccatattcctaatgaaaaagtacaaatactcctctaaattttagatggaagtccgtctatcaccataaagtttagaaccggatatccaccccctgaattttgtaataccattccctaaggtggttttagatggtgtttttttttcatatttttaaaggttaaattaataactttgaataactaatataatatatttggatatcatcaattgtaagtcatcaatttatacttatacagtgataatttactattattgtgttggtacctgtatgtgaggactaacaacaggtaaaaagaaatatttaggtatatatacgtgtgtgttatgtatatgtcacatgatcaaactcaaccaacttatatataaattagataaaaaccactatgcaaaaaccatcttagggggttatataaactttattgtaaagtttaagggttcaatgtctggtttaaaagttaagggtgttagacagacttttatcctaggtatagatgggtatttgaaatttttcatattcctataacattgttcatcaaaataaaagaggaaagtaatcaagaaactcataaataacaaaactgacttgacagtctatttgccaaatgactattttttttcttttccatcaatcattttttttggcactagattaatatcagcaactcaacttatctgtatttttatcttatggtgaaacaaataatattctaaccttaacgtaatgaaaaatatgatttggtgtaaattctaccagtataaaaggtgcatctaggtgaatcggaaaaaaaaa

SEQ ID NO: 16256 - DNA, 9239 bp, Oryza sativa
gatgctcataggggtaagatgtgtgtatatgttcataagggcgagtgtgcacgtgttatttgcatcttgcatttgtaatgtgtatcaaaaaaagaaatactgctttatgaccgagtagaaggtttaggtgaccgatggattagaaaaaaaaaacaagttaaaccgttagagaactgataaatagcacagttgaatactgcacgagaaaaatcctgtagtaagtatcgtagcgtaaattttaagagggcactgtagtacaggttttttttatcgatgtcttaattctgcaacagtacaggatatgtcctgatggtcaaatttgtagtccttatacttaacaccttgagagtaattttagcacagagctcaaataacgtaatttattcaactatgataaattaaaagtcttctattgattgggccacttgcccatagcaattatattttttatatttctcctcaacgaaggcttttatcttcctctcgtatatatcttaggtgatttggacataaatacaactactccattcatttcatattaataataagatgttttaatatttttttttcaaacttctataactttatcaagtttacatatagaacatatcaatattttcaacacaaaacaaatatactaataaaatttattaaaattaatttggtattgcagatgttgctaaaatttcaataaacttaatcaaatttaaaaagtttgattaaaagttaattaaataatcttctcataatatgacggatggagttagatgtgagtataacgagtcgtggggacgcgcggcgtgggtcgcacgagagccaggtttggtgtgcggacttttcattagtggtcactgtctttcagatttttgtctgtcggctagctctgtttgcggctggatacgtatatcgccggtctgtcttgttgtcctcctgtcctgctccgatacaggcagtggattagtccctcatccagggtgagagatatgcttttgatgttagaatttgtttcttctttccagccggtgggctatatcaacacgactctatttgatgagcgatcactccaagtgattggcaaatgttttatccggagtgcgtccagcggaggtagggatgaaaaccgattgattacggtaagaaactaactctatcatatttattttcataattatttttcagaatcgaaatcaaaatcgaaaaccggatatgaaaataaaaccgaatattatcgaaaacaaatacggaacgaatacgaagcgaaacaaatacggtgacgaatattaatcggaatataaaaacccctcactactacacaaatattttttgttgtacgagaccccataatttttacaaatggaccataacttgccgcgtcggcatttacacatacgactgcttaagacgccaaaataagctcatttttgcatgtggaccactcaagagccctgatgaggacatcactacctcggatacagacaacaatcctccaacggtcattcaaggaccgataacaagagctagtgcgcggcaattaaatttagaggtgagctcgttcctatgttcttctttgtatgaattcgagaatagaggggacaaggaaacacttggagaaggacttagagccatggaggatcatcgaggacgtctaagtcaaggtggagacccaaaccaaatcgacctcgggtgcaattcggagtccagaaccagtctgcattaaaacggaagcccaggtcgcatacgcgctcggattggggcgttctttatatggatggaaagctaagaagataacctttccaatggttttggtcccatgtccaaattcttttcgagtcaatgggaatcgaccgaataagttgacatccagaatctgtcccggtgctacgtcaccgtatttgggcctttgggccgtgtatcgtgttggaacccattagggttgcgtcgagaggggattgtacgaccctaaactctatatatcagtaccagatatccacagatccaaaaactgctctacgcagtgatcattacatgaagaaagctacgacactactttcaagcccacagagtcacggttgtctcctccttccctctcggcgaagttgtgagaaacaaaggcgttgtcggccgcattgcgaaatgggtagtcgagctaagtcagtttgatgtccactttgcaccacgaacagccatcaagtcccaagtacatgctgattttatagctgactggaccatgcctgacaatcaatcagacaactagatcgacaacgaaacatggacaatggcattcgacggtgcactcaacagccaaggagcaggggcaggattcatcttgacatctccctccggagatcaattcaagcacgcaatccacctcaacttcaggacgaccaataacacatccgagtacgaaggactactcgccgggataagaagagcagccgcacttggggtcaaacgactgatcttgaaaggggactccgagctagtcgcgaactaggtacacaaagattataaatgctctaaccccgagttatccaagtacctcgcagaagtcaggaagctggagaaaaggttcgatgggatcgtggttcgacacgtataccgcaaggacaacatcgagccagatgacctagcacgacgtgcgtccaggcgagaaccactcgagcccggcacctttctggacatcctgacaaagccatcagtgaaagaggcaatcggcgagatcaacacagccgtccccgacatcaactcggaggccaaagaggcggaatgcgccatcgccgatatcgagaccacagacgactggcgcaccccactgatcaaattcattaacagcgaagagttgcccgaggacgacgtagaggccgagaaaataacccgtaaagcaaaaatctactgcacgatcggcaacaatctatacaagaaagcgccaaacggagtacttctcaaatgcgtcttgtccgacgacagcagacacctcctcctcgatatacatgaaggcatctgtgggtcacatgccgccggtcgcgcattggtcaggaaagcctttcgacaagggtttttctggccaaccgccctcaaagacgcatgtgacatggtctagtggtgtgaagcctgccaattccacaacaagcacacaaaatcacttgcacaagtgctccagaccatccctcttacttggccgttctcgtgctgggggctagatatactcgggccattccagcgaggacagggcggctacaagttcctattcgtggcgatcgacaaattcaataaatggatcgaagcagttcccacgggggaaatcaaagccgccaacgccatcaagttcatcaagggaatattttgcagatacggactaccgcatcgcatcattactgacaactgctcccagttcatcagcaccgatttccaggattactgcatcgggctgggagtcaaaatatgcttcgcttcgtttcccatcctcaaagtatcggactagtcaagagggcaaacggcatagtactacaagggaccaagacccgtgtctacgacaggctcatgacacatgacaacaaatgggtcgaagaactcccatcagtactatgggccatacgcaccacaccaacaacgtccaacaagaaaacacccttcttcctcgtgtacggctccgaggccatgctccctagtgagctacgacatcagagtacacgagcacagaagtattccgacgaggaacaggaggagcagcgaaacgacgatgtgaatctactcgaggaacatcgcgagcgagttgccgttcgagcagccgcctacctacaagcccttcgccgctaccacgagaagcgcatccgagcccgcatactttcgatcgacgactacgtcctccgaagggttcaaagccaagtagggcgaaacaagctctcacccaaatgggaaggaccatacacgatcacacaagtcttgcgatcaggcgcattcaaaattgcagacggcgatggccacgagttggcaaactcatggaacattgaccaactacgtaaattctatgtatgagtcaataccatccatatctgtaagacaacttacatcatcaataaagcctattttcaggcgcatattacaatcacagtgttcctgcctgatgatccctcactcagacgacacctagcgttgacacctatcctcatgtccctttacgccatgctgacaaggcctccgagaaacctaagggatcttcggctggggacgcccagagccgataaggccttgtcggattttgtagagacgaaagaccatgtcagacctggtcgtgtaagagttctccccatgcgtattaaccaagccgcgtaatcggaaatgaactttccaacttcacggctgggggctaggattagtgcttgttcaaccgaggcaggtcaaaggtctaagagccttgtcccccgagaagaattctccaacggcaaggctgggggctagagagagtgtacaactcaaacgactggccaaagtcggaaactaaggaggcactcttacacactatatccagagtaagaagggctcattaagatagatttcttttctatttcataagatacttcttacaatttcacacaagtccaaaaccatattacacttttccccaagatgtctatcgcagggtgcaaaggctaccaggaaggccaacgctagtccatcgactggaaaactttttccgtcagcggtgccatcgacttcgccaggtcatctatctccgcaggagtcctccgagaacgtgaaaaaccttcccggaggaactcgaggtgcagctgcggacggtgatcccgtatacaggccaacacgtgccccccggcataccggcttgagcggtgacactcctgcttcaaggccccgtcgatgcgtcaaccaatggcttcaagctgagcgcaggccccgttcaaccacgagatgtatctggccgccgattcttcggggtcgccacgaggtactcggagctccctacagaccctcgacatggacgtgcagcaactcttcagatacgagtcgaaccacacctcgcgacccctgagtgcctccacggcctggtcttttttcatctcaaccatcgccctctcgagttatgcgacttcacactttgtcttccaatattggatgcgacggttttggtcagcaagtctaccctcgagatctgctcttccattccgagaacacaaaaatcaagttaccccgggaagaagaataaaagaaatggaaacaaagatcaccaacctaaggaggtcatcgccacacccatttccacgggtgagtttcgtcccatctcgtcctgcgacacaggcgtttggagggcaatcgccggaacgaccactggtaactcggctgcccacgctgctggacatcctcgacatcgacatccctacaaacgacaaccaaaaatactcaggaccagggtgccaacagagatcaaggcagcgattgcgcgaagaaaggcagtcgaagccgacaaatcttatacaaagtgtagtcgattacagaggagctgaggccctactcttcaaagaacgggagaacagactctcccagttcgccaatctcctccatcacacccttacgagcgtcgttggcggccccccgatcaaagatctaccgaagatcgagtttggggtgcgccaaccttacgcacgctaggacgtgacaggccccggtgtaaatcccgtttgacgcctcctccacgatcctggccgcatgtttggagggtatcgcctccattgccgtagccagttccgcaagcgaggacgtcagcgagaactcgtcggggttcgccgggatggttgtcgtgacgccacactccccgacgagctgatgaagaccggtgtaggtgacccgcagcgacccacggatctccgacaagttgttctcgagctccgacatccggacctcgagtccccgccgttgccgttcgttaccggccaccagctccctcattttctggaggtcctcgcgagcctccgccaggtcgtgttacagcttgtcggcacgcttgttcgccgatgacgctgccactgccttcgcctcttgatctcgcaacttatgccgcgagtgccagcctcgaggatgcgcttcatctcagcttgaagctcctcccaggtgaggacatcagccggcggtccacgagtaggtccgaggccgctggatggcccgctcggcatcgcttcacggctctttgacacgaccacgacatcggttgaggccgccgcaggagacgctctggaggcccctccggacctgtcctgcgccgctctcgcctgcgccgacctgcaaaagatcctcacgtccggccctcaaaacaagccgccagaagataaacaaggaaaggatctcgacttccgtttacatacttctcgcctagcgtcaccagctttctctgtcgcggaggtggcggagacgcgtccacggcctgggtaaatcgagcgcgagttgagggcggcacttttcgaatacgaaattaaggagtcaagggacttaccggtggggaggatgctttccggcggctaccgagcacggaggtgaacgttcttcgcattttcgggacacggcttccactagtcgcggcagcagcggccacgtcggacatctcccgagcgacgctctccttcagtgaggccgccgcctggtggtccgcgagcggtccaatgacgtcagtcagagggagagcctacaccacatgaagtcattttccaacccgtgaagcaaaaatagcgaggttgccgaatacactcacgttgattgcggcttcgcgctcggtcgcctccttctcacaaagaggcacggggatgtcgcttgccgttgtcgggccgctaatcatcaattggccgacgcggcactccacggtagcgctactcaagcctgcagatcgagaacagaatttgataaatcaggaagaacatgatcagaagggaatcaatttaactaaaaaggaaaataccccgaggagaaacccgggtcgcgtcctccggcccggaatagtcaaaggctgggtgggctcgagcctggagtggctggatccgcctaccaacgaagtcggtagcgacttcataccccgacaaacctcgtactcggaggtcgtcgatggcatcgatgaagcactggagtgaaggggccaagacaggctttgcggtccaagacgaaattttgtcttgttgttcctcgggaacaacaaagacagggtccgaattctttatctgaagatagaaccacctcgcccgccatttgctacgagaagaagggcactagaacgggatatagcgcgacttcaaaccatcctgaagtcggaacccgacgcatctggacaccctgttggattccatccaacgcaactcatagtaaaagcggaagagatcgaggaagggctctaccccaatgtaggcctcacaaaggtgcggaaaaatactaaggaaggcaatggaattggggttcaagtggagcagagaaaggccgtagaagttcagaaccaatagaagaaattcagaaggtggagggagaaaaccacaaagaatgtaatccttgatcgcaaccatgtgacccaggacaggctggggttcagtacctcctacttctctctccatgactccatgaccgggaagggcgccatcttcctggagcttcttcagcgacgcgttggtggaagtagacgtgccgagatccatcgccgactacagatcgctggaggaagggcggagattgacaagctagggtttttacggaggcggggaagacgagggacgcctggaggttggaaagttttctcacaacaggcggacttcaaaatgaatccccaaaactcccctaaatagacacgcttcgcatggcgcgaatttgaagggaaggagagagagatgcccgccggaattttctgggtctgttacgcgcggcggtttcttggacttcagtttaaattcactcatgaccgttgggcttcacatggtgttcttgattatgtcttgtctctacggtttccacaccgagaacgacatcagcttcgacatcagaagtcgcgattggtcacacgagttcatttaagcagaagtcgggggctactgtcagggttacgggttagggataccccttacccttcgatatatctcacgtatcgatatggcatgcccgcgcatacatggacactctctgtatgagttaaggaaatccttcgcggaattggcagacgaaaagagacctactcggacaaggctaggttctcaacgtatcgtgtacggttcgacgtctccgagtcctgcttggagattgcttgacccgcgatataaaagggaccccctgggagaacctggggggacggaatctctcacagccaacaccactgccacagtctacgaagtcagagcccgcggaagccagatcgccgggaggtctagtcggattaactcgattacgatctcgtcggtttcatcgagttccatcgttccctttgtaacctgtgatttccatgatataatcccataccaactgcattagggctattacctatcaaggggcctgaaccagtataattttcgtcttctgtttgcttgatgtcgtattacgtggacccttgtatcaacgtaccccaatactctctatatccggtctacaggtatcacccgtcgacaccgccatctttaggtttttgggttttgcttagattattctgtcaagaacagtttcgccgctagatcggtttgtagaaccccaaatttgtgtgcttaatcgttcatatgcaatttggttgcaatatatcttgttcttgcttgtgttcttcgattcgcatgcagggattagccttctcggcgaggtcaaccggatttcggcacggttgataaccagaggagacgtggtactgcgattgcggggctcagtagcgtgttcgttcagaagccagatcgagttgtgtcgtgactctgcccaaatcgactgttgatcaatacctatcggtagatcgggacctaactccctcatcaagcccgcatggaaaaatgaaattttccatacgggcatcttaaggagccgtatgcgaaaataaaatttaaaaatttgaaactagtttattgtagacccccgattttggaaatcggaaatcttctgtgtttatccgtaccaatccctggatcagtagttggtacacacatacatagttggatcacaacatatcacgaatgaattcaggctaaaagggttaaatacttacattagggccaggtaggccaacaact

SEQ ID NO: 16257 - DNA, 1181 bp, Oryza sativa
  unsure (1)..(1181): unsure at all n locations
catacctttggttccaagagcttggacgcatagtgaataaaggtcgggttgaaggggcgcagtcagctggcagcttcttggccggcatcatcaaatgataaagtcttggataagaatctacaacgcagtggaacgcccttgttgacgattctatactacgacggcatctagggctcctcgaataatgcgatatcccacaccgagtaaatccttaacccttcctcctcttactaatactacataatgttcttgtaaattatggccaataccaggtatataagcagcgatttcaaatcctacggttaattgtactctggcaattttccgtaaggcatagttgggtttttttggggttatagtggaaaagtcgacagataagtctcccttcctgtccctctacagaactatacatgagatttccacctcatacggctcctcgttcaattctttcgaagagatccttttcctcgttcgagagtctccgcccgaccaacctcgctaacttgcgggacatgaacttacatgtttccaggcaggtaacgtatagtaaggcatgcagcctctgccttacttcctagcaatgtattttctaacgaggannnnnnnnnnnnnnnnnnnnnnnnnngaccgggggggggggggggcatttagactgagtgtctctacctggggtgggtttaaccccctctaggaaaactagagcctataccggttgctatctaatctttcatgacgtgaaattgaactaccaaaaccattaaaaaatgctttgccgacggcactgtctagaatggctcgtggtcaaagatgataattaattgcgtgcaagtaaactaacgtcgttcgttcggcgaccccgcctcacttcacttaacagaaagggggcctattgagaattacgagatttactgcttacacgggatttatggacaaaagttaagcaagagtacttcactgaaaaagcaaaaaattcactggtaccgctttactactcatgattggtacagccttttcttttcctgtattaactcgccaatcaacgaaaatgggcactacgaaagctgtttagtcaatcctgcacaaaaataacgagcgagtaactcacactatttcggcgtaggcctcccaaaaggtaacggaggcgtgcaaaggtttgaaaaaaaatgaaaactgctactaga

SEQ ID NO: 16258 - DNA, 3482 bp, Oryza sativa
gggatccccctcctcatcgcgatcagccatctgtgcatacaaaaaatatttgttaggtctataggtcatattcgctaagcgtaatattaaaactctactaatcttatattaaatctctaataatcttatattaaaattgtagtaatcatatatgctaagtctaacaatcttatattaaaactctaataatcttatattaaaattataataatcatatgctaagtctaacaattttaaattaaatcgctactaatcttatattaaaattgtaataatcatatatatatatatatatatatatatatatatatatatatatatatatatatatatatgctaagtctaacaatcttatattaaatcgctactaatcttatattaaaattgtaataatcatatatgctaagtctaacaatcttatattaaatctctactaatcttatattaaatctctactaatcttatattaaaattgtaataatcatatatgctaattctaacaatcttatattcaaactctaataatcttatattaaaattgtaataatcatatatgctaagtctaacaatcttatattcaaactctaataatcttatattaaaattgtaataatcatatatgctaagtctaacaatcttatattaaatcactactaatctttgtcacgcccggaaatgtcacgcccggaaattcactagtaatttccgaccttatttgtgcataaaatcctcgtccaggaatcagccgaggtacacaaactgacaatttaatatacaaatccatcataataataacgttacacacttacaaaagaaaagaaaacagcagcggaataacggtctagcgatggcttcagctccattcccacaggcagctcaactggggtataagccaaacgtcttctccttctggatcctttttcttcaactgaggttcatttattattgcaagaatgagcatatgacatactcaacaagccacacagcaaatatgcaagtgcacaaggataccaaaggatggcataatataggctcatttgcaaaagcagcatttagcaaaacatttaagagaagtaaaacagtggagtaattaatcagaaattttaatcaacactgaacaacacacccatgctgcacaggcccaaccatcctgaacaaccatacccggctgtacagatctaactccaaaccaggagctaaacaaattattaccagttatagcatcaataattattgtgagaggtgtgagactaatcacgaaaaacattgctcaacccgcccataaccgcgggcacggctattcgaatagttttactctggccagaggtgtaccactgtacccacaagacacagcctcaacatcatgtctaccatgcgtcgcgatactggaaagtacccgaatagaggctgtgacaataccctctgcacaacacaactcaccacagtgcaccattcctggatcataatcacccccttataaaacaaggcatggactccccagcgacccccgtgggcttatctccgccacttctcagtctggtgctccgcaatgaatcatgttatacaaaaggtaaagccgttgcccacgctggcttgtggttggcacggttaatgtttcacaacagtagctcgcgaaccggtccttaattgccatgagcacgactctcaaaaccatgtgctcacaacccaccattatcaagttttagttggcaagtaattaattaaccaatcacgattgaccatcgtgaactatcattaagccatcattaaataatagtgagtcataagttatcccaatagtgtgctaatgtttctaagcatggctaagcaatcatatctaatatctagctgaaccaatatataaagcccaactagtcaagttataataacccaaggtatcaaggaataaagtaatcaatgcaaattggccataacaaaggaacagattcacaccacccagtgacattcgaaaataaatgcacagttgaaataaatagagaatttaaatataggatcaacatgctcaaaggattgtgtttagaatctgtgtgacttgccttgcaataattggtcttcaattaatcttcttgaatacttccggcgcactcacgaaccttcgcaacgacggaaacgacaagctaacacgcaaaacgaagaaaaagactaataaaaaccaaataaacagtacatataaagtaaacaaacatgtagatctcgattttagatgaatttagcaacttgaaccactcaaaaccgagttacgatgatttagttatgaatttccgaagatttaatctattagaaaaacaggaaaaagaaaaacgatgatgacgtcatgatgacctcatcaatggccggaccaagatggcgacctcgccggagattggatggtcggctgcgactttggaggacatgtacacgtagaggacgacgagacgaacccaacggtactcaccctcgaaccaaacgacgaacgacgacggccggcgacgaggtctagcggcggcgcggcttcggtcgacggcggcgacggggctccggtgaccggcgacagcggggagagagcggccgagcttgcccacacctcggcgcacattacggcggtgacggcgaccggcggcgacgactgaggcggcggcgcgacgcggatggagctcggccggcgacaacggcggggtggagcacgtggcggcggcgctacgaggcacgggagagggggcaaacgaaagaggaggactagggggtcctatttatagccatgggaggccgggatcgagcccacaacgacgggaaaaactcaggaaagtttagatcttcgccggaaaaaggaaaggttgaaccgcgaaattggaaaggatttccatataaacttttggggatttcttggggacaaggaagaggagattgagaggattccattcccgcaaccaattcggaaaaaggagcaacgatgaggttggattttggaaggggatcggcggcaacaggcacggcacggctcggctatggctctggctctgtccagagctggaagatgaacagtagcgcagggagagaaagtagacttctttccgggcttttcttttctcagcctgattagaagagggagcaaaacaggactttggctgagagaagaagagaggatgcaggctcgggttgggccggcggaagagagaggaaggaaaggaatgggccgattcagcctaagacaagggaggagaattttattactttcccaattaaaataatcacttaaatgatctttgaattgttaaaaatacttccaatgctcaaataatttcaagaaaaatcctgaaaatacttggacactcaaagtacttaacaaaattacaattagaccatttaatgattagtttaatatgtgggtaattactgaaatgctctttgtatgattaaaaattaggaattgagctccgaaaaatccgagaatattccagagagtataattaaccatggagaat

SEQ ID NO: 16259 - DNA, 642 bp, Oryza sativa
gataggaggatgctagggtcaatcgtcaccgtgaaagggggttgcccatcaaactgatcgtaatcctcgtcagtcttgtactctactccgatgatttttctttttcctgggagaaccacgtggcgcttcggctcgtcaggccctttgccctttcttcctttgctagacatgtccttgacgtaaaaaacttgcgttacatcattggcaaggacaaaaggttcgtccgagtatccaaccttgttaaggtcaaccgttgtcatcccactgtcatcaatcgttacgcctccaccagtcaacctaacccattggcaccggaacagagggaccttgagaggtccatagtcaagttcccatatgtcctcgatggcaccgtaatacgtgccagttgtaccatcgtgtcccatggcatcgatacgaacagcactgttctggctcgtgctcttcatgtcttgggctctcgtgtagaatgtgtacccattgatttcatatccctggaatgtcgcgatcgagctagatggtcccctcgccaggaaggccggttgttggttaatcgtctcgttacccatgagatgttgtcgcagccacgcggagaaagtatcaatgtgatactgtgtaatccatgcgtcggactggccgatgttt

SEQ ID NO: 16260 - DNA, 1596 bp, Oryza sativa
ccaagaagctgccagctgactgcgccccttcaacccgacctttattcactatgcgtccaagctcttggaaccaaaggtatgtatgagcattctgggaaggtcgcaagaagccggttttagaaggtttggagcaatcgcaatttatcatcatattattacccgtttcaattgatgactggctaatatataagtgttccatcacaaattatttttggttcctcaattacagcttattctttttttcgaggagaagggaatatattactcaactaaagagtcctcacaaacaaaatgtgagatgaaattacatttatcatccggtcaaaactcagtaagagattcacaccgggctctgttagctagagtatggctaacattattctgattttgctgaatcttcgcgatgatcacttccatgtttcctgataacagttcttctatgtccctgacaatgaatgcaagttcagagcgccctttcatcgcagattagatgaggttcttctccaccaaacaatcagtctccactataattggaaggagtgtccactgaagaaccaagttaataccttccctataggcaaggagttctgcctccaacggactgctgcaccggtcaagaaaaccacaagcaaaaaaaaaaaaattaccatccccatactgttctttgactactgaatcgagatccatatattatttgtttcatgctggacatgtggactcgagaatattatctccgggatcagatcagataataattttgtgcattttgccttatcgtgacttatatcttggacgtgcgtgctgtaaattgttaaactactacgagtcatggtgtttttttaagggtttgctgccagcttccacagatgatacggatcggatgctattaatatgttggaaactactaccgccgggcgcccgattgggggtgggaaaaaaactattttttctcttaaattatttatccaaatcatgatccgattgcaccattaaatttgttgcaattaaatatttaaaacaagactacacatggatatattccgatgaaaaaattagcttattattgaaatatttttaaatattgcacgttgttccaccaagtagatcagaattgtttcactgagtagatcgaaaatgtttcaatcgtttaaatcgagcgttgtttcaccttatataaaaataatatttcagcaaatagcgaaagaatgttttaagtccctgcaatatttgatccatacatagtgaaacattataagtacactaggtgaaacattttttgtggaacaaaaaataaaacgaattcccttaatagagggtttccataatatgtgggtgatttgttgcaaaagaatgttttaattcactgcagtattagatctatatatatatagtgaaaaattatgattacactaggtgaaactttttggtggaaaaaaaatgaaacgaattcccttaatagagggtttttaaaatatgtgggtgatttattaccctcctcccatccattccaaccgagcgaccgattgctgatggtccttatcgatcagtctcgaccgtcaatattactaaaattggagagaactggtgatgcctgca

SEQ ID NO: 16261 - DNA, 5669 bp, Oryza sativa
acacgcatgcaggcaccacaccaacatgatcaaatccaatttcccaatctccattcttgattgggagtaagcagtccactccaacagacacaattttatacattcacacacagtgcttcgttgttttatatacatatagttgcaaatatcccagtttcttccacactattgcttgtcaaccccagtagtgctaccaatggcgtcggctttgttcctttggctttcatggcttgtgctctccctcctctccatctacctcctcgatctcctcgcacactcccgccgccgcctcccgccgggaccccgccctctcccgctcatcggcagcctccacctgctcggcgaccagccacaccgctcgctcgccggcctcgccaagacgtacggcccgctcatgtcgctccgcctgggcgcggtcaccacggtggtcgtctcctcgccggacgtcgcccgcgagttcctgcagaagcacgacgccgtcttcgccacccggtccgcccccgacgccgccggtgaccacacaaggaactccgtcccgtggcttcccccggggccgcggtggcgcgagctccgcaagatcatggcgacggagctgttagcgacgcaccggctcgatgcgctccacgagctccggcaggagaaggtgtcggagctggtggaccacgtcgcgaggctggcgcgcgacggcgcggcggtggacgtcggccgcgtggcgttcaccaccagcctgaacctcctctcgcgcaccatcttctcgcgcgacctgaccagcctcgacgaccgtggcgcgtccaaggagttccagcaggtggtcacggacatcatgggggcggccggaagccccaacctgtcggacttcttcccggcgctcgccgccgccgacctgcagggctggcgccggcggctggccgggctgttcgagcggctgcaccgggtgttcgacgcagagatcgagcatcgcaggcgtgtcgccggagaggagcatgggaaggtgaaggacgactttctgagggtgctcctgaggctcgccgcccgcgacgacgacacggcggggctcgacgacgacacgctccggtcagttttcacggtaaggacatgctccctctgaccaaaatataaaaacctcgattttctagtgaatctgaataatctatccaaaataatggtaaatgtcttgtagaattttaggttcttatattttaccacgaagagagggttcagctttttcacatgctgaaacgtctagcgagttccattgtagctactgtaggtaaacagaaacagcaatagttaaattaggtttgctgtcaatgtcgcatacttccgttttttaacccatattgttgttaacttatcgttgttgaatttagttccacgtcggtaattgataatgggatagcacaacttaaaaagtgagggcagtaattatccaagactagtctcactagtactagagaaacaattttcctgaatgagctatttagtttacagacgaacccttaagaagcctgtaggtgaaaatcgcatgccaaaataaaccgattttcttatttttgcatgcgggcattgttggcctcttaaaaatatacttacaagtcaatccttcatcctcttttccctcctctacacttcaaaattcaaaatttcatcctctttttcctcctcaacacttcaaaattcaaaatttcaccttgcgggcctcttgaaaacatgcctacaagtctatccttcctccacttatccctcctcgacacctcaaaattttatctcatccacccatccacgtcattatcctttctatcctctctctcactctctatcctcttccactctctcacctctctctcccgcggccggcgtgggcgcggccagcggcaccgcgcggcttggcggcgtccttagcggcagcgaccgagagcggtgagctcggcagcgtgtgcgcgccgctgcggacgaccgcccctcacctgaatccagtagaggccgctgccccacgccccgatctggcggcgacggtcgtcccccgcccggatccgaaggcggtggcggcctcagcggcatgcgcgcggcggcgaccgagagcggcgggttcagcggcgcgtgcgcgcagcggcggcggtggtggcgggcgggcaggctcggacggtggggaggcaccggatccggctaccgcgacggcgacggcgacgatgacgatgacggagaccgcgatggcgacgacgacggcgaccgtgaggagggttttctttttttggatattttttttggttttttatttttgcgtgcgggcgacataaccaccccgcacgcgaaaatcgcgtgcgggtgcgccacccacacgtaaaaatagtgattttaaagacacttggttccagacagttggaagatccgcacgcgaaaatcacttttgaccgcacagaagaatcatttctctactagtgtgtttagggctgtataggtccaggacctaaagttgtgactccggttggtcctatggtagatcaggcccaatgtgacctggatggcccacggttggtgggccaggctacgcactctaataagtggtatcatagctcaggtttggaatccgcaatgatttctatgggtcacatgggttgatgtgacggaaaagattgttgacaaaagtatgatatttacacaaatatcagatggctacctcctcgtgtgcaaagtagagttttcacaaagtttggaatccgcaatgatttctatgggtcacatgggttgattgacggaagagattattgacaaaagtatgatatttacacaaatatcggacggctacctcctcatgtgcaaagtagagctttcacacgattattacgcgggtaatgctgcaggtggcttatctattctattttcctttctcttctctctcttttaaccactttttaaaaaaaaattagacaatttttccttctaaattaattatacgattcatgattcaatttcatcattacgttcgtcataactaaatctttataaattgattctgcttgattatatttatgagaaaatatataatatgattacagatctaatttaaacatttttatattatacacgaaacaatgagatgtaaatgttggaatattagaaaatactcaatgaaacattcaaagtacaatacgtgcaatatttctgaataaataagtaaaacattagaaaataatgaaacatccgatgacactacatgcaccattaacaaataaactattgaaacatcacaaaataattattgaaacattaaaaaacacacccggtgtgacatttaaaatagatccattataacacaaaacttaaaagatgcagcatagtcaaattctaattgtaacatttatttctcacacgtcaaacttttgttggagaaaagaacggtacaggtacaactgcactgaacccgtcccccaatttcttcttgtaaatacatatagttgcaaatatcccagtttcttccccagtactgcaatggcggctttgtttctttggctttcatggcttgtgctctctccctcctctccgtctacctcctcgacctcctcgcacaatcccgccgccgcctcccgccgggaccccaccctctcccgctcatcggcagcctccacttgctcggcgaccagccacaccgctcgctcgccggcctcgccaagacgtatggcccgctcatgtcgctccgcctgggcgcggtcaccacggtggtcgtctcctcgccggacgtcgcacgcgagttcctgcagaagcacgacgccgtcttcgccacccggtccgcccccgacgcctccggtgaccacgccaggaactccgtcgccttgctgcccaactcgccgcggtggcgcgagctccgcaagatcatggcgacggagctgttctcaacgagccggctcgacgcgctccatgagctccggcaggagaaggtggtggagctggtggaccacgtcgcgcggctggcgcgcgagggcgcggcggtggacgtcggccgcgtggcgttcaccacgagcctgaacctcctctcccacaccatcttctcacgcgacctgaccagcctcgacgaccatggcgcgtccaaggagttccagcaggtggtcacggacatcatgggggcagccggaagccccaacctatcggacttcttcccggcgctcgccgccgccgacctgcagggctggcgccggcggctggccgggctgttcgagcggctgcgccgggtgttcgacgcagagatcgaacatcgcaggcgtgtcgtcggaaaggagcatgggaaggtgaaggacgactttctgagggtgctcctgaggctcgccgcgcgcgatgacgacacggcaggcctccacgacgacgcgctccagtcaattttcacggtaaggacatactccctccgtcccataaaaccccattcctaccatctgtggcgaatccaggcctatttcgtggagtcgactgacccacaactttttaaaaaacatcgtataaactttgattttcatgtataaattcaaaagaatttagagaaatgaccccacttaaatacgaatcattagtaattaacccagaagcttaaatttttagctccgccactacctaccatctcaagaagagattagtgaagagtaaaaaattaaccaaaatacgtctcattattgaaaaaagtagtaatgttgatggtagataaagggtatttaagggagaaaatttctcgtcttatgtgccgaggttagatagaatattagaagttggtttttttgaataaaattcaaatttcagaagttgagttattttaatggaggaagtacatggtatttcctctgtccaaaatataaaagcctcgatttttttagtgaatctaaataatctatcgaaattaatggtaaatgtctcatcgaattttatgacgaagagggtgttcagctttttatgtgctgaaacgtctggcgagttccattatagctagtgtaggcaaccacaaacagcaatagttaaattaggtttgctgtcgatgtcgcatactccgttcggttttattttaattgacattttggacaatgatacggtctacaaagataatatatctttgaccttatttttctattataatatatacaataaataaatgcatgtataattttattatagtgttttgaaagacaaatctatatatgttgttctagtttttttaaacaaaatatttttaaagttattgatggtcaaagttataaaagtttgacctcaaccttgtccaaagcgtcaattattatagaatcggagggaatactcgttccttttttagccgatactgttgttaacttattattgggtttagtcccgcatcgataattaatgatgatgaagcataacataaaagatagggggtagtccttacctatcagatagtcttttgggctgtgtaggtccagaacttaaagttatggctttgattgggtctgtggtggaacaggacgatcatacatcaccagtccttaactttttcaaatcgttcaatttacatcccttagttcaacatcttagttctaagaaatacgcatgtagctcggaaatcttaattcgttatctcttcaatattatagactataggagatagcttagagcttaaacacaatcatttatacaaagcatataatgggcctgttcgg

SEQ ID NO: 16262 - DNA, 1232 bp, Oryza sativa
ttagctcttctttgatgattccctgcatcatgcctctattccggtatgacttgctgagtacagtgggtagtactcagtcttgctctaattttcccaaccccagagcacgagtatgtgtcagacgaaggtttctccgaggagtaggcttcgtccgtgccgtcgaggatgcctgtggagtggtgttcccgctgcagttctagtcaaggcttagcttctgttgtctttctttctttccgctgcatttatgtaagacttttatgatgtttgtaagacgtggatctgaatgtcaacattgtcgtctgtgtaccccggccggtcctggacggggattttaatgcacattctgcttggaattctattcgggaatttctgggcgtggcaagttggtatcagagccgaccttgaccgtaggacaagccaaatggaaaaacctaagagccctctgaatccttttcattgcatatgttctttgcaattggatttgttccgggaaaattgggatctgttcttgtggttcaagggaaaaatcttggtcgctcgtttaagtgagatttgtcaaaaacaagtcagtccagggttttagtaaaactgttgagatttattcgtcagtcagttgggatttgatgggtgaaatgcattaggtcctagctcaagaacatgggtagcaaggtatttatgctcttattgttattattagtatgtatctaatttccccattattttatcgttatgtgagtctgtcttatttattcgctctcatgcaaaatgatctatgcataaaatttcgctcttattcgattcgcttatttgagtcttttattgctttatttaaatttggatttgagcatgcattgatcctactcctttgtcttctctagatggccggccactcacccaaccaccgtggagaaggcatgatcgactttgtggcagagttggcacgtatgacactggtggtgggctaccccaacgcgccagagtacacgacggttccaccgctcagtggcgagcttcctcaccgtgttcgcttggaggtccacggctacgtgggtacctgcctagctaatatggtggttgaggcatctggaggcacagcagatcacgcctgtcaggaggcagcatacctgatgatggccagactacgggagcgccacaactacatcttccacgacacggcgtaccgatttcaccctcgtcgagccagtggtgatgatgtcagtacctttcgtccg

SEQ ID NO: 16263 - DNA, 2730 bp, Oryza sativa
cttccgtatgtctccttcaaatagaaacccctataatcgcagctactgggatgagggcctgtttagatttcttggcaaaattttacaccctatcacatcgaatgtttggacacatgcatggagtattaaatataaatgaaaaaaaaaactaattacacatattgcgtgtaaattgcgagacgaatcttttaagcctaattacgtcatgatttgacaatgtggtggtacagtaaatatttgctaatgacggattaattaggcttaataaatttgtctcgcggtttataggcggattctgcaattagttttgttattagactatgtttaatacttcaaatatatgtccgtacattcaatgttacaagctaaaactttagcagcatatgccatgctagccttcgtactactactttgtaaggaatttttttttcagattagagtttctatctagactctattttgggcctgttcactttgatgccattttcaaccttaccaaattttagtaaagttaccaaaaatatggctacatttaatttgctgccaaattttgttaactatataagaaatccttaccaggttttttttagcatcaaatttaacaggcgcttggatactgaaagattggaattcagttttctaccctttgcgaatttgcgaatcagaacagcaaaaacctaagcaaaccctagctccggcgatgcctcccgctgccgccgcggaggcggagatctccccgccgcccccggcggccgacgggggggccatagcggatacggcggaggctggtgtcgcggctgagaaggagagtgacgggatgaaggtggaggatcgcggcgaggtggtctcccaggaggccacggcggtgaagccggatgaggcggaggagcccgaggaggatcctgaggaagtcggcgagggggccgaggaggcgccggcggcgggtcctggagacgtcgcggccgccgcggctgagtcggggcccgtcgcgatggaggccggtgatggggagccggcgctggaggtggccattactgcccatgagccggtggaagaggagcccaaggatgtaatggagacgggcgaggaagcaatagagccggaggaggatgaggaaccagaagaggcagaggtagaggaggatgaggaaccagaagagttggagatggaggaggaggaacctgaagatgcagattcagaggagtcgatggaggaggaggcaggctcagaggtctctgaagaagaagctgcggcggatggtacgtagaacctatgcattttgattgtgtagtttcttaatttcttagtgcaatggtaacttctatttggtagaatcggcaaagacagggagaggcagagggaggcctggcctcccctaaccgaataatatttgtcgagtagctgctaagcactcttgtaatttatatatggtgtctaattgctgcgtgttagactttacatgccaatatgctagtctgcaaaaagcattgaggcctggcctcccaaccgaataatatctgtcgagtacctgctaagcactcctataattatatatggtgattaattgctgcgcgttagattttacatgccaatatgctagtctgcaacaaacaatccatccctaaaaaaagaaaaaaacaatgaaagaatcttaaagcggaattgctaggcctcttggctgttactaagtaattcattatctgataaaaaagcaaaagcatgaacttagcctctaatatccatttatttgtaaccacagatttacctcgccactataatttcgattcctaaaatcttagcatgttatatactccatcggtctcaaaataagttatttctggagttcaaaatttgtcccaaaatatgctgatttctatccatatttttatactgggtccacaaatagggcatttctatctattcaataccatttacctacctaccgtattaattctcttcatactaatttgaatcccgattgataggaatcaatttattatgagaccaagggagtacatcttgtgttccgccggtgataaatggtagacgaaaaatactatattgtccaaatatagatatgttgatatgatttgttatccatggaaaatgattgaaatttccatgtattgtcatgctaaatttctactatcatcgtcagtcggtatgtaaggaatgttgccccctgcatgtttaaatcctggctctgccactgactcgtagttggaactgataaggttgaggggctattcagttgaatgaacaagattttgatgcgtactgcatgaatattcggatacttgttggatggtaccaactagtctttacttttaaaattacagatttatttgcttattgagagggaacagttgagtcaaaagggctgtaatgctgtatggtgtgaaaacagctgcttgctaatttatctttgcccaatatcaacattttgtcagcctgttacacaaggttggtttccggccaaaacctcaagtgttatctgaaaccatatcttatgatggctaaacccttcagttttgttttatttgttcagtaataccacatgttagaatctaatttgaggtgcaaatagtagcaggggtctctactgactatatttttttatagatattaaaatctctttaactaatttcaaagattattatgctgagatgagcattatgtacgagaatatttctatttcattgtttcttgtgccctaccttctatgtccaa

SEQ ID NO: 16264 - DNA, 1564 bp, Oryza sativa
tgctatatgccatgatgcttttatttgatttaaagaaactttgttttgatatgtgatggatattttttcttacttgcatttgtttccatgatgcagggacagtatagcgatattggaaccaaggactatacatctaaattatcagtgtactgaggttcatgatagtgctctgctgaagaatgtggagattattgcaaaaagactcactaatgcatccgtgatttaaggtacttctggtagcattggagtctataaaatttccctacacatctttgatttaaaatattttgctttatgcatgtgtatagaattggagcctttctcaacaataatataagcttatgaacatgaaattctgaaagatcatcaagatatatctttcttaatctaaagagttatgatgatcaggtcaatttttttttcagaattaagtttagttgcatggctaaattggaacctattgtacttgctatgccccgttgtaatgctttggaatttttaagagctccatactgatgtctgctgatctggattggtataagtgttggctatgacattgttttcaggcaattggcaatgtcgtgctgcattgtgaaccttcttcttatcaccctttgatgggttggaggtatagaatcgagatgattgccaaaaatattccggtaattactgccaataaataagaataaaagcagagcggacataaggtaaaaagaaagcagaaagacattcatctagtcgtgttgtatttacttggtttttagagcatgataaacattaaggttcttagagcatgataaaaaattgcaataattaaacgatggttcatctgtctgcacagttaatgtttttctgcataaaattgctcttgctgcaattaccaatactttttctttcttctagtaatatataaagccacttaaaaaagagattttcatgtttgggtttgcaactcctagattttgtggtggtatgttatgaaaatagccgctgagcaactgaaatgaaaatatgcctgttgctaacttgctatatgtttctgcatggacagaaaaaagaccttgggtagttttattcaatattaatcttataaatctaatgaaattgaaattgcattcagggttgagttcattgataacctggaatcgacattaattggaggtggcttgacatcctagaggaagaagagccttgtgatctatatcttcttgtgcgcttctattatttgtattgcctgtaatcatatttgtgtattttgtcctgcgagaaaaatctataaaatcacgttagtgggagtgctagctaaatatagcggaaacaaaagcgggatagaatctgactcgggatagaatcgggatagaatctaactcctgacttgggctgcgcaaacaggagcaggaaaaggtgtgggcgaaccaacctgactcgtatgcgatattgttttcttgcgtgaacctggtaaacctggactctgtttttttgtatgtatattttgtgtgtgaactggactcctgtgttttttgtgcgtgaacctggactactgtgtttctgtgcgtgaacatgg

SEQ ID NO: 16265 - DNA, 1977 bp, Oryza sativa
ttaattgtcataaacaactcagaatcatgtagatttcggacttggacatgaatgtctccgtctattttgtctttagaatgaaaaacattacttcctccatttcaaattacttgttttaactctatcctaagccaattttcttttattttgcttatctttcttatctgtggtatttatttgctaggcttttgtaatgctatcctggactcttagatttgaaggtacctcctcaggctgaactgtggagatcatgggtaccacatatccactcagcctacgtatccaattggaaataggaggtgggttggacccatagcattatgtaatggtcttgggcttgagaataatgttggcttgtatcatgcggcatagcccataggttttgttaggttatcatataatagattagaaaactgatgccgtgttcaaataggtttcttctctgtaaatctaccccgaacctatacaagtgagcaaggagctctccgaggacataaccataactcgatcgccaaatcaatacaacatccggcggatacaatcctcaaataggagtagggtattacctcattgagagtgcctgaacatgtctaaatccttatcttctttattcatccacttttagatctcgtgcgctgctcccttttgttattgccgatctctatttccaatttttcttttcttaaaatcatgtggataaggtttaaatgggcctttaagaacatatgctctccgaactgcatcttgatcattgacaagataacttacaatgggtagtctttcctcttgatcatgtggaaggctgtcaatgtcataaaccggcggcggtggtggtgagacatcttctcaacgtcttgttcctgagtgtgctcctataccacaactggggaagaaggcaatttagaactatttttctttgctgcatgtttcaacaattagcgatctacaatatagcggagagtggactcgtagtctcgtcacgctagccactcggcttcgcgagcggtggccggtgataggcgggtggcggcggcagccggcgctcgtggagtcgcagtcctccgtcctctgctcctctccacatggacttgctgttgcaaatgcgggtggcaggaggcagcgcgaaaaacgagtagtcaagtgaggagaggacgcgtagcaatcgtgtgatgctgcgcgcgacgtttcggtttccaattccaggttcatgcgctttttttctattattttttctatatatagttgggtcggttgccttattttttgtgtggtcccaccgggaccaccccacagattggtaaacctaggccgtctgttacaccactgcccagaggtggattaggccgaacgcacggcgttcccaagggctatgagcggatggcagcctagaaatccctaggggggggggacatagtggatcctgcccgctgacaggattagctagcatctgatctactcaacaatgtggtagtagcacagcaactagggcttagaccatcatgggtgtttgcacggttctcttggttttgtccctctatcatactatataaagggccgagggttccccatgaaggggttgaaaacatttgaagacagactctcgagttatgtaggaaaaatgatttgggtttgtatatccctagtttattcaatccaaaaaaaggaaatgtaggagtaggattgttatcctcagggaggcccgaaactgggtagaaacttgtgagttttgcatgatctagaggagagcaagcaaatcaaagcctcaaacccactccaccaaacactggtttcactagattttgtactgtcaggcacagttcgtcgacactgttgctgcactaattgtatcaagttgggaagaagttgtactcgtaatatgatttctgttggatgcaggtcagtgaacctttcgacctgcctgccgaagcaccaaggaaccagagaaccagcatggagcagagcaaagagaggataagc

SEQ ID NO: 16266 - DNA, 3382 bp, Oryza sativa
aatcctgccctccatcctatataaggtgggcaggaggccctctagggggcatgagcacatatgatcgtcagatctatactacacctggcggattcaaatccctaaacaggagtagggtattacttctcatcgagagggcctgaacctgtctaaatcctttgtctccgcatccatccacttttaggtctcgtgtgctaccccttttattattgctgaattcatgtttcaacaatcgatatcatatttttcttttaatcgccgaatatccgaaacattaccagtcttaaccaatgtcgcagtcatgagtgatacatattattttattcggtacatgattctagtgaccactctgtcgattatgagatgaggggtgattgtgcggaaaactaagttaattgactatctcagtgatctagattaacagctggacaatcacaagctaaatatataaaaaaaaggtatgctgtaggattggatcgatcaatatcgagttatatactccctcctttcctaaatgtttaacgccattgactttttaaacatgtttgactgttcgtcttattcaaaaacttttgtgaaatgtgtaaaactatatgtatacgtaaaagtatacttaacaataaatcaaatgataggaaaagaattaataattacctaaattttttgaataagatgaacggtcaaatattttttaaaaagtcaacggcgtcaaatattttgagatggagggagtattaagatatgtaaactccacagcactagttgattctcctgaaactcattaatttgaaagggaagattaagctcaatgcaggagtgcagtgattgtgcagaaaaaataatttaacaaccccaagccagctatgtttggactacaatgatagctcgacgatcgcaagctgcatatgaaaatacgaattaatgctgaaatatttgggtacggtatcgcattctaaactagtttgctctacaatattatatgttagtatttattaattacatactctaatctatagtctatcgtgaaaataagatactatatatattgaacatggcagggatatttttcctgttatctaaaaataataacgcgcgatgcaatggaattaatcatgatagcagccaggtacgtagcagctccttctaatataataaagctcgtgtaaagattttgctcatttgatactttgcacgatgttagaggacatgaagtggaaaaagggtccttgatccagaccacagtagctgtggattgaatggcagacccaactttaattgtaaatttagagtttggaagatatgtcttttatagttctcttaatgtatgattttgttcatggccatgtgatcagggtgttactacatatattatggtattgagttatatatatatattatatgtggtctatagaagaaaaatatttctatttcatttcattaaacccacggaacatgtgacgattttttgagaatttctctaagccatttactaatgcagatagagttcgtggctacctagtgctaggtagctgatatgcttagtataaaaacacagagacagcagcaagaggctccatccatagacgcatcacataatcttctatctctctcaggctaactaatttcataagcacacatcttccatttccatcaccatgcctggagcagctaccaccgccgccgttgttgacagccgccgtagcgcacagcgcgcggaaggccccgccaccatcatcgccatcggcactgcaaacccagctaatattgttcctcaggataactttgccgactactacttcggcctaaccaagagcgagcatcttactgaacttaaggacaagatgaagaggatatgtaagaagatcgttcaatctacttatcatatgactattattaattattttccatttacttcaatcagaaacaagttatgcaagctcttacatttctagcaatatcatgccatggttcctaaaccacacatatatttattctatgttgaaaagaatgtaggctctacgtgtcctatatagaggttagatatatatgccgcactatctagtaatcagaaatgaagagtatgataatactcgactttagacacgcttcataagtgtttttgccattttgcaatctaagtgataaatgcaggtaaaaaccaaattaatggtctttgtcacgttaaaaatcaggcacgcacaccacaagcacttacctatgagtgaggagttcccacttttaattagatctcaacagagggagtcacaacaataatctctgggtcttactaaatttttattgaaatctcactaaattgtttattattgctggccgggactaggatttaaatactacatcatgagaccattggtacttcaacaaaaccatgtgccaagtcaatctttccaaattttaaacatgtacagcttcctaaatatttggagaatacatacgaaaacaaattgcgtgattttgttctggaaagagcattataacatatattttagttttgtaattatttgcaacagagatataaatctgcaatgatatgttctatatattttttctatcctcaagactactaggtacaacctaattaatagaggcattggttcttccttttaattataggtaaaaaatcaggcatagagaagcgatacatccaccttgatgaggagatcatccgtgcccatccagagatcattgacaaacaccagccctcccttgaagctcgtgttgaaatcgccgccgccgaggtcccaaagctcgccgagtctgctgcaaggaaggccattgccaagtggggccgtccagccaccgacattacccacctcatcttcagcacctactctggatgtcgtgcccctagcgctgacctccagctggcatcgctccttggcctccgtccttctgtctcccgcacaatcctcagcctccacggctgctctggcggtggcagggcgctccaactcgccaaggagcttgctgagaacaaccgtggtgcacgcgtccttgtagcactctcagagctaaccctggtatgtttctccaccccagacgaaagcaaaattgtcggacatggactgtttggggatggtgccggtgcaataatcgttggcgcaggcccgttttctgatggcgagtgcccgttgttcgagatggttgctgcctcacagaccatgataccaggaaccgagcacgcacttggcatgcaggccactagcaccggcatagatttccacctctctgtccaggtgccaatgctgatcaaggataacatccagcagagcttgctcgaatccttccaatcggtcggatacacagatcctgactggaacaatctcttctgggcggtgcaccccggcggccgtgctatccttga

SEQ ID NO: 16267 - DNA, 535 bp, Oryza sativa
tagaatggagattcaaagggcccgacggcggggggtttacgatactgggttcatcgaccctcggaaaatcaacaccgaaatgatcgacaagtacgagaaagacacggaggacaatctcgtccatctcctaacgcagcaacatttcaagacgttcatactactgccgtacaacacagagtgagtttttattgtcattcgaacaaatttcgttcccatacatatagcatgtacattttcatatatatctcatctcacgcatattccagattccactgggtcctgttattcttcgacttggacgcatgcagagtcactgtgtacgactcaatgaataaagaggagaagatttttgacaaggtcttccaactgatagacaggtaatataattccatctattccaaagtcgcggggattctattgctattatgttgatctcgggtaataattaattaatcgtagcttgcaactgcacatgtagggcttgggatcggttccgtcaattggtccgcatgacttggaaagaaaaacttggacg

SEQ ID NO: 16268 - DNA, 2103 bp, Oryza sativa
gctccgatccccatatcgcgagtcgcaagcagagcatgggagcggaggggaggggcgccgtcgtcccgctgcacaccggcccattcctcgcgctgtcctctcttggcccctccgtccgcgacgccgccccctccgcggccgggaagacgtcgccaccaccacctccatccgcgacgacgccacaacctccgtccgcaccgaccccacgctgcgcacgccgccgatccttcgtccacgcgctgccgccgccgctgtcgctgcctccaccgccgtccgcgtcgaccccacgctacccatgctggcggcctgctgccccacatcgtgttaacaccgggatcaggtttctggccatcgtctccacgcagatatgggagttgtgaatttccctcttttatctttcttggtttttctgctctcagttctaataggcctacagattgtctgaatccatttgaacaaggttctgcacaaatcttctgatagaattctgattttcacaaaattaatcgtggtggtattttacgcatgtggcaatttaattaccaaaataataactatttctatcagtctttatgtttaggtaacctgcccaagtaaattgtattaactgattgatgtttgttgttcctggtgatgattctcttctgtttcatgtggtctgcagtgcatggacagtgtttacaaggtagccctatactcctatattcatcacaacatagtagatagtacaaacgaggtgcgtatccatttgctttaattcacatagaaaactccctacaattgaaattcactaataaggtgcatattttgttctcagccacatcaccgtctgtttccgccatggcagcgtgactccgcccgacggctggaggaggcgaggtcaggcctgccctcaatcgacgctccacgccaccgcagcccgcagccccatcggcgccatcgctgcgtcgctccatcgccatcccgacctcgaagttgaaccggcttcgagtccctcgtgctgccactgatcccagggctcctcaaccctgcaagccatcgatcctgcctgcgaacaagataagagtgcttctcgatcccgttcctgtacgaggaggcatacggggcatggtatgtttcatccatagagatgcataatgcctttatctcctttgttgactaaatccccattgttcattattaaacattgttcattgtgcatggatatttgtgatgcaaaactctactccaaaatctgaagtccttagtggtttactgtacctgacaagcaaacatctcaaacatgtttgtaaaatcctctcgaaagtagagtaccacgttcctcaaccctgttcaccgagataagtattgtttaatgatgctaatgtatggtatgttaagctgatatttgatgctactgaaatatgtaacatatggacatgaatgttcacttcttttttatgtaaaatgtatattacctcattaatatgagtgctttcaaacctgacaccatcttaattggaatatttgattatgagaaaacccttataatttatctccactgttcttgagagttagaaaaatctttcaatacattttagtagttttagatgctaaaaattccagaagttgaaggcttatccatgcagttttagatttggttggatggaatttggattcattgaacattcttaaactatggctcttttaccatcaaaactttacattttccatatcgtcttcgactgcttgtagacaaacaactacagaagaatatctcatgctttttatgaaaccagctaatgcgacagtgtcgaggggggtcttggccggatccgttgctcatggccggtaggagtgaggagtacacaggcttccacactacgaggtaatctgcgtgcatgattcatgtgtctgttggtttctctatctaaatgatagttcattttggtatacctccatcattccaggaaacttcaatgctcgagttgtcgagctaggttggggatatttgattctttaatctgtatagggtttggtagcgtgcactcagcccttaggacttaacatgacagtaagtgagaaaaagggaaaacagtgagtttttgcatcaggctggctcaa

SEQ ID NO: 16269 - DNA, 984 bp, Oryza sativa
tggatccctttttgaacgagagccataatttactcttcttttgctttatctttattatcttatctgaggtatttatttgcttgggtttttatgatgccatcttgggcgattcgaccgcaggacgaggtactcctccttccttcctcacaaagtcacaattgtttccgatccaaagtttgagtttcggttgattgaaagacgatgagcctcccgcggcggtttctgaatctgatcgtggagaacggggcggatcctggcatcagatcacttagctgcatcgacttgacacgctacccactctttcacccaccgttaccaacggcaacaacaatggaagcgtgcagcagcagcagcattatttcgcagcaacaacagactgctgatgccttcaatacgaagaacaaacatgcggatggggcagcgtttatggtgcaggagaagttccagcttcccgacccaatcttcagcttcaaagctcaagcggctgatcctgattacgggtggaatatcgactgcttcccgcttgcagatcgcaaggttgtctgcgtggaccagtctggccgcgcattcctcttcgacgccgacacagaccaggtggtgacaatgccaagcctcaacaaacccaagtggaggcccttctccctcttcgtccccggcacggacaacgacggcggcgatggtgaaggcaacagtctctacatcatggagaaaagccccaaatcagaggcggggtgtagcgcgcggtgcatcgatcagttcgaggcctttgtctaccgcaagcccacggtgacagcgtcgttcatgtcgtggtactgccagctgctcccgccaccgccatacgtccgcgattacgcctacagccagagacgccatcgaatcacatcctatgccgtggttgccggcgatgacgacggttcgtggcgcatcctcgtatcggctgaggacgcaggaacctactgtctggacgtggccagcaacatgtgg

SEQ ID NO: 16270 - DNA, 1186 bp, Oryza sativa
ggctgtgcgaccgaacagggcccctaaaatattatgtcctatatataataatattagaggctttaattttgttaatttgcagttcaaatagtagtaaaacaaggtccaaaacgctgcaaaagatgaaccaatccatcttccatcatactcctgtccaggcgtccacgtcgttgcgtattgccgaagtcctgacgccgcaactgcttcgtctcctctccccagtcccctccggcctccgcttctacctcatcgctgatgataggctgatcaccacgcccctttttaattttactataaaaaattactaggctactagggccccattttaatattttgcacacgaacccgatttggcctggacgcccctggctaactcaatcaaccgggcataggcccaggctccctggttcggtgcagggatgtgatacttggctagtatatgtggttcaattatttttatttctttggtgtttagtctctactattcttatctctttaccacattgagaaagtgctggaaaattccggaataccctcttttatccaatggctgagatttattttatctattttgtcacttcatgaatctaacggctaatattaatatgatgatgtggctcatcctaattgtattttaggattcactttacactagtagaaatttgaccaaatctgtaaaaaaaatcattccgaaaattaacagacatgtcagaaattttgataccccggaatataaaacgaaattacgtccatgatggttaattacacatgccaccaccggaaacatccaatcccaatcacaatttcactttcttcaatatggcgtgcaaaacgccgccttattttattgcaaataacatcacagtatcacatccaccaccttcattttatagctgctagaagtctgccagtttccagctcacaccgtacactcactaaaagccgtagcaatggcgacttggattcttggatggttgctatggcttcccgtgtttctcatctccctctacctcgtcgacatccttgcacactcctgccgccgcctcccgcctggaccccgcccacttccgttcatcggcagcctccacctgctcggcgaccagccacaccgctcgctcgccggcctcgccaagaagtacggccctctcatgtcgctccgcctgggtgcagtcaccacggtggtcgt

SEQ ID NO: 16271 - DNA, 1415 bp, Oryza sativa
ggtcggtcggatttagacgaaggtaatgggaggaggaagcctagcgatagctggcagcaataacagggcgatacgacattgatagttctacctcgaccacgtgtggttgagtaggtggatagtgtactggaattagaagaggggatacttgtcggagtgtaggagggggtgacgatgattgatccaatgaaaacccttcaaacaaaggttaggagatatgggtcggaaagtgggtagttgagaagtaggagtatgaagatggctagccagtgggagagcacactagtggggcccaatgagtagatgggtggcggtactcagggtcaggtcgggaagggtgacggtggtgcacatatgtgtgtgtggctgcacatcgtttggatctgtttggagacaggggaggagggtgtatatacgaagttcgaagtgatcgtaatttacaaataaataaggtgcgattgacaaataaccaacccttatttatctttttcaattcctaaaacatcttaaatgttgtgatgtagaagcaggattagttttcattatctgaaggattatgttttgttattaactgtcaccaccgtttcatagtatatctattatgtaggacttgtttgctgctgggagtgacacaagctctagcacaatagaatgggcaatggtggaattgcttaaaaacacattatcaatgggtaaagcctgtgatgagcttgcccaggttgttggatcaagaagaagaattgaagagtctgaaattggtcaattgccatatttgcaagctgtcataaaagagacattgagattacatccaccggttccactgttaccacatcgagctaagatggcgatgcaaataatgggttatacaatacctaatggtacaaaaatattgataaatgtgtgggccataggtagagataaaaacatttggacagaacctgagaagttcatgccagagagattccttgatagaacaattgacttcagaggtggagatttagagctcatcccatttggtgcaggccgtcgaatctgccctggaatgccattagctatttggatggtgcatgtggttcttgcatcactattaattcatttcaaatggagactaccggttgaggtggaaagaaatggaattgatatgacagagaagtttggattgactctagtaaaagctattccgctatgtgctttggccacaccaacttaagtcaacgagccactgtttgagttagaataatggactgctctttgtcaactcaagcattgtatcatgcacggtattattgatgtgaaaataaaaatacatcatcaatgaaatttgtgggtatttactacttcccaatgtttatcaatagtcctgagaaaattacacagcatatatttgtattagaataaaccctcgtggggaaaaa

SEQ ID NO: 16272 - DNA, 787 bp, Oryza sativa
ctaggtttcaaatcataaatcaacatcatcaacttgcaagctaacatcaatcaacatcaatcaacatgtaaacttaaaaaaaacgccgttgtcgtccatccgccggcctccataggtggcgccgtcgtcgtcgtcgcgtcagcgccgtcatcgcagcagtcgtcgtcgtactcgcgtcgtcgccgtcgtcgtcgtcgtcgtcgtcgtcgcgtcgtcgccatcgtcgtcgtcgtcgtcggcgccgtcatcgtcgcgtctcctctcctcgtcgccgccttccctcccctccactcccctcccctccccgagaccggccagcggcgaggagagccggcggcggattcggcgcccgaggaggcgaggaggggggagccgccgccgtcgtcgttcgtcggagccgccgccactcaaggaggcgtcgtcgtcgttcgtcggcgtccggcgcccgaggaggcgaggaggggagccggcggcggatccggcgcccgaggaggcgaggaggggggagccgccggcgccgtcgtcgttcgtcggagccgctgccgctcaaggaggcgtcgtcgtcattcgtcggcgctcgaggaggcgaggagcggagccaccgccgctcgtcggagccgtcgccgctgctgtcctgccctgccgccgccgctcgtcggagctgtcgtcggccgttcacctctgctgcgcgcgagggagatagaggatagggagagaggagagggggaaatgagtggtggggggagggtggatgagaagataaggatggaaaccgtaagagtagata

SEQ ID NO: 16273 - DNA, 4051 bp, Oryza sativa
gggggctgtaagagtagataaggaagaagatttatagaacgatttttctaggcggaccacgtattttttcgcctgtaaaaatataatttttgtaggcggaccacttgtaaaaattgtttttcgagcgccgacgaatgacgacttaagtggtccacctgcaaaaattgattttcgtaggtggatgatgaaaacccaccctggtttatatttttataggcagatatttggcttcgagagtcatacccgcctggaaaaataaaaggctaacatcgctaaaaatcatttttctagtagagcgggaaatgcagcaatcaagaacacaccacacccaaatcaagaactaatgagatggtttaggacgtgtgacggcagcggcgaatcaataactcatccccacccaaccaagaaaaaaagctcattccccatctgatcaagaactcactaatcctcacccaaatcaagcactcaccagatcgagcaggatatgaggaggacgatgacgaattgcggcgacgaagggaaagggagaaaagaagaaaaccctaaccctagctttggaagaggaggagagaagggaaaaggctgcgtgctcactagagagaagatggtggccggaggagagcgccgtgccgtcaccgtcgcctcgcgtcgcgccgctcccgccgttgtgccacctcgaattgcctccgcgtcgtgctgccactgcgcgtgttgcacgtcgcctcccggctcccgtcgtgaggaatttttccacgccacacgagaagctgattttttcccgggcctaggtgagggggaaaggccgggataggccagggtaaaacccatactgggcttaaccgaacacacaatttcggatgggccgagattgtttcctcgccagggtgatccacggggattgggccccgatcccggccgggaatggcccaaccaaacaaggcctaagggaaacctcaaacatgtatatgaggggattgttaagttataattaattgaattagttgtattagctgtgtttccttatcaactttaagcttttgcttgaagcagcccacctataaatctattagaatttataacaaattaaataaaatggttcaattaactatataagctgattacatctaacagacccaaatttgtaaacttagaataaatttaatggacagtgctccggtactcatctgcaatggaatttatttggcttgtttggattttccatgtattcataagtacattagcatgcatataactatgtttgaaaaaatgacaatgcgcatatctctgctatcgtaaacatgacaatgacaatgaacatttgtgacgagttttatagtgatctctatcggacctaaaactgagcctgtcaccaatgacacacattggtgacggggctaaacaaccatcttcatcgggcctaagttagggcccatcacagatgagacctatcagtgacggacctattccatgagccgaaacataagcccgtcatcaataggtctcatcggtgacgggctcgcaatagatgctcatggaatatgtctgtacgggtatatctgtgtcggtatttatttcagcctattaaagatgacgacgttgtgacagtgcgaaagaccaaacacgggataggctgtcacagatatgtagttttgtactagtgaacactctgacatcttcgtatcatctcacatatagcactgtacattgaggtcttgagaatcagttatatgacactataagtaaaaaaatgtatttgatgtatgtgttccaatgcttgtcagattgatcctctcatctttaatttacacctaccaatcttattatgcaactccgaagacaataaattacgttgtgatatggcaataaacttgaacatcgacagcaacattttgtcagggcggctggtgatcaaggagtgccaaagaactactgaagaagaagggctggagactgaagagcataacctgccggatgatgtacaggaagactcagagatggcactggcgctaccgcgacgaacatcaagtattgtgggccgaaatgggccttgtaatagatccaatacagtcttgcattagcttgaacttgcgtgagagagaaggagagttggtgagatttgtaatacaagaacagagtactctgctcgaagaacttgggcttggcaactcggtggcgatggcggcggcagctcaaacctaatggattggagcaatatatgtactaaatagttgcctaaatcatgtgtgtgtgtgtgtttgtgtgtgtgtaattgtcctgttcttcctcttttctccaatttgactagcgagtagctgacaatctggtataagagccttccgccccaaaaattctcctggcttggttgtaaaattccagagaaggattggaaattgttctttggatcaatattccacgaaaaggcaacttgtcttcttctggttaagtgagtttggagagggagtggtcgattctgtctcctacgtcacaacttaaaacacccataaaaaccatggcgcatgaatggaagcaagatcttctgttgagaactatggaggagaacgagaggaaaagggaggaggaggaggagagggcgagaagtgattttgcaaatctaaagtgatgcctccttgcctttggcaactctggaagcatctaacaaactctttagaggcctcatacattggtggcaaaaagaatccgctctgccaaatcttggcttgtgtgtggaatgcaccgtagtgcccactataaggtgctgatcgtcatctctctacgatattaagtccttcctcggttggcacatacctccttagtagtccatctaagcagactctatataaatatggctcgtcccatatgtggtgacgactttcatactttaatttccttctgttctctctcagtggtacatatcttgataccatgtagttcacaatattcgcgtaacacgggttggagttgttcacaatcatcagcttgtcatctagtacgaaatcatttattagtggttcctgcacattagtgatttgcaacctcgacaaatgatctgctacggaattttctactccctttttgtcgttatttctaagtcaaattcctggagcagaaggatccatcttaaaagacggggtttagcatctgtcttggtgagcaaatattttaaggtagcatgatcagtatagagaattaccttaacacctagcaagacctaaacatatctatagcaaaaataacagccataagctcctgtcaagattttgttagcataacagattgcattatgtttcttctctttggtttggcctaaaaccgcaccaacaggaaaatcacgggcatcacacataatctcgaatgggagtgtcccatcaggaggttggatgattggggcagaaacgggtgcctttttgaggatttcaaaggaattaaggcactcgtcgttaaactcaaagggcacatccttaactaacaggttggtcagaggtctgccaattgtagaaaagtccttaatgaaccttctatagaaaccagcatgaccgaggaagctacggattcccttgatactcaccggaggtggaagttgatctatcacctctatcttagcttgatccacctctatacctctctcaggcacacgatgtctaaggacaatctcttcatggaccatgaaatggcaattttcccggttaagcactaggtctttctattcgcatcgttgcaagactttgtctaaattttggagacaatgaccgaaagtttttccatagacagagaagtcatccatgaaaacctccataatgtattcgatcatgtccgaaaagatagacaccatacaactctggaaagaggcaggagcgttacacagcccaaatgacattctacgataaacataggttccatacgggcatgtagctcaaaagtttcaccggaatcttcttcttcctcaatgaaatctgagacattattttcaagaagtgattcgggagactcaaaaggaataatagttgttacttcctttgcatattcgtcttcaggcagggaatcagtcaaggca

SEQ ID NO: 16274 - DNA, 7233 bp, Oryza sativa
ctttttactgaaataattctgggtgtttccaaaatcttcatcaagatcattcctgaacattatagcacattccagagtttgaatttctttgctctttgctggtgatggtttggaggaggactccttagccgaatctattgatgtaggcggttcagtctcagattcagctatcgaaggttccttaattttacgcatcgatgccttagggagggattcattatattgctctatgaaggaagtattttccataattcgatctagaattatttgtccttccgaaggagttttatgcaggaatgatcctccgacaatggtgtcaaggtataatgcatactccttgtctaaacctgcatgaaaatgttgtaatagcacatattcaggtatgaacaaggttggaccagatcatactaaattattaaatctggactaggctgcaccgatggattctttattcatctgctggaagatgatgatttctcgcaacttttcccagtcaccatttgcgcacttgatggtagatgtgtactgttgtattgcgctctcttgaagagagaacggaaacaatttccaccgtacagtttcttctttaatgcctcgaatattaaagtatgaacacaactgctcaaattcctatagcatgtgtttggttgaagggatatcccgggatgggatgggatcatcccatttttacatgtgtttggttgagagactagatgggataggatggttccaaaaaagaatattccttcaatattcgggaccaactcatccgccaaaaactggcggacagattcatcccacctccacatgcgtgtgaggcgcggtaaccctcatggcccatcccgggtttcaccgcatccctttttttttcccttcgctcttttcagctcctcctcacgactacgttctagggttagcggcgggagcaggggcgaatcggcggccagcgcgcgaggcggcgacgggagcaggggcgagccggcggcgcgagcagggatgaaacggtggcgggagcgcatgagcaagggcgagctgacggtgcaaacaggggcaaggcggcggtgggagcgcatgagcagggagctggtgatgcctcttctcttgccggtcgctactctgctatccttctgtaaatttctctatccaataattggtattgatcagagagactgatatttgtcaattctcatctccgaagcgcttgatcgctatcatagtattatgagtaagtatggatgaagtcaattagttagtagcaattgaaccaacagcagtataattagttcaaaaatgtgttatttttttaggtgaatttcttgacagtagatgatggccatgtgttattttctatgaatggattgatacaagaattgatgtatactgactaaaaatgtagcgatattaacggtatttaattttcaaatagtgtaattttcatgtctaaatgttattttacaatgtgtacactccaggcatcccaccttcatccctccatccaaacaaggcataggatcattccaacccatcatatccttcaaaccaaacaaaaaataggattcgttccatcccttcaaccaaacagaaaatgggatcatcccattcccaaaaacagggatggatccaacccatcccaccttgtccctaaaccaaacacatgcataggtgatggtagggattttcttggtcgagacctaaaaaaggatttctccctaaccatacttattaattcggggcgaatttcgtagtcggttataaaaattggcttcaatgaaggaggtggttcatagaattttcctgtaggagctaacaatttgaagataggttgctccagggtcgagagttgtattttaggaaatttcaacggatagcaggggtagaggaagaagaaaaatcaaagatatgaggatgaacaaggtacggaggagaatagcaattgttccccggcaacggcactataaatgcttattggtatttcttacggtcacagataaaatctgcaagcgcacggatatgccgatataacacttcactcgggagtattccaaggtatcaatttccatgaggaacgtgtgtgctcagctattctctaggttcatccaagggcacgaagcaaagataggcaaatgatagagaggatttcctagcgataaacaatgtctatagaaagcttggtttaatcctatagcaaaacttcaggcgctaacttgctcactgctaccagaacgcgctctactccgtacccggactgggaggactgtggtgctcttgtgggctgtcactatctctataccaacctctaatgatatgtgggatacgcagcaatctctgaaaataactacctaaacaccatgtttaagaaattaatttctactctagtgtctataactcactaaagtaaacataaacactgcatattaaatatagcgaacaatgattagaatgctaaaaggaactaactaagagataattctcacaaagcaaaatcttaattactcggaagaatatttctatgaaatcagagtaattacaaaggtacaaaaagtaagaggagattatcgacaactccgaaattcctccgatttcttcttattctctccctattctagtataccatagggcctcttataattcggctcaagcttggagtgtgtgttggagtggagcgaggcctcctccttttataagctgagtattacggttatggcggttggaattgtccaaactaccctgtaaacgtcattgaggagtgattaggagcgtccacgtagaaagccaggatgaagcctcagccagggtttggccgaacctgggttggcacatctggcctccagtttttccctgggcctccacaattctctcccttatccacttctatacttgttgagctcaatttgtaatgtttcgatgaagttgtgagcccacttcttatatggatggattttccctccaattaagtctagatttcatcccaacttggtgatttattatctgcatccaaatatacaccaacactcgtggaatatgtcaaaattaaaccctaccactatgttggatgttttattatctttgtattatgcaggtattggcggcataaaattagcatttaacagccaccaacactcatgtggaattctagactaatgtccttgtatgtgaaagaagcaaaaggggattagttcagttgataattatctagctccatgttggatgctccgattagcatagccaaggacatgcaaaactaataaaaaaattcagttaaccaaccggccgtatgcaaaatcttgtaccagctacgtgctaatcctagccaaaatttgtcgtttcatgtatacatgccattactatatgtgtgcaaacatgtgttctgtttacttgcttctcatgatgatctagtttacacatgcttcattgtttgacatgtatatgggagctagatgaaatcccacatgttactacggaaagttctatataatagtagtataaaatatggttaattagttccatgcattaaaaatttattggttttgaaaaatatcaatactatttgcgtatttgtaacgatgccactgatatttatttgtaatcttctacctctctcttcccatcttctatctctctccctctctctgcaatctgttgccgccaccgctgctgctgctgccgcgccgccgctcgcagccgcgtcgctgttgctgttgccgccgctcgcagccgcgccgccactgctgccctacatacaaactctagtgcgcatatgctagctgcagaacagcaatcgcgattcttttttctgaacttggttaattttcattttccgcagaactggttccatttccaggtgaaggaactaagctagctggatgaacgagtttccatcaagttacaacacacagttgacaggatcgatcgagttatacatggttttgaacagcaggaggtaaaatctcgtgttgctttgcctacaaccttactgctgccgcccccgctcgcagccgcgtcgctgcggctgctgctgccgccgccgcgctgccgctcgcaaccgcgttgctgctgctgctgttgccaccactcgccgccgctgagaacgaaaagaggaggaaggagaaaggggaagaaggaagaagcggggaaaaatggcagtttggtccaattttctatggaaatgcatataagaggtaagtagtgatatttttgaatatgtgtgaaattataatggcatatttccaaatacataaatactagtggtatatttaaaaaccggtaaatttctaatggcatgtatccaattaaccctataaaataacatgaaaaatagctagatgacataactttatatactttatataattttcatatttaatcgaccatgaaaaaagttataaacaattaagatgacaaggtttataacaatttaaattatatgtagtttgattattcaaaagtaaaactaaggtaatgtatcttaatgacagaaggaaaagattgaagataaaataggttaatcatctaaagataactctaatctaatgtaagataattttattgggaaaaaaggaggaagatattttggagtatagattaatcatctaagggttagaaaaaatgatatgatacggtttattgagagaagagataaatatcattaactacaattattaggataaactttaatagatatttatgacaagtaaactagatgagagcctttggaccatacagcacgattgatcaaccctatctgtaaatttaggcaacgtaggaacttcaaaacctactagatcaagtgaatacgtacgtactcacggcaaagtccaaggggtgccgcagggcagtagggattgtttgcaggactgctgatgcagtagcggagcccacacatcagtgtctgctactgcatcagcagtattgcagaggatgtgcatctgccgcagggacagcaaggaccacagtacaacaaatgaacaaaatgtctttgtaaggccttttttttatttctatagaaaaaacgcttgtgcgttgcaacgggtgaagtttattttaatcttattattgttatatggtttagttaagatgaaattcaccgtgggagatcgtatgtatatatatatatttttagaaaatcatgagctgcagttaggagtccgatcgtctcaagttagcatacgagtttttttaaacaaatttcttatatgattccttttgtattaccaaaagtgaatggtcttaaaaaacagactcaaatacggatatttattcccaaaagcaaacaaacttaaaaaccgactcatacacggatgacgtaccaaaataccggaaaaatatcttctttttattatagtagagataaagacactttaaatagctttgtaatggtgctttataatggagtataggtatttgtgaaaatatcttataagtgacttatggtgaattgtcaatgtaaataaagggggaatttgtcagggttatggataacacatacctaatagtagttgactaaatctcggcaggacccaccacataccatgtcttatacggaaacaaccttcggatataggaggagttccgcataaggaaagataaatagagttctacatgaaaacgacaaggactactcagattgtatccatattggtttttctagttctattctgacaaggggacacctatgggtataaatataaggccccctaggaggagaggggacacggaacaatagatcaagacacaagatcaacattcaagctaacatacgccaagattagacgccgaatatcgacttcagagataagcatggctaatcccctacagtgtctacggatactgtcaggagagacatagcgctgtctttgatctcgccggatgtggattcgaggaggaaggctaccctgttgtcgactacgagtcagcacttcagaccgccaagtcgacaacagttaaataggctactcctggttctcggaccagtaggccgtagcgatctctcgtacctcgacgtcaatcggtcgagagatgaggcttactcctagttctcggaccaataggctgtagcgatctctcgcacctctacttcttgtggtcgagttaaggctacacctggttttcgaccagcggtttagcgatactcccactagctttacttctcgtggtcgagttaaggctacacctggtttcgaccaagcggtgtagcgatactcccgctagctttacttctcgtggtcgagttaattaaggctacacctggttctcgaccagaggtgtagcgatactcccactacctttatttatagtggtcgagttaaggctacacctgaatatggtcatgtaagatctggtcatgtaagagcaacgaccatgtaacgaccggcttacacgaccatcatgtaaaggaagggagtgcttgaacctttaagcacatgcattagtttgaatattgtttctcctgcttattatgctcttatgtgttatggttctgatgcttctactattgatacaatagggaaagtcatataccgtttaaaaatatttatcgtgcttaaaatattatattttataatgtccaaattttctattaatgtgttacatgtttcactttcacatgtaagattctattgaaattgttggttcgcctatgaactgtttcgctaagtggtttacgctacattttttttttcacaggtggtgatcatagcatgatattggtcaaattccgctatgtactttgcctacaccatatattctctggcatcatagaagacagaaaatccatgtatgtttctttactaaaagttttccaaccttgaattattgagaaactcaaagctaccgctgaacaattgtgctctgtttgtagcaatactttattctgggtgtaacatataatctaaactggttttggggtcaactttatgttattaattggtttgtacttggcagattctttgcattggcttactgcattcttttaagtgctaagcatgtaatctaccattaatgggattcatataattatacatcttatttcaatttcagttccacacagggataccacttttgcatagaagaatgaaggtatatgattaccaactatttcctttgtatttcaggaacaagtattgctgaagcaattctgtaaaaatattaacgcacgcttgcattttcgtcagcgagataaattcctggccctctagctgaactattctaattgttttggcatcagattacatgtaa

SEQ ID NO: 16275 - DNA, 719 bp, Oryza sativa
gaaagataagagaagaagaatttatttttgaaaaatccaaagggatctgtatttcaagcttacgtcaatttataattcttcgcttatgtgcacccagtcttctactaacatcagtagcatacaatgcgacaatggtcgagaggttgacaacatcactgcacagactttcttcctcactaatggcgtcgctatgcagatctcatgcccccacacgtctccaaggaacggtaaagccaagcatatacttcgttccattaacaatattgtgcactcccttctgtgtcaggccagccttccaggctccttgtgggccgaggccctccacacagctaccaacctcatcaaccggcatcctacaaaaatcctacaccaccacaccccctactatgccctcatcaacggatttaagattactcaaaactttattaatagagtaaaatgcactatcggtccttaaacttgtcatgaggtttcactttggtccacgaacttgcaaatcatacatcgaggtccctaaacttgatttgttgtatcatctcggtccaaagcgtcgtttgaccatggtcttgcctatgtggtacgccacgtgaacaatgacatggcattttttctttttcccccttttctttttctcctcctcttcttttatcttcttcctctactggagccacctcaagctccctcgtgccgaccaccactgtcatcaccagcgtcgctgc

SEQ ID NO: 16276 - DNA, 709 bp, Oryza sativa
gaagttgacgggcagctaacgaagaagagaattcctgctaaggtgatgtggtatttccctataataccacggctaaggcgtttgttcaagaacaaggggaatgttagaatgatgcgttggcacgctgaagagcgtcaacaagacgggatgttgagacaccctgccgatggttcgcagtggcgaaacatcgatagaaaatttaaatactttggaaaggacgcacgaaacgtacggtttcgtttaagtatggatggtatgaatccttttggagagatgagcagcggctatagcacttggcccgttacgatgtgtatctacaacctcccccctggctatacatgaagaggaagtacataatgatgccaattattattcaaggccccaagcaacctggtaatgacatcgatgtgtacctaagaccactggtcgaagatcttaaactgttgtagaagaaggaaggtgtccccgtgtgtaacgaggacaaacaggaggagtttaacgtacgagtgctactgttcgtaaccatgaacgattggcctgcacttagcaacctatccgggtagtccaacaaggggtacaaggcttgcactcactgtatggatgaaacagaaagtacgtatcttaagcactgtcggaaggttgtgtacatgggtcatcgtcgattccttgcagcaaaccacccagtacggaagaaaggcaagcacattga

SEQ ID NO: 16277 - DNA, 13962 bp, Oryza sativa
aactgaatttacagatgtaagtcctcatgctccttagatattgcaaatatttcatttaagttgattttaacacaaatcatttgtcttttactttccatagctcccgagcatcccttataacgcaatccggttcgatcagaaaacgctgatcaacttatgcatggacttgtgccagttcattcgttgcgacatctgtaaccatctaggagagttccacgatcctcatagtgaacttgctacggaccccaaattcaagaacctaagggtgtgggagagggaacatgctatggtctaaaaggtttatttgtcgcgggggaaacttgtaatattacaaacactatacattctacgtaatttgatgtttataattgagctcggtcaatttttggctaatttataatatattatcccgtgcggtcaaattataccgaccgcacgggataatcgattatcccatgcggtcagccctcccgcacgcgaaaatatcgattttcccaaacgcggcgttgcaggcgggctgatccaccgcatggaaaaatgggtattgtaatagtgtagagaaaccatctttgacgggtcagctaaaatccacaataacctcggtttgtgtaggaatcaggactaaagaatatctttcgtcccggttcaaaaggtcaggggtactttttgatctttagtctaggttggtgttaccaagcgggactaaagatcatttttagttccagctcaaaacatggcaggcggtgttagaccccttcactatttttagttctggttggtaacaccaaccgggactaaagatctatttttaatcccgattgttaaacaaccgggactacaaatcggccccgagccacactctactcgtccgatcgcgtccttccttgatacttccaccttatctcctttctcctcctctcctcctataacgccccgatttacggtcgggattaaaaatcaattaataatgcatcttctagatattttagaaaagttaaagcaatttaatcaagtgaaataatgggaaaattaaaaatttcccttaaaaatcattgaccaagaatattttgtaatattctttgtgccctaatatactctccggatttttccgtgaattttcggagctcaggaattaattttaaaagcataaagttcatttaatcaatttaaatgaaaagaaaaacaaaataaaaactccccttcctccttgggctattttcggcccaagaatccttccccgcggccagcgcgcccctccctctctcgggctctctctctttccctcaacccagctccatgctcggccctctcctcccagaagtctagtttgcctccccagccggcctccctctcctctttggccgacagatgggacccatggaccccacctatcatccccaaccttaggtcggcaactgccgttgccaccatggccgctaaaaaccgcccacgtcgccgccattcctggcctcctcgagccctctctcgcgtgggaccggaagccacccctctcctccacctcctccctcgtttttccccaaaaaccggcgccgatttggcccccacgatcccacgatgcctcgccacttcactggccgttgccgccccactcggccacgattccccctccacgagtgtatataaacgatccccggagcatcctctctcgtttcccccatttcgcccgaacccactgcactcctcctcgctctccccacgctgctccgcgcgatgccgcccgccggcgagctccggctgcacgccgccgtcgccgtagccaccgccgcgccgcaccgttggttccttcggcttcgcctcgccgtgccgcaccccggcctccgctctgtttccccattccatcactgcagccatcctcccactgcgaacccgagccgccatcgccatccgccgcctccagccgcgcgctaccgccgctcccgccgctgccgtactgcgccgcatccaccgccggtttcgtcgccgcctcatccctcccattcaccatccggaaccatcctcccctaccgcggaagcccgagtctacactccactctccatagcagctccagtcgctcctcgccagtgagggggaccttgcccagccgtgctgctgccgctggcgcgttcgcagtgctcgcctgcacctcgtccgctgctcggtcgtcgtcttccgccgctcaaacccatccactaagttcgccggtgagctccacctcttgtcgtcgtcatcgtccttcatttccagtcaccccgcatcggctcctcccctccctaactccctcttctccttccgcaggtcaagggcaaccccgtccgccctccatcctcgcaagccgccatcgggcaatcgtcgtcgccatcatcatcctccgcgccggccgccgcttccagtgaggacctctcctccctccccctttttttcctgtccccctttcttgccggccgccgcctcttggggtgcgccgccatcctccgtgcgcaccgctgtcctctggccgcccgctgccgttccgcgtcgccgggtgctaccgccagtggccgcgtgccgccgccgcgccttggcttggccgggccggctttgtgccgcacccgtgcccctggccggcgctcccctcggccgcccgatcggcttgggccgatctgggtcgtccatgtggtggacgcgcacccgaggacacgtgtggacttggtccaccgtgcgccgcccctttgtgccgctgacgtgcggggctcgcgtgtcggcgtcggcctccccttgatgactcaacgcgtcccttgtcctttgagaaattaatcaatttaatgcgcaataaattcgttaataattctagaaattcatttaaacggttcagaacttctaaaatccatatcaaattcattcgaactccaaattgagccattcaacttgcaaaattcatctaaaattgggctctacatgtttgtttacttttattgtactgtttgcttggtctttattagagtttttcctcgttttgcgtgccagcgtgtagatttcactgtttcggaagttcgtggtcacgaggataagagtttggaagattgtttgaagaagcaaggcaagtcacacattccccttgagcatgttgatcccaatttataaatgttttattgtttgcaaataaatatgcaccgttttgctaattacatgggaatagggtttacctatctgcttgcttgtaccatattatttgatatctgtcctttgtcaactgtgggtgataattcgactagcttgtgtcacttatgttgatctagctagaactatatgcttaccatgcttaattatcactagctcagttgatgggataattgcagaattagaccttttagtatcattacgagctgcgtgctcgagacatatgaccatgtttcattggtcgtaactatccaactaaaatgcgactgaatggtgggctgtgggtgcatggttttgctggtcgcacccatggcaattaaggaccggttcgcgggatgcactggaagacatacagcgcttgccacaaccgggaatgggtaactacctgacttgaagtatagctttccgctggctgatgcatccaggcaagggtgagcgtgatggagttcggatgggccctgcgacggcctatgcggctttctgattcgcctaggcacgagaggggactgcctgttgcctgctgggggcaggggtgaaacctgaggtgtggtgtgcttggtcagagggggttatatgaagggtcttgtcacaattactcgacatggtgacgtgtctggcctggcacggtgacatgccgatggattgtgtcatgtgggtacagtagtgcacctctggccagagtaaaactattgaaatagccgtgcccgcggttatgggcgattgaccagattcaccgtgattagtctcacacttaataaatcgacccaatgcactgtagttcaggtgggatggttgggcctgttcaacgtggtgtagtgttgatcagtggagatttaatgttactctaattagtcaacagttttaccctttttctcaataaaatgttttacaaccgcctttatgcaaatagcaacaaactgtccttgtattcccttgcacgtctgcatcattggtgtggcttgctgagtacggtggttgtactcagttttgctattattttccccttttcagaagtgtagtgcttctgagctgaagacgaagttagaagaccaaggctcaaaccccagttgtgttttgcctgaggagtggagctgaagccccgctaggatcgcctttttccgctgctgctgctttcttttcggtgtgaggactaagagcctcttctgtaagtatttactctttatttacgtttggaactgtttattacttgtcttttgtgtaccctggctgattcctggacagggatttaatacacaaaatagtctggaaatttgggctaaatttctgggcgtgacacctcccgtcattcactcaccctcatctcctcctcccctctcctcctctcttctcctccggcctcctcccatcccctcccctcctccactccgctcccctcttcccctccggctcccttctggcgggcggcggcggcggtgtcgtggggacgacatgaggggcgcgagggcagcagtggcctcccctccgccggatccgggaggggaggcggccgtgcggtggcggcggtggcgccggggcggcccgaggggcgcgagggcggcggcggcctcccctccgcgggattcgggaggggaggcagccaggcggtggctgtggagttgattcgtagatttttttgtgaattgatttgtaatgaatgatttgtagttattttttattgatttgtgattgatttgtggattgtggatgggcatgtgttgtggatgattgtgtatgatttgttgatggttttgtggatgattatgtatgatttgtggggatttgggtgtgacggtgatagtcgaggtgcaaacagcataaaaacaatggaaataaaaagaaaaaaaatcttttactcccggttggtaggactaaagatactaaagattgatctttagtcccgaatatttgaaccgggactaaagatagcgatatttagtcccggattcgtatccccgatttgctatctgggactatagggggttgcaaactgggactaaaagggtttgtgcagcagtgtactggactcttcatctcgatctgtcacaaacgacgcaaaacacatactagatagctgaataaaaagggtgactgttaatagtgaaatttggtaagcccggagtagtcatcggcttagagtcagcatcggcttcgaagtcctgagattagccgatgagagttgtcaagtcgtcagttatcggattcttactatattcggttaaggaaattgatctacttaaggaggcttatgcagaagagactgagttcaaagagaatacggtatggcaagttatctattaattaggaatagtttgttagtttccttttaacttaggaaagtgtgtttagtgtcctataaggactttatcttttccttttatctttaggaaggtttctttcttgtccgacaaggacttgtatcaacccatgggtataaatatgtacacccggggtctatgtaatctatcgctacgattaatacaattcggcgcatcgccacccttttttacttctacttttgtttttacgttccgacggaacttggcacccgacgcggggctgcatcgtcttcgatctccagcgaagggataagtccaatgttccgccggtccaggcaattgtatcgtctacgtcggcgtcgttcaaggctgcatcaggacattcgacctcttggattactctggtttggataatatatttgcctggctatttatcatatgtctatgttaatctagtcctagcatctcaatttagctctatcagctgtctctcgctttagggtttatgtcggtatcggctaaatcgccttgctagattagattagcctaggcatctaccaccttgaaaatcagtcaacggcttgattgtctagatattatgtttcttttcacactcagcgctgcatcagttaagtttgatctactaagtcgtgcttagaaccataatctctagcctgcttcttgattgccaataagggtttcatcggggtttcagccggtgagttatctggatgttgcatcggctcataagaattgcatatacatataagttggatttatccgatgacaacaaaggtttcactgtttaatctaatcttgtggatttcatgacatcggaactccagccgatgtgtgctttaaccttcagatcgatgcttatttatcatatcattatttgccgattggtttatactggattatattgttattttattacatcatcatcaaccgattgtcttcatatcattatctacattagacatacaaccgattgtttaaaccctatcactatcggctggtatcggcatcggcatcggctattatcggctatcgactggaactattccatcggcttgtcagccgatcggctgttttgatctactatttgcatatcttgtcagttgtaggatcaaactgactggcacgccctcatctcactaagatttggacctgcacatgagcttagcaaatctcccaggccggtgtgttcattttttcgtcaacagtaacatatctgtaacttttttcatatcctatcttactgtaaagttatcccccactaactccttaagcttaacatgcaaagatgccacatcatcatccactaacaagatgccacatcatcatccactaacaatcatcacatttaaacatcatgcaaacatgctatatctttatagttttttataatttaagagcttttcaaatacaaacatgttaaattatcatccaacataattcacaattcacgtaatgtttcaatgtatatctttattatgttttatgatatcatatatatttatatagttcatcctcacttagttagtgcttaaatgattaatctatggtccaaattatctttctccttttttcctctaattaagtcatatcacatcaattgttttttgcctttagatgattaatctacggtccaaactatctccctactttttttttccataaagtcataccaccttactttttacgtatactatttaaatttaaattatcataaaccacattaatttacttaatttgatgttacctagctatcttacacgttattttttttattgttatcatactaaattcccgcagcaatacgcggggtttcaccttgtatattcaaatgacatgtcttgttttccctcatactagcaaatatatatatttcccccatatttatgctttgaaaatactcgcatattagatatcgctgtaaatgactcgagtagtcgggtctgacaaggggctttacattgtcaaattacaggatttgtgcagatcacccaactactaaataaacttggaatttttttgtctttaaccgacaaagattataatttgttaactagccaatctgaccgagagcaatcgctagataaaatcctataacgtctggataactcgaagagtttgtggtaatgaagatgacttattgctggtctggacaagagaaaatattagtttatgatgtcggacaaatacgcacgggtgcacaatttttattaggtgttttatatgcatttagtggcttacgtttaatgtctgtatgtggagctaaccgacgctgctcgacgactttaatgtttgctgataagtctattcgagtatttcagaaaaaaagaaagaataagcaaaacaacaacatcgagattctaatcacacaattagactgcttaagttctgaactttatacaaacactactaactactacaggattgattttcctggacactacctttttttccatgctgttcataactggaaccgcacagaaaaatagggggaccagcgtcgggttgtcgcccgcacggaaaaataagctgattttcctgtgcgaacctattaagagagccgcacgcgaaaatagtactctctcttttcccttctacccacttcaaaatttcccctttttccgcgcgcctcggtcccttctctctcttttatccggccccattgattctcctttcaaagtcttctctctttcctcactgcctcacgccaaagtcttctcagccgattctcctctcctcactcactgcctctcctcactacctctctgtggcggcggcggcccatggcgatggctgcgtggcgacagcgacgatggcgctttggtggcagcgcggcgacaacaatgatggtgtggcggtggaggcgcgggatccggcgagcagcggcggtggaggcggcgacagcgacgacggtgcggcggtggaggcgcgggatccgacgggcggcagcggtggcggcgcggcgacagcgacgaatgcacaggattcggagggcggcggccgtccccgcacggatccggcggccggccgccctcccccgccatggatctggcgcgggatctggctcccctcccctccccttccttccctccccagatccggcggaggggaggggcgtcggcggcggtgcgatcggaagggagcgtggatgggaggccggcgggaggtggcgccgacgacgatgaggtgggtgccgccgtcgatgacgaggaggaggcggtggacgggtgctgcggcgccgatctaaggttttcatttttttttgaaattttattttattgttcggatttttgtttttcagtgcgggcgacataagcacccgcatgtgaaaatcgctgttttcccagacaccttggggcgtgcgggccgtccatccgcatgcaaaaatcgtttgacccgcacgagaaaatgggtactgtagtagtgaaattttagacaccgaacacatgattttcccgtctgatgatacgatttagttgtcggccttaactttattatcggctaactatgtcgactatgccgactaagttttaagttttatattttgagaactctgactcatgtgatataaatatggtcaacataatccctccgtcccataaaaaaactaacatagtactgtatgtgacacattgtagtactagtagtactacgaatctgcatatacatcacatcagttctagattcactttttttttttacgcagggagtatgtttgaatagagtttaattaggagctattgtcagtgttccaaaaataggataccctatggatctgtgcttatcacagcggttgtaccatataaaatgtcctatatgaaaataaacattatagatatggataaaaatctgaaggggataaggaataaaccccaaatatgaaaaaaaaacacagatcagttctacttaagcccaactaggactacccgtttcgtactgtacatatctccctaattatacgtggacaagggggaatcgagagtataactgaaaatcccttgtgtgcccatgaaaacttacctaatctctttaataccccctcaattttacttgatctctttgtacccctgaattttcgctttgatcccctccgtacccctcccgttagatttccgtttcatctgtaacgtattctatgagcaacattgtcagtattttcaaaaaataccaaaatggcaggctatgagctacattgtcagtattttcaaaaaataccaaaatgccctgccagtgccaaccctaactaaacagatccaatccccttctcttctcccccatcctctccacgcgagcggctaccgtgcaccgccagtctccaatcgtgcaggtggtgcctttgccatcccaccgccctctcgtcgcgcacgccgctggccgccgccctccatcgcacggtggagcaccgccggctatagacccgctgcatctctaaccgcccccggctctgctcgtacgccaccaggttggcgagcatggcgtggttggcatagttctccacggtggggatctccatcacgccgtcgcgctggctgaacgtgacgtcgacgaggctgcacggcaaccccttggcgtggaacgtcaccccggcatcctgcagctccgtcgccgacggcatctgccatgccacccgctcgtggatcggcttcgccagccactcgtcccagtacgcctcgtcctcctcctcccccttgccgctcacgccgccgctgttgctcgtcctgtgctccggtggaaagaaccaatggtagtagaggtcgagaaggtggagatttaattgagatatgcataattttcgatttggaagcttcggttatcaccgtcctgtcgctcgtcctgtcctccggccgccggcaacattttccaattctttaccaatctacctactgttgctcctccatctacaagggcattatagacatttgtaaccacacataactacaaaataaagaaaacctaacgggaggggcataaaagggatcaaagcaaaaattcggggtacagaggggatcgagtaaaattggagggtatagaagagattgggcatgttttcatgggtacacaagggattaactcagagtataaattcaaggcttctcacgaggagggatgacattgatggcagactcgattaaggttatctcctgatactttgtactcccttcataaaaaaaactcaattatgggtttcaaaggcgtgtgtacaggttcaaacatagaattggattttttttgacggagggagtacatatgagattgatatatgaaaaagtgttttcatccctcgaggggatattcccttgtttcgtgcatgtcacataaatatttataaaaaaatgaaaaaaaaatcacaagatagattaatatgaaatgtatcactccacaaacatgcatgttaaaaatcaacttccacaaattataacaaaaataacaaatataactgcgaatgtacgataactactttcagtctaatttgttcttttttgttgtaacttatagaaatcaaattttgcgagtggtatatttcatattaatctatgttgttattttttttcaatttttttataactatttagatgacatgcaagcgatgaggggatatcctctcgaggaatgaaaatccacatcttgatatacacaatgacaacactggccttcgctcaaaatgaatagggctattacccatctcggtggccttaacctatataaataaaccatgtccctcttattcttcttactgcttcatttttatcctcacattagtcgatctctgtgtcctcaaatacattacatatgtacggaacctacggtcaggatgttaccggtataactagttgaagaaacagaatatgcacaaatataatttttgtacttatccgattcgatcagttaaataacatacccagaaatttacaaaactattcatttatttgcaccaataatcacattcctgatggaatgtttccatttgtaaaggcaatctattactttttacccacaagagcctgattgacttacgttggtgcggccatcgcacataaatgattggcttttgctaaagtcacaccaaacttctccgtcatatcaattctatttccttctacctcagctgggagtctccatttaaaatgaattaacagggatgcaagaagtacatgcaccatcctaacagctaatggcattccagggcagattcgtcgtcccgcaccaaatgggatgagctccaaatctccacctttgtagtcaattgtcctttctaggaatctctccggaataaactttcccgcttctggccatatatcttcgtctcgacccatggcccacacgtttattaacactctagtacctttaggtattgtataacccattatttggatcgtcctcgtagcttgccgtggtaataataacggagctggtgaatgcagtcgaaatgtttcttttatgacagcttgcaaatagggcaattgaccaatttcagattcttcaattcttcttcttgacccaacaactcgtcttagctcatcgcatagtttagccattgatattgggttctgtagcaattcggccattgcccattctactgtgctagaacttgtgtcactacctgcagtaaacaagtcctacaatacaaagatatacaatgaaatggtaacggaaattaatagtacaccaataactgtggaagagcatccacataccacatttttatgtttaaaagttatatatatatatatatatatatatatatatatatatatatatatatatatatatatatatatatatatatatatatatcttgtcgtaattagtaactatttgtaacgagagccatatggggcatcatggtgcctgggcaccgatggttgaaatacacaaattgactcaaattgatttttaacttatgactataaacccaggtgtaacaattatattcatacctacacggctacacctaacaacaaattgactcaaattgacattatttcacaattcattaagttatatgtttggatggtacagaatcaaaatctaacaaagaaaaatgttcaatttagtttaaacttgactataaacaagttaatttcatacctaaaagtttttgaaattttggacccccaaaattttcgtaattttattcttttgtgattttgttcaaaatatgttaaattcagtcaaattttgtttaagttataagtagttccgtatcaaatttttttgaaatttctgaaattttggcttttacgaaatagcggtttgtatgcgattgaaagcaacatatttttggtttttttatcgaggagatccaatcagggttcactttatcggttaggccgatcgtgtcggaggtcaccgaaatcccaaaatttcggtccgaaatttccaaaattttgaacaaatatgaccaaaattcatgaacaaattgaaaaattgaaaaattttggccaaagtaatatcatttcggaggggaccgaaattcggaaatttcggtccgaaatttccaaccttggatccaatcatgcatgtcacagtaaaaataaaatcaacccatagccccccggcactgcacaagttgtaaacggaaaatgaaaatgactggaactgaaaacgatggttgttttccttgtatttttttcctttttttatacttttttattttttagttttattaatagacctttacgaaaatatttccgaaaactgaattcttttaccatgctaggcacggtggcgctgcaagatgttgttatggcgcatgaggtgacaaagtgatttgactacatcagacgggttgacgtggccaaaagatttagatttagaaatacagttctattaataaaattttaaaataaaaaattctaaaaataaaaaaaattcgttatccttaccgtgaacagtgaccggagcgtgtcgccgtcgagcctcgccgtgtcgtcgtcccgcgcggcgagcctcaggagcacctccaggaagtcgccgtccttctccttcattccgtgcagcctgcgatggtccatctcggcgtcgaacagccggtgcagccgcgcaaacagcccagacagccgccggcgccagccctgcaggtcgacggcggcgagcgcggggaagaagtccgacaggttcgggctgccgactgcctccatgacgtccgtgatcagtcgctggaactccttcgacgcgccgtggtcgtcgaggctcgtcaggtcgtgcgagaagatggtgcgcgcgacgaggttcaggctcgtggtgaacgccacgcggccgatgtccaccgccgtgccgtcgcgcgccagacccgccacgtggtcgacgagctccgccaccttctcttgccggagctcgtggagcgcgtcgagccggcgcgtggagaacagctccgtcgccatgatcttgcggagctcgcgccaccgcggcccggggggcagccaggcgacggagttcctggcgtggtcaccggtggcgtcgggggttgaacgggtggcgaagacggcgtcgtgcttctgcaggaactcg

SEQ ID NO: 16278 - DNA, 3428 bp, Oryza sativa
ctgagatggaggactggacatttccagattagaaacccaggacaagggagaggctggctgatactttgtagctccttcatacacagatctcccaaaacacaggagtagggtattacgcttctcagcggcccgaacctgtatacatcgcccgtgtcttgtgtgtttcctgtctcgcgagccttccacatacagagagcttagaatctctcccggagtccccggccgaaccggcaaaggggggcctgcgcggtctcccggtgaggagccccacgctccgtcatctggcgcgccaggtagggggctctgcgagggattttctgagctctcgcactctttcgtgtgcgccaagcttttcctgttcagcccaatggccgagccagcaaaggcgcacgacctctccccgagtatgagcggtgacgatggggagccaaacccacgccgtcgagctcgtactccaccgccccctccacgccaaagtcctaggcgggagaaggcgctcgagagggccgaaggatccgcgacttcgacatccacaggaggtggagaagggcggcgagatggggagcatcgcctcctcgtctacggcgacggcagcacgccccagggcgcgctccaagctgcgggcgcgctcctacgtcacccgcccgtcgcccatgacccggagtctccagcccaacgttggctggacgatgtggccaaattggtcatgactgcacggcagcgcctagatgctgatgggcggtcctccgccaccaaggcctctggtgctgctaccaccggctccgcgtcgtcaagacggagggcgcggcgagcggcagccgctgttcgccattcggccgccactccttcgtcaacgcctccgacccaggaagatctgtgtggggaaccggatgctcgcatcagtatcgagcgccggcgtaatggccgacgtgctccccacgcaacggagggcgcctcctcgtccggagtgtcacctcaccacggacgcggggatcagccctccgtacccccggttggtggtgtcggctgtagagcctttgtggcgagccttcggaatgtccgttggcccccaaggttccggcccaccatcgccgaaaaatatgacgggagcgtcaaccccgccgagtttctccaggtctacacgaccgggatcgaggccgccgggggtgacgactgggtcatggcgaatttctttcccatggccctgaaaggacaagcgcagggttggctaatgaacttgccacccgcgtctgtccactcttgggaggatttgtgccaacagttcaccatgaacttccaaggcacatatccgcgcccaggtgaggaagcggacttgcacgcagtacagcgaagggatgatgagtcacttcgctcgtacatttagcggttctgtcaagtccacaacaccataccatgcatccctgcgcacgcggtgatttacgcgttcagggggggtgtgcggcacaaccgcatgcttgaaaagatcgcctccaaggagccccagactaccgcggagctttttcagctcgcggaccgagtggctcgtaaggaggaggcatggacctggaacccctccggttccggtgtggcagcttcggccgcccccggatccgctgctcagacagggcggcgtgacaggaggaggaagaagaggtcagcccataccgacgacgagggtcatctcctcgccgtcgagggcgcttcgcgggccacccgaaaggggaggcctgcgagcgacaaaaagaaggaagccgacgctccctgacctcggctacttggaagagcgaaggtggcgcgcggcccttcgagccgcgcgcaaccagcagagcctgcggcgctaccatcagcgccacgtccgggcccgatcactctgcgtcgacgacctcgtcctacgccgtgtccaaacgcgtgctggactgagcaaactctcaccaatgtgggagggtccgtatcgagtgatcggcgtcccccggccgggctccgttcggctggccacgggcgatggcacagagctgcctaacccatggaacatcgaacaccttcgtcgcttctacccctagtgggggtcgggtgtcaggtcttgggcttgggccaaccccgcacccccccgggcgtgcagggttggccgggggcttatcttttttctcttccgtatttcaataaaagcattttcgatttcctaaaggctgtatctgtgctgttgtttccttttgaaggatcttgacttgaaataggtcactcgtgttcaatcctgccctcgggggctcgggtcggctaaaatcgccaaacggggcccagaaccgagccgtgccccggggcgtggtgaactccgggggggaatcggcaaaaacccacaatcgggtcacccataaccctcggtcaccacgctcccggcctggccagtctcgacatgtggatctccctaggcactagccttgacccgcgccgtttgaggctgggacctgggcacgagcccttgttcaagccaagacacagaaggaccgtggcacagaccatcctcgtctcatacacagaacaaatgaaattgacacaaaaatttcctctttatttgattgcagattaaatcagcctataacaagaaggaggcccgaaggcctcggaagaagaaggaaaagaagaaactatttaaagattggcgggtgcctgggggctcactccgatgcacccgggtcgccagcctcgtcgccactgtcggttttcccttgctgatgcgcgcgatttgcgaccgccgggattctgcccgaagagagagagagcagggaggagaggcccccgagccgaacggcggcccaaggcccccgacggccggagctggctctccgcctgcttgtccgacggtgccaggcgcccccgacccccaggatggccccgaggccactgcgggaaggccgcgcctgtcgccctctgaccccgaggtcgtcggcacagaagccgagtgcgccccgcgtggcctctcggatggagagcgccctggagatgtggcccctgacgaagaagatcggccccgccgaaaggtgcagcggcccgtctacttcgttagcgaggccctccgggacgccaagacccgataccctcatgcccagaagatgctttatgctatcctgatggcttcgaggaagttgcgccattatttccaggcgcatcgggtcacggtggttacgtcttatcccctcggccgaatcttgtataaccgagagggtactggacgggtggtgaaatgggcaatcgaactctctgaattcgatttgcgctttgaaccaagccacgcgatcaagagccaggccctcgccgactttgtggtggagtggaccccagctcccgagctcgtctccgtccccgaggccagctcgagcccatcgctgctgcctcacaccgccctctgggtgatgtagttcgacggcacctgt

SEQ ID NO: 16279 - DNA, 1477 bp, Oryza sativa
cctaaccacatttattgcggtttggctgagcgtgtcacgccgcatgtaacgcagtgcagtgcactcgtttatccggtctgtgaccagtcacagaccggtcagatcgcgggttaggtggcgataggcgatctgacacacgcctcgccccatcccgtcaggacgagggcttctaggcgctcgtccccagctggagctagcgtgttacctcccagagatggcacgttagtactggtcagatatatgccaggcttcatcctaaccattacaggcaagatattgtatgaagaagggcgaacatgcagatggataaactgacgcgtggtggacaagaatgaccgatttgtgaccggtctgacactggtcatgtcgtcagcagacagccatgttcccacgtcgcgcctgcttccggcggaagtggaggtaggtatgggccgtcccattagaaggtcattcggacggcaaccatacaagtctccatctgtttatgaaaaggtggggtaagtccccacaaaaaagagagaaatggtgcatgtggtatccccttaagatataaaaggaggaccttgcccactgagatggaggactggacttttccagattagaaacccaggacaagggagaggctggctgatactttgtagctccttcatacacagatctcccaaaacacaggagtagggtattacgcttctcagcggcctgaacctgtatacatcgcccgtgtcttgtgtgtttcctgtctcgcgagccttccacatacagagagcttagaatctctcccggagtccccggccgaaccggtaaaggggggcctgcgcggtctcccggtgaggagccccacgctccgtcatacttcataattgttggactgtcctaaccgttgccttgacaaccaacatcaccgctgccgcacaaaatcaccatgaggagaatgtggattggggactcaagtagaagatggtggaggggaacagggagaaatggagctgggagaaagaggaggacgccggagctgctgctccactcctccggcttggagtgatggagtctcttcaccagccgccactagggggagaggacagggaggataaagagtgggttagggtttttttgtgtgagatttgctcttttatactagggaagatacttgagggctgttttggaccatgggctgggctgaaaattcaaattgggccgaatttttttggccggtttagtgttgtctcgggctggaccgaaatgggcgaatttcaccgaatttcggcccactcggtccgtatcccagaaccctgtccgaggtagctcagttttgtcctgtggtggaagcccggattcggccacaggagcaaattaaaggaagaagatagatctaactattggagtagaggaaaagaatggacggtaggcttgttgcaattcattgtattatattggtgcactttgttgttttcgtgtgttccgtctttttctaattgga

SEQ ID NO: 16280 - DNA, 1179 bp, Oryza sativa
aacaaggagttaaaaaacctgatactgacataagctcatcaaactcagtattcaattcatcacggaaataccaagatgtaccaagaccttaaaggaaaattctggtgggtcaacatgagaagggaaatagctgaatttgtcgcactccgtgatgtttgccaatgagtaaaggcagaacatcaaaggccagcagatttgcttcagccccttcggattacagaatggaagtgggaagaaattagaatggactttatcaccggtttgcctaggacatcatcggggcacgattctatttgggtagtcgttgatcggctcaccaaagtggctcagttcattccggtgcatactacctactcagggaagaagttagcagaactttacttggcaagaatcatgtgtctacatggggtacctaagaagatcgtgtctgatcgaggaagccaattcacttcaaagttctggtagaaattgcaagaggaattaggaacccgattgaatttcagcacagcctaccatccacagactgatggtcagaccgagcgagtcaaccaactattggaggatatgttgagagcctgtgcgcttgactttggtggagcatgggacaaaagcttgccgtatgccgagttctcctacaacaacagttaccaggctagtctgctaatggcaccatttgaagcactgcatggacggaggtgtcgcactctgctcttctgggatcagacagggcaacgccagttgtttggtacagaagttttaaatgaggcagaagagaaagtcagagctgccagggaaagattaagaatagcgcaatctcgacagaaaagctgtgcagacaaccgccgaagggagctcgctttcgaagcaggggattatgtgtatctctgtgtcactccgctcaggggagtacactgcttccaaaccaaagaaaagttggcaccacgctttgtgggatcataccagattttggaacatagaggtgaagtcgcttaccaactagagcttccctccagcatgcttggcatccataatgtgttccacgtctctcagttgaagaaatgttcgagagttcctgaggaacaggcaaagtccggatcacatcaaaattcaggaagatctgacgtatgtggagaagccgactcgtatcctagaaaccagcgagagaaggaccagaaacaa

SEQ ID NO: 16281 - DNA, 7347 bp, Oryza sativa
catccgcgacctctaccgctgccgcgccgcgctcgtcaagctccgctgccgccgcccatctccggccgcgcgccgtcgccgctagggccgttgccgtgccaagccgccaccgctgttagcttcgcctccgcaagagctttaccggccaccgcctcgcgttgctggaatcccaccagagtgcctctcttctcacacgccggtgagtcgcgccatcctccccatcttcggcgctgccgtcaagggttgcctgtggagtagagtcgcccgctgcagaagtcaagcttccaagttttagctcgttttatcttttccgctgcatttgtaatcttttatatttttgtatgatgtggatctgtatgtcaagaattgttgtttgtgtaccctggctggtcctagatagggatttaatgcacattcagcttcaaaattctggttcgtgaatttctgggcatgacatctccactgctgctctggttgaggaggagtgcgagcagcttgtcggggctagcggacacctcgcagtagggggcatctccaccatcgccaaaggtcgtagacgcgcgagctccgccaccggtggatacatgggtccggctccgtcccactcggctttgctttgtcaaaacggcgagaagatggacagaactacacgagggaagagagaataatggaggaagaaaggggttattaggtccaaaaaaattagaaaatagagtgaaggggtaagtagtggtatatgtcaaataaccagtaaattgtaatggcatgtctccaaatagatgaatagtaagggtatatttcaaaacagtgaaagttataatggcatggttccaattaacccataatatattatagatgccagtttcttaaagaaaaccggcacctatccagcgagccgagctgatcgagacagagaacccgagggtgtgaccaatcaagtggataaacatgtccttatccactcacccggtgccctccactcactcgtccctctctctccttctcctcccccattctcttctgcatccacaaaggcggcggcgttggagctgcggggggtggaacacaactaggtcggatataaccatgactaccttatgtattaatgaaccaaatgtacatatgttctacattaaatttacttgttatatatttgaacaaacattgtacacaatgagttttgtgtgttttcgtctgcagaggtacttgcttgggcggaggaaaagagaccaagcgtaacaaatgcatgtatgatcaaagaaattgattgtggaccaaaccaagaccttctccaagtctacttctacctcaccacgtcacttttggtccatagaagacaagagataaagttctacacgttttggattcgaattcgggcctcctagcagcatcaacatcaaacggacctagccgctgatctagaagtaattcagggcccatgagtacttgttcgaaagattatggagtctactttcagatgggtttggtcccacgtcaaaattcctatcgagctgccagcaataggcaaaacaagccacatatctcatccagtccgaatctgatttgggttttgggctttataattgtgtcgtgggcttagcccaagggggtgtgcaccctagggcaaccctaggacatccctaatcatattagtcaatagccgcaatcgtttaaagtcgggttttgcttagattaatctgtcaagaacagtttcgccgctatatcggtttgtggaatcccaaattcgagtgcttaatcattcatatgcaattatgttgcaatctatcttgttcttgcttgtgttcttcgattcgcatatagggattatccttctcggcgaggtctaccgggtttcagcatggtttataaccagaggagacgtggtgctgtgactgcggggctcagtagcatgttcgttcagaagaaggatcgaatttcgtcacgactccgtccaaatcgtctgtttatcaatacatatcggaagatcaggacctaacatcctcatcatttgttcagtcgcgtgactaccgtgggggaaaggccgccatcatcacgatccggcctcctcccctctagatctggttaagaaatcggtcggatatatctatttagtaacctccgcttagggttgaaagtgattcggataatttccatccgaccggaccttttttcggattcggatagtttcggtcagatatatccggaaatttttgaattcggaaacgaatttggatatgaaaacgaatatgatataggtgatatccatcggaatcggatatccgtcggatattatccggtaatttccatcggatatccaacttacacataaggctgccatagcccataagctagcccaacccgtgaggaggcaaatcagacttattggcaaaaatgaatttcgtgatactaaatgaactcatatgaaaaagttgtcaaaaacaaagttgtagaactcattaagatctgccaattttatttttttcatttctccatttgagtttcattgaactatataaaatctgaattttaaaatataagaaatttaaagaattcttcgggtagtaaatgatttcaaatggaaaaattgtcaaaaacttataaagatctacaacttttatgttggccatttttctatatgactttctttgaacagtttgaatttgaatttaaaaatatgagaacttcaaacaacattttcaaatactaaatgttttcaactgaaaaagtcatcaacaagaaagttgtataactcatcaagatctataactttatccaacaaaatgacagttttgccccttctcttcttccccttctgcttagtgcgccggcgcctgccgcatctgcgtcagtagtagtagtagcactgccagcatcgttggtcactcctccatgttctcgctcgactcagccgccaccgccacgttccaacgattggtggtggtcagcgtcaccgcctggtacaaggaagtgtccatgcatgaagtgcgggtgcaggatgaagaagtgcccatatggtggaatcggcctcacgttggctgatctctctagcggcggtggcggcggtggtggtggcatcgggctagcggctgggctcaccggggaggtggcggcagccttagacgaggaggtgggcgggcacttccgcatggcagacatcgcctgggggcccatccgcgccactcggcccgcgggacttcaccttcgtctgccacatcgtgtaccgcatgtccagcagccgctccggcgactacagcttcgatggcggtcggtgagcccggcggcaacggcttcgatggcggcggcggtggtggaggctacgacttcaacagtggccagctgcagagcaacaagttcgatggtggttggtgagtagcacgacgaagcgagcgggcggcggtggcgatggaggtggttgcggccaggcagtggcgagcagcagcggtgccgtcgacgacggtcggtgagcgcggcggcagcagctttacggcggcagatggtgagcggcgctgagaagcgggtgccggcagtggggattagatagtgctgagggcaatttggtctttttgaaatttctctcccatgttttgatcagaaatgataaaatattgtctcgggtgtcctatagcaaattacatgaattttgtggtgtccattagcaacgacacgattttacagtgtcttacagccaattacacaatttttaggtgtcccagggcaaattttgccaattatttattgcttcaaaatatcatttgaagttttgaaattcaaatttttaattgataaaacaaagtcacaagaaaaatggccaaaataatagcagtaaaaacacaaaaacaaggttgagcatgatttgagaaacatttaggacaaagaatcatccaatttggagtccatacgagtgagataaatgtaacatcctgaaaattcaagacaataaaaatcactaaaattttgaactttttaaaatttttgcgtcatgctggttgttatgattgctattgcttgccaaaccgtaaatggtcacaaagaaagtaaagtaaggatctaaaatttaagtaatagataaatttacgagaatataatatttaattgttaaccctacaaataattacgcacaagaaaacaaagccagacaaacggaaggttaataactaatttagattatgtattaattactaaatacttgaaccatgtgttgcgtgccatgacatctaaatacacatgaaatgatgaccatttataatggaactctatctataacatagtttcattaggagtaattaatgggatattactaaactataatggtctatataaaggtaaaccaattcacatgaaataatggtcatataattaaattaagctttataaaattatgtgaggttttaattaaacaattagattaatactgtgccgagtctcaatttactatttatagaataaatagattgaacctatccgtgtaaaatatattgctatacaactaaactcgaccaatctgctaatgtattaatcatgacaagtcgttatattaaattcaatattaccccaaagtcttcaaaaatatataagttcgccttagggccaataactcaaattaatctaaaaagaattcatttgtgcgataaataaataaatatgggtaataattttggataaattttgatgagtattcagtgcttaagtttagttaacatttaactaagtaaatttagagtttataggattaaaattgtatcggagataggctaaataggggtttaattaaggatagcactattcattgcacatgaggtgtttgatggagttcctagccaccctagccctcttcctccccactgccacgcctcgcactttccctagccctgacgcgccgctgccttgcaccccacgccgccgcacgccgtcgtgtcgccgtcgctgtcgccatcgctcagacgcgccgcgcgccgtcgcttcgctctgcgcgtgccgctgccgcgccccctcgcacgccgtcgtgccgtgcgccgtcgccgtctccggtcgcatcgcctcgagccccacccctccgcgcgtcacgtcgccgtcgcgtcgtcatcattaccgcgccgcgtgccgtcgccatcgccgtcccgccgactccactgccgcgccgtgcaccgtcctgtcgccgcgccgcgctccatcgcgacgccgtcgcccttgagccccgcgccgctgccacgccatcgcgtcaccgccgttgccatcaccgcctcgagccccgcccgcgccatcgtgctcgccgtcccaatgctgcgccgcgccgttccatcgccgcgcgtcgccatcgccccgagccccgcgccgccgcgccatcccgtcgacgattaaaagccggccacccctcccccgagccctataaatgccccctcccctttcccttccctccccacgccatttcccactcttctcccctttttcccctttcttcacctccaccgacgccgcattccgccgccgcgccgccgctgccgtgccccggcgcctcgcccccgctgcgccgcaccctgccgccgcgtccccgtcgaccccgccgtcggtccggtgagccttcccctcccccaccgcttgacgccgcgccgcgccgcccgccggttccagcagagccgtgtgaagagagagaggaagcagagaggtagcagagagagagaaaagagaaaggagaggagagattagagtgggccccacgtgtttagtgaatagtaatccccttcttaatctttattagttgagtctattacaagtgggttcgggttgttaaaaatctaattatagaggttttataatctcgagtctatgacatgcgggccctaccgggtttaatggccggtttgaccctagtcaaaggaatcgggcccacctgtcatttgcccatatgattcctttagaaagaaaaataaaataaaagaaaagaaaataggaagaccccacctgtcagtcactatagcctgtggataaggttgtattaaaaataactgaattaggaacagtaccatttcgcaattattagaattaattcaaatttgaatctttacactagcataacttattcattttagctccgatttgagtgaaacttgaacctaaattcatctaaattcacaagctttccaatggtatataattcactatttaataaaatatatttataattattcataattaatatcaagatgatgcataatagttaacttaaaaatgtgctaataataaaattgatattgtactttaagtagatgtcaaataattgtctttaacatgctttctcactataaaacctatgtaaactaactaggagcattgtttcaaattaattaaagcataggaaatattagtgacatttattagtctatgtccaaatataactaaacctatgacttataaattatttacataagtttagcctcatactttgtaactaaaatataaacacacttagatgaaccttcaacttgtctaaggagaataataactgagctagttgtaattggaccacttaaaagttagtcggtataatgtcatgtgaagtggaatatatatagttcggttgacatccattagttaacaaaacagagccatcttaatcacatatatcgtatagcttctagtaaatagcaactattcagtaaaggatccaatgattaaatattgttgcacacacatacattgtacatcccaatttagatgtacggcatatcaaaaacctacccttttgtgtatagtaaactaatgagtctatgacaaacatctatagtggataaaatactagttataaatcttgacctaatataattgtaaattaggattattcattgtaaaattatgtgatgggatagtccgtaaccataatatgattaacctaaacaattctaacatacaaagcatgggtaattgttaacctttataatttattttgacaagtaaaatatgtacataattaaaataaagcctccatcaataaaataataatacaaatgattcacagtaattatttgaccgatccaaatccatccggcaacagaacctctagtgtataaccgttctatttagatagatgcatgaatagccatttgctagactaaaccacatagtagccagatacgtatctcattcatactacattggttagctcctatatagaccatcatgacaacataaagattaagaaactttagcccttagcatgttggaatccattagcaagcgcgaataatatgagcaaccttaggttcgacctcaacaaatatattttgtttgtgcatatttgattgttgcttgaatattggtttttttttctcgcgtattctagactgtgtatcg

SEQ ID NO: 16282 - DNA, 2581 bp, Oryza sativa
aaggtttctccgaggagtaggcttcgtctgtaccgtcgaggatgcctgtggagtggtgttcccgctgcagttctagtcaaggcttagctcctgttgtctttcgttctttccgctgcatttatgtaagacttttatgatgtttgtaagacgtggatctgaatgtcaacattgtcgtttgtgtaccccggccggtcctggacggtgattttaatgcacattctgcttggaattctattcgggaatttctgggcgtgacactggcggagctcgggtgcaaggggaggccggattcgccgccgccaggccgcggggaggccggatccaccgtcgtcagaccacggggagggtggcatcgtcgtcgacgccgtcgaccgtgctgcctggatccctcctctccgacctcgacgtcgtcgaccgtgctcccacggctccctcctctccgaatgtgctgttagatttgaatttttctttttttttggcatgttgttccagatgatgcacatgttttgatctgtgtaaatgatgtttgatctgtgctaatgatgattttgcattggcaaaatttgctacaggacatccaaaaaacatgtaattagctggaggaccccgccaaaacgtgtatttggtgtagtgcatcgtaaaaaactgataattggctgctggacacacgtagcattattttattatttttagaggaaaaggagagagaaacaatgattaaagacaagtttgcccttggctcaaatgactccaacgtgggccccacatggaagtcccctctccctctccctctccttcttcccagacagtccgggtggcggagcggcgatccgcggctgcggtgctgaccacgttctccatcaggagggggggtttacgtgcagccacaccgccgcgcgctgccggccgtcggcgctcatctgcgtgctcagctcggcgatgagctgcgcgctcaagtgcggcggcggtggcccggcgctcgtctccctctcggcgtcatcgtatttacggtgtcctacaacaaatacacgtttttacggtgtcctccagctaattacacgtattttggatgtcttgtagcaaattttgtctcgtgtatttcgtgtttaaatttggaaatgagcagcgaatctagatgcggatttgaattttgaaattaatgaatcaatcggcagttgtatgggtatttttcgctggcggttgtgcagctgcatgggtgtttctttttggctcaaaatagattttcactggcggccgatttaacacagccgctagcacgctggcggctggcttaagacgaccgccagcgaaattgaattatcagtagcggtcaataaccgtagcgaagattttgatcttcactggcctttgcttcgtgggggctctaaatttcgccagcaaaaatctaaaatagccaccacgaaagataatttttgtaatagtgatattgaataggacccacctatggatattgcctctattgaagaaataagcttccttgtatagacttgacccacctagtaaacgagttacaatctacgttggtcatagccttatattttggaacggagataagagtttataactgtaaaaatattttaccggtccggtgtgtagaaacccctgttggcgttactaggtacgcctctcactgttaaaaaaaaatatcctgagaggctgagtgtctgagacacagctagagtgatccatggattatctgcaaagtaagtatatacaacgcgtaaatacgaggaaagccaagacggacgacgcgtagtgaacgagtcaaagcctgagatggctcaagaaagtagctgccccgcgcgcgcgacggcgatggcgacaacgcgcgcgctaccgtatccttctttcttccgccgccgtgacttgatccctacttccaatcagctactagacttccgctccatgtaaacgcctgagcacgcgcgactcacgtgcgtgctcacgtcacctcaccgcccggcgcccgccatggccatcatgcacgcgcgcttcgaggtctccgacgtcgtcggcggcgacggttccagcagcggcgggagcagcccggcgtcggtctccggcccgtccgacagcgacggatccagctgcagcagcagcagcgccgccgacgagctattcccggacgcgcgcgagcttccctccacctccgcctctgtgccggtgctcgccggcgtcggcttccacccgatctctccgacgtcgctgtccgtgctctccgacatcgacgtgcacatgcagcgcatggcgcgtctcctcccggccttcgcgtcccccgccgccgcgccgcgcgcccaggcgctgggtcggtggctcgccgggttcgacgtcggctgggtgctggagatggacgccggcggcggccggctcccgcggcgggaggtcgggaggagggtgagggtgtgggcgcaggcgctgagcaccatggaccgcgtgttccgcctccggcaccgggaggcgcgcaacccggccaacgaggccgcggcggcgcagctcgccgcgctcggcgagctggcgtccgcgagcgccggcgcgatgctgaggctggccacagacgtcg

SEQ ID NO: 16283 - DNA, 1910 bp, Oryza sativa
caggtttatgcatatcttgaatttggattgtttttagatcatttttctgatgcatttcgaatactcagttctgcagaaggatagattgatgataattagttaattgctgtatatataccaagcaatacataattagccaggatatacagtagtgccagccagacaaaactgtgataaaccaatactctgaaaaggattatttgcaattgacggaaaaaagactgaatttgctacagaatctgaacgcctaaagagatagcaaatacaaatcggatgcaattcaatacgaatctgtgtggtttgtgatatactggcaagatttaatccaggaatgctgagatcatgagctagaaatttgaaggcatacaatttacaaggcttctagtcgatgatgatttactacaaatctttcaaccaccttgccttctaaatttatcaaaagggactcctgccaagatatccaaagaagttggatggaaattctgatgcaaattgatacccgagacagaagaaaacgagaaagcgtcagtatgaagccacaaactcaccatctcaagaaggttgactatatgcaggaggaaaccatctgagcttgtaaggtcatcagggctgggatttccaatatacagcattgaattgtcttgacggaagtaaccacaatgacctcccgtgctaatatatgcattctgtatcatataggaatcaattacatgctatatcatcaatgtgaagctctaagatcatcagcaaaaagtgaagggaatgggagttaccacttaccactccatattttgcaaaaatacgctgaagaggctcatacaactttgttgtttccagtgtgtgcgcctcagcacaaacaaagaatggatcatatccaacaactattttcctgtcttaaagtacactgttgttactgttacgacccattgaaaccagcatatatgcttaagaggtcctaggtgtgaagcatgatgtcaaggctaacattctaatactataaagataccacaatataaacatgatgtcgcttatgtatgctactaaacaattcatttgtatagtatatatgcatgttgggagtttgcatttccattccagaaaattttacgctaaaattttacgctgcagatccgttagaaacagcttcaacaataacacacaaaattgtataaccagtagtgaacactcaccagttactgctggttgccgctattgattgctctagccatttaatttgttccctactagaagctcttattttcccatcatgaataggttcctaaaacatatgcagttacgaacagaatcaaatttataactacagtcatattgtttatagctaaatgcccatgctttgctacgggaaaatatacattatattgcctaaaatacataaaaataaatatatttatcatgaagtgttatgatgttacccatcatttttctatagggaataatagtaaccttaatttgatcttatatatggctatacatttagatttgattgtttcttaacattaagaagttcaaagggtagtttgcaaaatttacaatgggagtaggtggggtagcagattcactgccaccaccactatcttcttttaaaggagtatagattgtgtccaagttatttacaaagttctaaacacaaataaaaacaacgctagtaaagaatattagaaaaatggaaagaactagtaggcgcgtttgcaaggaggtgttgaaatagttagtacattggacttacaatcggggatgtaaattagaggccattaagaaaagatagaataatcagttaaccactattgctcttgatgctaacataattagtgaatagtattgtttgtcagataaggctgcctagcataagaaactaaaaaatgttgagaaataaaaataatacctgtaaa

SEQ ID NO: 16284 - DNA, 2714 bp, Oryza sativa
gaactcggtaaaccgcttgtcaagcctgagctgctgcagtccctacccacacaaatgtacaagttccatcagctgtacatggagatgagcgccaccggtagagagatgatcggagcgaggatcagggacacggacttcttgcaaggagatgacattctctggatcaatttcaggggaatctacgaactataccagctggacgccctcgacgtctctattatgagttgctggattttgtaagtatatcgttcagttagatttcttactatacgtctcctttaattaattaggtccttgtatataagtagaccatagaaaataatatactcccttttatcgttgtagaatggagattcaaagggcccgacggcggagggttttcgatactggattcatcgaccctcggaaagtaaacgtcgcaatgctcgaccaatatccacaagaaacagaggacaatctcgtccatctcctgaaggcgcagcattacaagacgttcatactgttgccatacaacacagagttagtttaattttactgtcttcctacataccaaatttcattcccgtacgaacttgctaagtgtttcatatgtaatgcatcccacgcacattgcagattccactgggtgcttttactcatcgacctggaggcctgcaccgtcaacgtatatgactcaatggataaaaaagagtctacgtttgacaaggttttcgaacttatagacaggtaccgtcataagttcctttgttaattaagaaaatcttgttatgttaattgctactacgaatcatagctttaaactccatgtagggcttggtatcggttccgtcatttggtccgcggcaaatggagagaaagacttaggcggaagttcaaatttcctgtgagtacacatgctctacatttatatttctccgattcaaatacatacaagtgtatattaattagatctctcgttgtttgtcatttatttgtagtgcgcaaagcaaaagcagggaactaacttgtgcggctattacgtgtgcgagtattgccactgccttgcagaccaaatcatcaccacaagagagctcgatgtacgtacaaataaattcaaaatttcattacgtagcgatttcttgtttaattactaatcaatttcatacactcatatagtttattcgcatgagggataacctgaccacacacaaggaatttatcgcggcggttcaagaacaactcatgggattcatcaacgaagaaatccttgatcccaagggtgaattctactacgacgaaaacacaattcaccggtccttagcttctgagctagcagcgagtactactacgtcgaaatcgtagctagctaggacatataatggattataattaatacatgactacatatgtttctatatgcatgtgtacacattttctataatgtaaatatattttgttcatatatatatctatatacatatgcatttgcataacatatatatatatgtataaatacatatatattatgaatgtatatacatataatataatataatatatatatatacatatatatatgtatgcatatatatgtattgaaacatatatatgcatggtttatatatatatatatatatatatatatatatatatatatatatatatatatatatatatataagccatgcagcaacaggggcatgcaaaaaaaaaaggtcagctggatctttagtcccgcctggtgttaccaaccgggactaaagatcgatctttactcccggttatttcacccgggactaaagatagcgatctttagtcccggattggtactcccggtttggaaaccgggactaaaggggggttacgaaccgggactacaaagggtttctccaccagtgctagtaagctagtaacacttgcatctatcgacggttgagaaatgtacgtgcgtacgtatggctttatgatcggagctacatatgcctaacgataaaccgtacaaaactttaaaaataaaaaagaaatgctttataaataaaacctctctactacaaaagaaagccaccttaaatcaattaaaaagttccaaaacttaaagtttggcaatgatcgatcatccctgggattacaatcgagctgcggatcatgcaaccacaagaaaatttacagcggatcagtgcaaccacaagcgaaactactatattcattctaaaatgttgctacttagaatgagatgtgtcaatattttacgacggagaaagtacggatcagtgcaaccacataggaaactaccatattcattctaaaatgttactacttaggatgaggatgtgtcaatattttaagacggagaaaataatagtactccctctgtcccactgtcccagaatataatgcctcctccaacaaggatgagtcagctagctcataaatctccacatcagcttttgtatgatgtggaagagagagaaaataaggagagagaatgcactatctcttcttcaagagctaagctcctaaagaaaatgtaagagaaattatggaacccaaagcattttaaacaatgtgctatgagacaatctattggagaggtagactttttgctatctcttgtatgaggtggacaagcatgagctagtgcactagctcaatcatgaaggaggcctaaggagttttagagttggacacggttattaagaaagtaggtagaagtgaatgatggagagttgtggttg

SEQ ID NO: 16285 - DNA, 1840 bp, Oryza sativa
atatatatatatatatatatatatatatatatatatatatatatatatatatatatatatatgtatatatgtatatatatatatatatgtatatatgtatatatatatatatgtatatatatatatatatatgtatatatatatgtgtatatatatgtatatatatgtatatatatgtatatatatatgtatatatgttacttcgcatttatcctaatacatttttttgtatcttgcagaaaagacgtgttgtcggagtcgtccgtcaagcctgagtggaagagctagccctagaaggaattggagcaggcaagtgacgtaataatataaatgattgttatatttgtaatgcaattaattaagattattagacctgtaattagacttatcatataagattgtgtagtgttctaatattatttgagttttaatataagattattttattgcaaattagacttagtatgacattattgactagggaattggtgcgactcctagcaattgactattgtagtcttaattagacttagcatatacgcacgaaacacttagcatacattactattttagtcttagcatgtaatattatttgagttttaatataatattactttatttgtaattagacttggtatgtaattattgactacggaattggtgcgacaagtagcaattgactattgtagtcttaattagacttagcatatacgcacgaaacacttagcatatacatgactattttaatcttagcttgtaatattatttgagttttaatataagattattttatttgtaattagatttagtatataattatttactagctagggttgtataatatacgtcacctagacttagcttatatcacgattcgtaattagacttagcacgtaaggttgtgtagggttctaatgtacgacatttacacttagcatacatgacttagattgttaaaacataaatgtctcatgacttagcatatacgcacgaaacacttagcatatacatgactattttagtcttagcatgtaatattatttgagttttaatataagattattttatttgtaattagatttagtatataattatttactagctagggttgtataatatacgtcacctagacttagcttatatcacgatttgtaattagacttagcacgtaaggttgtgtagggttctaatgtacgacatttacacttagcatacatgacttagattgttaaaacataaatgtctcgtgacttagcagatgtttcttgtatcaacagatggctgaccgcgatgaggaacagatattgtacgatacaatcgcggagggaagcagccagtactggaatgaagaagaggggaacgaggatccaaaccagtacttgaacgaggaagggaacgtggagagggatgcggaggggaaccagcaggggcacgtggaaagggatgtggaggggaaccaggaggaggaggctagtggtagtcaaccctccgttggacagaagagggcacgcgggcaacgaggtgcagcgaagaagcttgagggtcggcacatcataacggaagtggaagaagatggacgtcctagtgccccggccgaagccgccaagaactatgtacgtcacagcggttgggttgtgcgggataacgtgcctgtcagtacggtgtactggcgaagaacaagggcacgcggagatcatgagagctttgtcccagattcggagaaagagatgctgtggaccacaatgctcgagacattcacccttcctgcgggtacagaggacaaagtgaaaaggtggacgggggatccactagttctagagcggccgccaccgcggtggag

SEQ ID NO: 16286 - DNA, 1462 bp, Oryza sativa
ggcttagctggttatcacgacgctgtcatttcttctctgaacgatgacgtactcatttagatgggattcagctctgaacttgtgcagtttttaccacacaatgtttgctggagtagcttttctggccacaaattgaagtttggaattctttggagtatatgatgctccttctgataatgttcagaaggaattttggattagctcaaatcagatgcacatgagttctgttctgtgaaaatgatgagcactatagatgggtgaacaactggacattagaggttgaattgtcatgcttgtggtaaattgatatattcacagacaaacaagatgcagttacatgattttcttgttgtttccaaaaaggaacctgtcatggtttgtgaacctgttgtgtgacatggcttcttgatcttctgatgaggctgaccatccaaaactactccattttctgttagtgttagttacccacttgtgtggctgacaacataccatccacattttgtattcttgaaaatggattgatgtttcattcgtaaggctgaaatgttcctatcactattgctgttggaaatgtccacctactcctattggacatggtttgaatctttatgataactatactgtttatagtagaattgatattgctcccagtttcacctttcttatgctgactactggttacttctttacttttcagtgtttaaccactgcttctccacggatttctttgaagaagatgagctgaaaccgtacatcggaggcatcttgaaacagctaattggccgctattccattgactcattcatggtgttcaattttgagggaagcaagaaggacaaccaaattgcctgcattttctcggactttgatatgagtgtgatgggttacccacgaaactatgagggatgccccttgctcaccatggagatgattcaccatttcgtgaggtctagtgaaagttggctctcattaggccaggacaacttcttgcttatacattcagaacaggggggatggccagtccttgctttcgcattggcagccctactgctttacctccgaagatataataatgagaggaaagcattggaaatggtctacaaacaggcaccacctgggctagtagagcacttctcaccactgaacccggctccttctcagatgagatacttgaagtatgtgtcaagacggcacatgtcaccagaacaatggcctccagctgatagaatgataaatttgaattgtgtaatcatcagaggggtgccaaattttgatggaaaaggaggatgtagaccaatattgcagatttatggtccagatccttttgctcctaatgacaaaagtactaaagttctcttttcaaccccaaagacaagtgattctgtccagctctacacacaggtatacttttgttatatttactaatttatcatgaataatataacctttattacagtaagct

SEQ ID NO: 16287 - DNA, 5458 bp, Oryza sativa
  unsure (1)..(5458): unsure at all n locations
acacattccttgccagaaacttactcacttgcactagaatctcaagagcacaaactctttgaagattcatctccaagggagctaccaaaattggataccaccaagaacaaccccaactccgacctgccttcggcgaattcacgagactcagaagctgctggtgatgctgctgttgctgaatggtcagacaccaacacggacacgttcctgtcagatacaccttcaagcagctctccatcaagcccgcagaagttcgatgaagattccatggaggctggaattgttgagatccagacacaaacagcagaacctcaaagatgttgaagctgcaaaattcttcctcctgtaaattggggcaacactgatcactggagctgcccagaatgtagtcacatatgtcgatacatatacacctgcacagtacattggtaaaaaagagtggtttatccagaccacgaagcatgtatagctgttctcttcggtaatggtaaacatgtacaaaaatttcagattgcctccaaattttggagaatatgagttcttgccgcgatgcaacttggaaacaaagtcttttatcattttcctcgcaaaaaaaatgttctttatcatttgggatgtgaactacaatattgatgatggtcgaagttcatgagaaccaccattgcgccattacatagtgtggcctaagggcatgtacgaccacaattaactgactgtcttgtgtcaatgacggttgggctccacaatagggcggtatgacaaactatttgtcacttttaaaatgcggcaattaagaatttgtcactcgcaatatatgacatgtgaatccagtggcaaatagtaagagtgacatagttatatatctctaagattggagcggaaccccatctcgagcaagtttaagtacccagaagcgaaaggacctgtagcctagtggttagaagagcctcagtaacactttaggtcctgagtttctccataggagcgattttttcaggatttaacggctttgtgctttcagtggtaggtgacgtacctgtcgagtgtgcatgttcgaagatgctcataggtggtatgcgacgtactcatcgagtgtgcgtgttcgaagatgctcataggggtaagatttgcgtgcgtgcgttcatagagggtaggtgtgcgtgcgttgtgagtatctgcgttgtactatgtaattcttaaaaaaaaaagtttaagtaggcagaagcccatcatagtcagggctaatctccatggccccaagtatcggcccaaattgaacaaggcctcgtagcttgtaggtatcgggtttcggtccgggccggaaatgtcctgcactgacaggtgacgaatctcacagccctaaataacaattttgccccatatgatttccatgacacagaagaaaacctaccctcgccgccgccgccgtgatcgtcgaacggcaagagatacggctctccgtattgtgccggcgctcggacggcggccgacggcaagatgtcgtcgccggcggcggcggcagcaaatcagccagtatccgggtctgcactgagcatcggtggtagtaactagtaaaccctccattctcttgctgttaaaatacatttcatcccttaataatcatcatggaatcgttgctctgattagcgtgaaactctcctgaaagtacattcgaatttcaaacaaggaaaaaaagggggggttacaaattagcgtgaaacttcgctgaaatggttcgattctttgccaccaaacagaacggtcaaaaggattaatttgcacagattatcaccaagctaagcgtagttggaacaaaaaccaggggattactcttttgtctcagatgacagaatttctagctgcatcctgtttttgctcgagcgagtctgaaattctgaacagattcttcagagatgcgagacgattatcactactactctagctcatcgccattgctgatggaccaagctctctctctcctttcccctgtacacatgcaatgcaatgccagcgcgctagctagactacgagacggagtagcgccgattcctcgacgacgagctcgacgacttggacgccggcggcttcgccgacgacctcgggctctgcgagctccccgacgtgtcggagctcttgctgaccacctcgccgccgggcggcttcccgccggcccacagcctgtcgaacatccgccgcgaccgcgacgacagcgacagcctgctgctctggttcgccacgctgctcaccctcgccagctgccgcccgtcgtcgccgccgccgccctcgtcgccggcggcggcgagcttcaggctcccgagctgcttcttgagcagcgacggcgtcggcgtcggcagcgcgcgggacttgctccagtccccaccgcctccgccgccgacatcgtcgtcgtcatcgtcctcctcctccaccagaagccgcgcaatgccgccgctcgccgccgccgccgccgccgccgggttgttgccccccgccgcggcgcgcagctgctcgaagaagagcacctgcacgacgacgcggagcgggaggcgatcgttctgcgccgcgtggatgcatgcctccttggacagcttcttcacgtccatcaagctcgagatcttcctcttctccgccttcggcaaattcggatgcaactgacaaagtgacaacagattgcaacatgttcatgtcaaaaataatagtttagaaatcatatagttaacttggaggatgaaaatatgcatcaacatgcaaaataaatcaaattcaagaacaaaaaaaaagatggaaaatgatcactgtttgcatcatgattcttgtcaagcaaatataccttgagaaagacatcaatggcggtgtacagtccatcatgggttgctcttgctgcatcaggcatggaggtcgccactgcaacgaagctcgagaccgacaggtttggatcagaggcgacctcagccaagtatccatcaacaatcttggacagtgcgagcaaagattcatcgtcgacgtcggtctcgaacatctcttgatcaaggttgttgaggaagatcccatcttcagtcactccggctcgcctcatgaacctgccgacgagcgtcagcaccagctgtatgtcgtaggtggtcaacgccggtggccttgccgggatcaggaggtcacagacagaggccttgtgcagctgaaggatcaccctgtccatgagctcctccttcagcatctcaccggagccgatcaggacggcgaccttcagaagcttgaggaagaaccggcatgagcagcacgatgaccccttgtctgacggcagcagccagacgatcgtctcgagcagatggttgtacgccatggagtaggcgtcgtcatcgattgccgcggtgtcgaagcattcaggaagccaccttgaagcataggccttgagagcttccccaacaacatcagaagtgatccttcctctggacttgacagcaaccatgacacgcttgtagaggtctacatccagctcacacagatcctcaacccaccagtctttcggaaccggctgcgagttcttcctcgcttccacaatctcatcggacgacgccgatttccggttgtatgtgtatgaccacaccacattgcaggggttggaggtagccttggaagcaatggagtcaatgcatcttgcagccagcttcagctgctctgaccatggtagcaatgcatcagtggtttgcagcgctatgatcgagtctttccagcttctgaagatgccggagttgaggaacacctcgatcttgaacaccaggttgctcttgtcaacatcttcagtcatcccaagtaactcggctgcacatcttgcggcgacgacattgtacgcgttgagggtcacaaccatgccatagcagaactttgcacagatctcaaatattttcactccaccagggatgtcatggatgtaactttcatcagtgccattctggctggcttcaatgatcagcctctgtagaaggctactcttggatagtaaggggaactgaaaatgaattgtgaagtggtcanagttacagagtgtcatgtgtcataacagagggtttttttaacaggaaaatggccatgattgagcatcaaacattttgttggtttgctgtagcattctatctgtcaaacttgtttaacaaattgatgatatcttccatcgcattgcacgagcattgctgtcacctaccattgagaaggcttatggaaatggaggaatgatttaaggagaatgctgggaaagattctgaatgcaacatggttccaaattacaagtggctcttgacaaaatatggcactgtagcagcatcttctgatgtgctcatagctgtacattggcgcatgcattgttctaactcaatttcaagacttgccttaagacacaacagtataatctagctttgctcatgcagcagtgacagtgaaaaaaatggtttaagggattattaccttgtgcaggtagaaccttgcctcctccacatggatgacaatgtctgatggaagttcagacaacacatatctgcatcataagaatgatgtgttcagagcttagtggctgactaccacataataatagcatctcctagcaatgtacagcagtaagatgttcagattaacttcactaatcaaatgctctaaagaacacatctttcttggctgcaagctgcatgcctgaatattcttgcttaggtccagacatgcacatagccacatatacttcaaccaaaattaaaaaattaacaaatgcattttgctgttttaattatgtcactctctgcaagatccagtgggcgtggccaggttggttggttctatgcaaagggagaggagagcagaaagcaagaaacatttttatcaaggcccaaggattgcaagttagttataaaaaaagagattattttgatcttatcgcaacaacaactactactactactactactatgcctgccatgttttgtttgtacagccaaaagggaaacaccagcttttttcagagcaaaagtgaggtcgccttggtcaaaatgccgtgcagagaaacccacgtagctcacgagcactttgagcagtagttagccccacatctcaagatcacagtagaactgcttcgatgacttgaaaaataaaattcatttttggtgggtacactaatcatgaaaatgcaaagcaaagcacacagcaaagaaaatatttttcacttgaaaagcaaacctcttctactatcatcagataaacaacacttgaatctttatttctttcctgtttgtacaacacaagaacctgcaatgcaagagcagacgccaaggaaacaaaaaaccaagaacacgtctggagcaagctcaagaacacaagagcaggctaagccatttcgtcagagtaaccagaacagagaagaaacagagcgagaggaagaagaagaaacaaatccccaggagaacctctccatttgatcaca

SEQ ID NO: 16288 - DNA, 2215 bp, Oryza sativa
ttgcttccttgacaatggaaacacagagccccacatcagtaatcaaagcatgaagaacaccgacaactaaaattacaatgaagaaacttgcaggtgaaccatgctatgaagcaaatcagtgcaggatgttcacctccaagccattaccatctctcaatagaagatcgcttcagttccttccaaggggaagtgaccggcatgagtatgtctccttgaaatctgacttcttggaagaagtaaaaatcgatgcatacacttctttgtttgcatatgctggtgcatggtctccagccttgaaccgcttcaaagagggagcctcccccttcttcccattttcaagcttctcagcaccccctgccatcacggcagcggcagcatgcttactcccacttagcccatttcccaccttcttctccttcttttccttcaccttccccctctcctcctccatcctcagcctcaatgccgcaacctcgtcctcagttccgttgagcggcatcttgtccgcctcatcaaactccttatggcataccaagcacgccgaggtcttcacctccttgagagccttcacgctgagcacatggccacacttgcgaagcgcgaggaattggtacttcccattgaaatcgagcccggtgaccgggcactggaaccggacctcctcaccagccgcatcggcatcaggcttaggatgcaggtggatggggatcatgtccttgagacccctgatgtgtgagagcgccttggggaggcgcttgtggaggagcgcctcgacgagggcctccttgttgaagaggttacccaggcgatcggcgacggcgggcgcggcaagcggctcgccggagagcgcgcagcaggtgaagcgggagagccgcgcctcgttggggtcggccttgtcgggcttcttcgcgaggtacatggagaggtagcagtcgcgggactcggcgcccgtggcgccgccgtcgccgccaccgccgcggagcgcgcggaggcggagctggaccgaacccgacggcggaagcgacgccacgggcgcggacagcaggagcgggcggccatcggcggtgaggtagaacgacgacgactcgagcagcggctgcggcagcgcgcggaggaggtgggagaccgggaggcgggacggcacggtgaggcggcgcggcggaagggagaggtcgtcgaggcggagcaccaccgccctggtggtggtcgcgcgcttctccatggcggtggccgctctagggttagggtttcgccgctggtggggaatcgagacggggagagagatgcacgcggataggaggagacgagaaagagagagagagagagagagagagagatctgaaaggacaaaaggaaaccgaccttgcggaggaggaaagtggcggcttcgtggttgggccgcattgttttgggccgggagcgaagcggcctgctcggtttgtccaattccgagactgactgggcttttttgggctgttgaaatcgacatgttgcccggactttctgcgtctgcatgaacacgaactgtctgtcggtactaaacaatcggatcagtattgagatcctctaaccccaaacaggcaaaacgaagtgatcattaacgtgtgattaattaaatattaattatttattttttaaaaatatcaatatgatttttaaagcacttttataaaaaaaatttaaaaatatgccgtctagtagtttgaaaaacgtacgtgtgaaaaggagaaaggtagccaaagaactcagccgaaatgtctgtcggtactaaacaatcggatcaatattgagatcctctgataaagccagacgtgatcgttggcacgtactccctccgtcccataaaaaaaactagtactctgtccatccgataaaaaatcaatctaaggtggtttttgggcctattcagattgtagttaaaataaaccttaccagattttagcaatgctaaaattttagcaagatgacaatattgttaaaattttggcaggattttttgtgtattgaccaaatttggactaaacgtagacattttttttggcaattttatcaaaaaatggtatggttaaaaatgacatcaaagtgaataggcccaaaatgatggtttttatgagatggagtaagcctactccctccgttaaaaaaaaaaggcaaactgtgggttcccgtgccaacgtttgactgtccgtcttatatgaaatttttttataattag

SEQ ID NO: 16289 - DNA, 1217 bp, Oryza sativa
gtgggtcatcgccgttagacatcgccgccggcgaggtcgggccggcggcatcgagcatcgtctgcgccggcgcgccggcgtggcggatggacgggcgggagaggagcgacgccgatgaggtcgccgacgagatggcggaggcgagggagatcggcatcagacagagccccttcccctgcaggtactgcatcgccgtgcccatgtcctcctccatcatcttcgccacctgctgctccgtcacccgcatcccaccaccggtgccacctcctcctcctcctccgccgccgccgccgccctcgccgccggtgccgcccttgctcgccttgccaccgccgccattgctgctcccgttgctgttcccctgcacggacgcacgacgtcgcatatctcagaaccggaaactacacgcaacggcggcaaaggctcgccgtgtcgatgaacattggttgcttgcttgcttacctccgacgacatgctcgccaccagcggcgccatgccggcggcgccgccgagccggctcatgctgagaacctgcggtgtcaaaggcagtcacgatggcatgtctgatcgatcctagctcactgagctcaaacacacagaatcgattgatgatcaccttgacttggagctgcaggaacttgacgtagtcgatgatctcgtccagcatcgacgccttgtccgtctgcaagcaaaatcaaatcaaagaactccattcaatcacttcattttcttcatcaagatgtcaagaaaaacgatgacaaaattgggcacgaatgcgcccatgtgctcattcactgcgctccatttctatcagttggactgttctttagttcagaaaaaggaaacaaagaaaattcttcttgacaatgcaatgaccatatatatgattaattctaccagaatgtaatatttcagaagggatgagagttttgggatgtaaccttgttggcgtttgggactagctcctgcagcgatttcatccgctccgctatcctctccctccgaagctgaaaataacatgaacaatacacaaaaagttgagaagaaaaatggaaatgttgctcaagttccatttattttttggttgaaacttgaaagaggcagtaataattgtaagatgatttcgtgaacagtgacaggtttgacgtagctgatttgatctgtcagatttaagcacgagccagatcaagcattttctgctgtcgtgagtaaacatg

SEQ ID NO: 16290 - DNA, 15035 bp, Oryza sativa
agttaatctgatcttagtactagtaaattagtgtacccacacctatcaactccaacaactaatcccctggggatgcgtgcagctaatgattaaaccggggagtacaaaaaaatataacaaaacatgggatttggagccggaacaaatctcgtcaaacatgctgttccatgtacgtacaaaagcaccggcgattactctatggctgcttggggatcttttgctacggacaagcagctaggatctgaaggccagttggccccatacatttgtactaacttcgtcccaaagtacagccgtggatattcgtacccaatatttgaccgtctgtcttatttgaaaaatttgtgaaaaatttaaaaatatttagtcacatataaagtactattcatattttatcatctaatatcaataaaaatactaatcataaaaaattttcaaataagacgaacggtcaaacattaaacgtgaatagtgtaaaactacacttattttgggacggagggagtacacaccagcatgtactagtaggagtactacgtacgcacaggcacagcacactgcacacttctcctttgcagaaagtaagtactcctacacaagattctttatacatctcgtccattccaatcgccatgattaatttggaatctaagcacgcatgcgtggctccttctcttccttccttctcgatgcatatatattgccagcgaaatgttaggccaagccaaaaaaaaaattaattctgagtctgatccccttacctatatgtggtatgtgacatactcggatgtaatacagtttgtaatatctctactacggccgtgtttaatttttcccctattcccaactttccattatatcatatcacatcaaaaactttcctacacatataaacttttaatttttttttcaaactctcaactttttttaaacttctaatttttttcaggaactaaacacaccctacgttaaaagaggagtcgtcctcctcctctctgtcctacgcttctctagaaaaccagctaattaaaaaaaccctagaaaaatagggaaaaccataactatctactaaaaacataacaaagcagttttattttttttaatcctggaatcccccttatcataattttttcatattgtttacatttcgttatattttggccctgatcggcttcactagctacagctgttgcacaagtccaatgtttggtgcttgaaggggagttactgaatagggcctttgatattatcaatcgaaattttgttcattactgttatataaaaaaaacagtaactcaaactataagagtataaatcgacctatctagattatagctaaactgaaaaattttagggatagagtagcacaaatcaacaggtaaatggagggaatagttttcttttatgggaaaaaatcataattatgatactgaggtaattatcgtcgccaacaaaatcactccccatcttcctgcgccacccatcccatgtgttcatagcctttaacaactagtggctaactgatatagaggaattaattaacaagctaaccctagattattgttccattgaaaagtagtaacccctagactaatcagtccctttggtttgcattggacatttggaccacatgtgccaacaatctatctagctagctagctcatgatcatgcatggatcacacacattttttttcaattgttcatgattagggcgactatctatgatgatgatgatggatatgtagatgcatgggtggccgttgcaaaaatgtatgagtgtctcaaggggaccaaaggatatggagacatggtcctcaccctccttctaattaaacagtcaaacatgggattataaatcgtagtagcatttggaccacggggagatggatgtaagctttttggtctcctcacactttgttgttgtgcaaagtgtggcaaatgtggcatgtgatggatttcagtgctgaatctagttacttaggatatggcctaccatgtacggtatgtcaaccatttgtggtttttaaaatatatttcttgagattttgtagtccttgaggagggattgcaagatactacacttttaaatattaatgaagctaagtgctagttgagcctctagagatatttcagagacccaaattggctactcatcttcagttaaatactaggaagattgatgttggagcgctagttaggtatatatatgtatacatattatcaattgattaatcatttgtaatttatttcgtaaaaaataaaatcatttgattcatttactttcaaggatgaacacctgctagaggggaacgggggaggggcgagatgtggtgtatgtatgtctatgtttaccaggatttaaattctaatgacaataaatactactctcgtcctattatcctaaaactctttatattttagaatggatgaagtacataatgtcagtcagggagttgccgctgaggcactgacccggttccttttggtatatctgcccattcacaagtgtctgcatgtgtgtcttatatgtaaaaaaaacacacacacataagcacaatagacaatgaaataccgatttcccttaaaaaacaataaaatataaaaacctggtatggaatgagacacattatagtattataaactggacataatttcttgtttaaatttcttccacccagataattctagtactccctccgtcccataatataagagattttgagtttttgcttgcaatgtttgacaactcgtcttattcaaaaattttagaattattttttttgacttactttattatccaaagtactttaagcataacttttcgttttttatatttgcacaaattttttttaaataagacgagtggtcaaacaataaaaaaaaaacttaaaatctcttgtattatgggacggggggagtattagaatgtgttccatttcatacatgtttattgaatggatggagaaccaatcaacgtgcaacagaccatcatcagtatgctctgaaaccatccgctacctggccggctgaacaaccttacctcgcaggtaataaccaccaactcctgtctgcatttttacatttgctcacatctcacatgcaaagcaacatgcctgcctacctcccctcctgggctccctgcctacacggcgcagcgcagcgcagctctcttttcaggccgcgcgcgtcatcgccggctcagctctcgcgacaccacctgcaaacccaaactattccgcctccctttttctgaatcctctccccctcgcacggtacgatcgcgccgtgcacgtacttccctggtctcaaaaataaactaaccttatacgaaatatgatatatattctattacgataaatatggatagaatgtgtgccacgtcccgtatgaggttaaattgttttggcacaaagggagtacgaatctaatcttggcgtgcgatccccttttggcttagtgacgatcagtcacgtttagctaatgtcggtttggtgctgatgtcttctctctcaggtgttgtgcaatgagcaaccatttcacggtgtaacaatacaactatactacagttacatttgaaagtctttttcctaaaaaaacttgataatttttttaacactttcctattttcctctagttacgatcatttttttaagattgtaatcttgtaattttttacgatgcgttaaagaaaaaaaactactccttccgttctaaaatataagaacgtaggactagatgggatatttcctagtactatgaacttagacagtccaaattcgtagcattgggaaatgtttcattcagttctaggttgttatatttttggacggagggagtagcttgccaccagcccagcaagtgtaccctagggaggagggaggggagtaccctggaaaaagttgcgagtgacggtagcttttgcagtttttgctgggtgggggactaggcattaggcacggcagcatcgcaggcaaaaacgcatcgctgcgcctacaagcttcgcgtgaagaactgcacggtgcatgcgagagatcacaagggccgccgtggtttgtgcgtgtgttgccgcggagaaagagattttttttttctggtgtactgtgtgcatagctgtaactgtactccgtcggtaaaaaaaaaaaagcaaaccatggatttccgtgtccaactttgactgtccgtcttatatgaaatttttttataattcgtattttcattattgttagatgataaaacatgattaatattttatacatgacttgtctttttaatttttttcataattttttcaaataagacggacggtcaaacattggacacggaaactagggtttgtcttttttttttttggaggagggagtacgtttgctggtttattacacacagtgagatgcggtatcaacgggtgaaatttcactggctcttatagctactttaaaacacaggaactggaaatccaaaaaataaggaaaaaaacgtagaaagaaaaagtcaaaacatatatgagccccattacgatgctctatctactagtcaagactagtagaaagcaatcttaaccattgatatgtttggttgaagggttcagaactaattacactaccacctcatctaacgataatagaaacgtagagatattattataaaaaatatatatggagaggtataatcgtcatttagctgtggctagaccttttttttcttctttttagctttttttatggaatatgagtgatgccaatgtaatggatgatcacaaatcgatctagctaggaaaacaaacataaatgacaaagttacccctaatcactgtattggtaaaatactaatttatccttaataacaaacgattcagattattttatcaatagtataatactatcattagagagcaccagaatatcgctcctaatatatacaatcctaaggaattgaaacacacgagaatttttgtgaaacagtttgtttgcatacctcatatggaaaatattattaatatagagttgagaggaaaggtaaaaataccataagattcgagcttatgtttgaaatccttcaaaaaaaaagggaggaaattaaggacttctgtgagatttttagccaaatccttcaaatcaaatagctccataagattttaatcctacaaatttcatatgaaaatcctttgttccaaaataaccctttgtaagggaagatgtacatgaatttcgcacgaaacagctcaattccggtttccaattagatctgaatggggctaggtagttgatcagttgatggctggctgaaagcaggtggcatctgcgcggcctagggtttgactatcaatgtattattacagcatgaaagtgcatccatctcaagcaaagcaagcgctttcagtttcagtctttcagagaatgggaagttacagctttacatgttgactgatagacaatggctgaccatactgcaagctaagtccatttgtgagtgtgacgatgcatcgcgtgagaccgattgaccaaacaaaaggcatagtatgggcctgtttggcatagctccagttccagctccacccctcgtagagctgaagctcagccaaacagtttcagctccaccaaaactgggagtggagctgtgtggagctctctcacaaaataaactagagttatggagctgggtttagacagctccacaactccactccagactcaactcctagagctaaattgaggagttggagctgtaccaaacaggccacacttcaggctccaaaattcgcccaaatcatacccaaggggtacatttgcgatggctgtgaaagttgcagggctatttggctgaccaccttagggcctgtttagttcgcgaacgaaattttttggcgtgtcacattggatatacggacacacatttaaagtattaaatgtagactaataacaaaacaaactacatattccgcctgaaaactgcgagacaaatttatgaagcctaattaatctgtcattagcaaatgttttctgtagcaccacattatcaaatcatggcgcaattatgcttaaaatattcatctcgcaatttacacgcaatccgtgaaattattaattttccatatataatactccttgcatgtgtccaaacattcgatgtgacatggtgaaaattttttgtttggaaactaaacaagaccttaatttgtctaagcttgtcataatttgttttgactgacctgccaaagggcttggctaacaaaactgaatccatactttagttagttttaggcaagtttgccttctctctctctctctcttttcaattgcatatgggacgaaaaaaggaaatttatcataaatgtggctacaaatcaaacgtgtgtctatcttgatcaatttatctaacttaagctatggtaaacttagataaattgtgtctatcaagcaagcaacccttagtagtagtaacatataaagagcgatatatgattgtattgtgatgagacaacaacattacaaaatgttcactagggttctctctctagatgatggaaaaacctgatctttattttaacaaaagaaataagtaattattactataaagtttgcagcaccaacaactacatcccacattcaatgtgaagacaagaaccaactaacacaggatgaaaaaacattattcacgaaatcctatcgctaattaaatctccatccatgatgataaatttttgtatgactattgtcagcggaattcctgcatacaagctgaacattgtccttatccttctcacatttttatagttgggttcaaaaccaaagtcagtatgtgaccaaaactacactaaggaagcagtataaattagagaaaaatgtaattggcaaaaataaaagacatactaagatatatggtttgagttatgcagtgattttgtttgacaacagaggagctctaaaacattgaattaactaaagatttatcaacaaaggctgcattttgattggattctcggctaggctactccatcattgtccgtgagtacgtttcctgaagacccaaactactaaacggtgtatttgtacaaaaactttttatatagaagttccataaaaattcaaataaaacaaaaatatccacatttataatagtttctgaatgaatcacatgctaatgacccatcttatttcgcatgccggtataagcccaccaacaaaaaaaccgttccgaacgaagccaaccaattagaatttggttcatttccaaaatttcaaataaagagtttaaaaatatagatagctatgcatttacccaatttttcagccactgctaggcctgccttttcttctccccctttggggtgcataagtgcaggggatgccactctaacaagagacaaaaagaatgctctaccttggcctacccagccaagttggcttctccaaagcagcacctcctcctgctgctgacgctgcagcagcgccaacctctaggatttcaccaaaactcttttgctgaaaccatctgtgtgtgctactttcttcttccttttttttttctcttggtgtgctgttgtagttttgttggtcaattgcattctactttctctcttttcttttggtttcttgtggatgttttttccctttggaaaaagttttcgtactcctctgaatgttgtgtgtgattgtgctcctaactcgtctttccatgtcaacaatatccaaaaatccctttgtggattcgaccttattggcgtgtgatatgtactttgttctctgccaaacatttgatcaagatgatgatgatgatgatttgtttaagctaacacaaaaggttcagagatgccattcaaaggaaaaacaaaagaaggttcagagatgttcgtttggcacctttcgtaaagaaaggtatcggaaaatatgtctttctgtttctatttgaattgggactatctacaaatcattcgccataaaacgaacccaaacgcagtcggatttttctctactgctaatccatacctaacgactcagtggacctccaactacgtacacccttttatgattaattagggactagtacgtattttattttttaaaccatatgattaaaaacacataaaaattacaatgtaattattctataactagtaatgtaagtggtatgtaattatagtgtaagtggtatataattacattgtaactgtagtgtatgtggtatgtaattacgttgtaagtgtggtgtaagtggtatgtaagtgatatgtaagtgtggtgtaagtggtatgtaagtgatatgtaagtatggagtaagtactgtaagtacctcgtgaatgaattttaacttaattttggcattgaaatcattaatcctattatgctgagttggttagtcactctgtctaagaccgaagagaccagagttcgactccccaccactgcgcctgaatttttttcctttgcactggcgcgaatctcgatgaatatcgtacgggcaacaattcgactgttttttcttagaaaatctggcgacacatttatagcaaatccgtttgaatttctgcgatttttatgcaaagccacacattctttttttaaactaaaccggcaggagagctgccaattatatttttaataagcagaagtaaaaaactagacgggttataagaaaagaaaaaccaaccacggactggctgaacagttacacagcacatgccagaactcactaacagctgaaaccgctgacggagccgtgtattccttctgcacgatttccgctgctccaaaatcattcatatgcattgtgggaaacgatgcacgtggtgatatatcattgtgggatcgatgaaaaatatgactagaagatgatggtggagatcgatcggaaagtttggtgatttgaatgcacttgaaatcttggaacttgttcgtctttttagaatgactgcatcagaaagaaaataatggattggaggatgcatgttcttactgtcttgcctcctccagcaaaaaaaactaaacctttacatgcatgtgtagcgacatggtgatgacattgtttgatggtgttgagatcgttttatttcgtgatatttttctctttatttataaaaagagcgcacagtcgcacacgctacacatacgaataagccaataaggtaattttcgtggaacaaggagtggatattaaaagttccaccctctccactcgaaaatattcgtatttttgttgtttagcgaagaataagagttaaaaagatatccctgcattcactccaacgatcaatttttgaatttttaatcgcttagattccctcataatcacttaattggctaaaaaattcttagattcgatgcattgaaatcagtgtccagaaatacttatattctgtgtaaattttgattattaatatatatatatatatatatatatatatttatttatatgatacacatatgggactccatggtacccgggctccaaggtataaaacacacaaattttctcaaattttttaaaattttcaaattgtgagtatatacctaggtatatgaattcgattcatacaaatacttaataacaaaacaactcaaactcaactttatttcacaattcattattacatacctaacgaattatatgtttggatgttatatacctagaaccaaaatctaacgaaaaaaaaagttcaatctcagttcaaacttgtttgaacttgttagtaaagaagttaatgttcatatctaaacatttaaaaaaaatttatactcatttaaattggatatatactcaatttaaattttggagcccatactccatgtagcactagttaatttacctatatatatataaaggaaataatatatatatataatatattgaaacatactcgtaaaatggacgatttacaatatattaccactacttatagagttgtaggtagcataaacattccatatagcctttgaggctttggtgtagggtgtatccaaccggagctttgccttgtcggctccgggaaaaggctacgaacgcagccaactctacgagttatccttgcaaatttccaaacgtgatcgataaattcatagccacacaaaagctaactagcctcgtcgtctccaagaggattgttttgaacatttgatggtctcacctaaacaatcgttaattctatatttctacgtcatgttacgaatttatctgttttacccatccctaaagtacgtgttgaatagagaattaagaagcatttacatgtacatgcctgtagcgtggatgtacatatgcatacgcttatataatacgtgtacactcacctttcataaattgatatgcacgtatatactatctctagactaggatattttaagattaataaagtcacatggagtattttccttggtgaaacataggcactcatataaacgcgcggacacttacccctaaaaatataaatctgtacactgtacaccccccctcccccccgcgccccaaaatgagcacctccaaagaccgagtgaacttatctaaaggtttacgaagtcaccgtagacgtttcggtggtgaaaaaagaatcaaaccagcttgatcgtttctatatcacgaatgaaaagaaacacggtatatattaaatgtatcttttcattgaaccgagattttttctaatattagttttacatagtctcacagatcacctatacatttgtccacaaattttatcctaaaaattttatagatgtaattatagtataatcgtgatttaattacactgtaacatatatgtaactttcaaaattttctttgtaacatactatttcagtgaaaacggaggtcatgggaacgaatcctctcacatatatgcgcacaatggcttttttctttcttcacttgtataaattttgaaacaatttttttttcttcgcttgtacaaattttgaaacaaatctaactgttcaaaatcatgtaaaagttacatgcaaataatattatagttacatacaagttacagtgtaattacatccaagttacagtataattaaatgattgtactgtaattatatctgtcaaaatttagaagaaaatttatcgacaaatatatagcaaaattgtttctattatctaattttttttcccaaagtgaacataacccacaatgacacaaggaataagttcactttaggtccctctatttgtcacccagtctgattttcgtccctaaactgcaaaaccaggtataacccatcccccaacttacgaaaaccgagtaaacgaggtctctcggctgttttgataacggttttggctgacgtggcgtctacgtggctaatttgactcggtcttcatctgacgtggcaatgacgtggcgcttaagtggcaattcgatccggaaaaataataaaacatgtgggacccacatgtcagtttcatacacaaaataataaaaatggtgggacccacgtgggccccaatgtcatcctcactcctccctcttctctctatcctctcaatctctctctactctctcttcctaaatccctgtcccccctctctctctcctccctcccctactgcagcgagcggcggcggccggccggcaaggcgcgacggcggcgcgccctctctctcctccctccccttgctgcggcgagcggcgaaggcgggtcggcaaggcgcacactgcggtgcgccctctctctactccctccccttgctgcggcgagcggcggcggcggcgagtagccgccggtgcggaccagctcggctccctacacagcatttgatcggggcagcattaggactggttcaagaagcggcgagcaatcgggcgaagagagaggtggctcgccgatgcacagccgcatcagcgaactccggccgatgtcgcggataaccaggcggccgatgagcggcgacatgggtgtgttcagggatgatggatcgagctatggtttagacaacgacgtgccgacgtctgctgccgcgagctaccgccgccgggcgtcgcctctgagctcccaagaactggaggaatctgtagacctcccattgacgttctgatgctgtctgcctcccaatttcagcctgaaatacataaataagagagtaaatacaaattcattttgaaccctctctggataatctgtgattcttacagtcatataatagaattattatgtgatgtagctcggcagcatattgcacaagcagcttattgcccaagaactatcgtcgtcgtcgatggggtcgtcgggataccaaccgtccgaggcatcgtcgtcgtcattgtacgaatcatccggcgcggcgaggtcgccgttgacggacccggtgttccagagggacctgctgcaggcgctggacaaccttcggagggtcatcgctgcagttgagcagtcgtacggcgtcgaggcgcacctgcaacaagccggcatgcttcccaagagcgcgtcctgcaacgacgccgacgccggcggcggcgacgcgtacgcagcagtcacgcggcgcaactcccgcctcatgcgccgcctcgagtcgcagctcgtgcaggcgctgccccgggacggccgccgctcgccctactccatcggccggagagagggaagggatagagagaagaggggagagagaggatagagaagagagaagagtgaggatggcatatggggcccacgtgggtcccaccattttttaattattttgtttgtgaaactgacatgtggggcccacgagttttattatttttccggatttgccacgtaagcgccacgtcagatgaaaaccgagtcaaattagccacgtaggcgccatgtcacccaaaaccactatcaaaaccgtcgagggacctcgtttgcccgattttcgtaagttgggggatgggtcatacccggttttgcggtttagggaagaaaatcagactgggcgacaaatagagggacctaaagtgaacttattccatgacacaatgccaccacagcaaagtcaccacaatgacacaatgccaccacagcaaagtcctcgcctagcccaacctcccaatgccaacccgtggaccaggcccagcaaagaactacgtctcagaaaccgcctttgatgggcccccgtaagacagtaaatctctcggcccaaacctagcatcaatccggcccatctcagtcagtgcatctgggccacgtggcgcttcgtttctttcctcccctacgtgcgtgtcacgttagtgaacagtccaaaagcccaaaaaagctagcgccaaaaaatcaactccacttcccggtgcgatccgagctcggaagattccgtcctgagacactgacctgtgggcccgacgtcagcggggcccaccttgtcattggccaatccttcgcgtacggcccgcgagtgcggttgcgcggcttttcgcccaaggccgaaaagcaccttttctccttcgatacttttctcacctaggccgaaccctaccccgctgcacacgtggacgttggtgcgtggggcccatgtaccgtgggtcccacggatcagtggctcatattcgaggaggagttgcaatgcacggcgcgttgagcgagtcgagggtgtcagaactcagaggagcggagacgacgagagtcgagaggagacgagagcgacgacgcgacgcgctcgggtgagcgagtgagtgggcgaggaggcgcggcggcggcgccggggagatggatttcgtctgccccggcgatcccgcggtgagcttctcctaaaaccctcccaatccccttcctcctcgtcggagtcgaatgctggagcagcgatcatgagagtttttttttttggttttgttttcatttgaagtgatgttttttttttgggtgcaggcgtgggacgggaggcgattcaccccgtgtttctccgatttatatcctttggtttcgttcgagaaatttggtggtgttcgtggtctctgcgatggcggttgatcgcgcttcggcttcggcgcgtttgtgtttgcgtggtttattgtgttgtttaggccttaacattctacggtgttgggattgagcggaaatgtggttgcggctggtgctgccgttgtgctcttcatctccaggaggaacgcgcggagaactgaggtagtagatctgctctgtttattgccctttgtcagcaaaattcacgagtacaaactacaaagtcgtaggaaggaaatggataatcggtttttgaattcacaatgtctatggaaatcaaacttcaggagtacaaaggtgtaggaagtgatcactagcgttagcggggcattggcttaatttccaacaaattgttcacatgtttgctgcaatttcttttgttaggtatctgaagtgtgaactagtcatacaaatgtttgtttcatagctaagataacatcgtatccagagtaaaaaaaaacattgtatcagcatgtctcgcatgttggatgtgaattggtatttcatatagatgaagcttttatggttgcattgctgattgtttctgtttttggaatgacggtgttcagtaacagatatggttgagattataaacgggatagtggaagctaaagctatttatattcacaactgatggtatgagttgttaggaacttaggatagcgtgaacttcaagcataatgatgtttttgtgcacgaagtggcaaaaacaggggtcattcactatacttctactaaattaaatagaggccgagatccttttattgaatactacctccgtttcaagttataagactttctagcattgtccacattcatatagatgttaatgaatctagacacacatatatgtctagattcattaatatatatataaatgtgggcaatgctagagtcttataatatgaaacggaggaagtaacttatttggactttgaaaccattgggtttgctttgactcaagaaaatcttatcataattagtttcagcaatctagttcgtattctatgtttttgtagaaacaatacttgaacgttctttttcttgaaaagaacagtaggaccaagaaggtccaactattaatttattataaatgaaagataaaatgaagcactcaaaccatgttactt

SEQ ID NO: 16291 - DNA, 1119 bp, Oryza sativa
taagctccgaccggcagagagttctgacttctattcttgtactgccttgcctcacgctcgattaatgattgcccaaaaagctatggatcgtatctgtttttctactaacccgttattaccaacgtgttgtgttggtatcaaaggaagtgacagaaattccatgtgaactgcatgatgctgttcattgacaacaacgtttttcccttttcttgaaaagaaaaaaaaatgaatagctgaagaattgttctaacagcctactctgcatttgcttttctaatcattctgttttctgtgaagatggagagcatagcaaaggcctataaagtcaagtttgtggtggatgttgctcagctaggggaggaagacccactttggcaaaatgtaagcaactaacttgttctgacagtacactaagtagtaataggtacaatggagttttgagctggtccaagtaattcaaccaagggtgtgtttagttcacgccaaaattggaagtttgattgaaattggaatgatgtgacggaaaagttggaagtttatgtgtgtagaaaagttttgatgtgatggaaaagtttgaagtttgaagaaaaagtttggaactaaactcggcccaaatgttctgaagttccttctttttgtttctttcagggttccctgtacttccaggctctgaagatcccctggtatgcttgttgtttccgctttcttgctagcttactcgtcattaataaatttaacaatggcagtatggttatatggttgcattcttatgggtgtgttcggcaccccattttcccaaccgatctcccttgttttctgcgtgcacgcttttcaaactgctaaacggtgtgttttttgcaaaaagtttctatacgaaagttgcttaaaaaatcaaattaatctatttaaaaaaatagctaatacttaattaatcacgcgctaatggaccgctccgttttccgagagtactgggaactggaaatggcgaacacagccatatgcacattacaacgtgtaaaacttcatctttttcaggtattccactacatcatcccatggacagatcattggtaattttctgaagagagtgatgatgccatatgatcaaagtctagaaat

SEQ ID NO: 16292 - DNA, 1478 bp, Oryza sativa
aatgttcctgatttgcagaagagcctggacccagcttcggaagctcagcactagcagcggtttcactaataacatttctcttatccatgttaagttcaccactaccagtatcggctccaataacgtcttgcttgttttgcttctggttattatttttaggactgtcactatcataggcacgtttccgccctctgggagtacattgcacagtttcagacgacgttgttgttgatgttgatgcctgctgctcgcttgtgttgttacctgaacaagtggcattggccatgtcctcacaaactacagaccgtcttctagttctattgcatttctttttcttttgtacctttagtgaacctagcataacttgtctgggcccaagccacatgttcatgactggatatctcacaagtttctttgacttcaaatccacccttttaggtgtgttgctattgcacgaatcagctgcagctaccttcatggaaacttcagagctagtctgttttctggcgttgactcgttcaagtcctgatactatattgttctgcacaaaagccagaaacaaaatatacaaatcagcctatatgaaccttatggggtcaatcaaaagtctacaggatcatatgggatagtgacacataataagggtaatggtaccatacctcacttataggaagttctttcaccgttttgtcatcttgcttgatggatttttgcaagccacacaccttctcactggaaattggatccctgctactaggtacaacaccatttgaaacaatagcatcctgcagagttgaatgaacaaaacaagtcacatagcaaaaatattaccaaaaaatcagcagtgatcaccataagagtaaacataccttagttgggaaagtttgtgcagcaagccctgcccctgtgtcctttccatgggaagctggcatagaaaatggattttgatgctgggatgtttgtttatttcgctcagacaatatcgcattgccattgcccagggaagaggtatcggttaagccatcaacctttggttgcaattcctgcgacggaaccatggccactgcttggttcacaatcacatgtgtaagagatgcagatcgatctgatgaagatacctctctgtgaccagttgaagtaatttgcttagattgagcagataaggtagcaccatcaatttgaggtgcagaagctttctgtgtggaagccaggccattgttttcagaggctttaggagcttcagttttgccatctttcttcaaataatgctctcttgaagtcttgattgagttcccattgcttatgccgtgcaacctcttatcgccataaggagacgaggaaccgttcaattttgcttcaattacgccgctctggatcatatcactcagacctgagatcttttcaggtattgttctcctggctggcatattagcagtgatattatccttgcgtggagtcggattcccaactctgtcacg

SEQ ID NO: 16293 - DNA, 4972 bp, Oryza sativa
tttcctgcagcgttggcactgatattgcttttctcccccatctaagagctcttccgcagtgaaattttgaagtgccctcaccagagacgtggccttaccaatatcaaggctgagatccaagaaaggatcaaatttgttggagcaatgtgagcactgtgtgcatttcacctggggcacatgtacatagccaagcagtgatgactatgaaattgggacttcccatgaaattgccagctccagtcttactgaacaatgtacagatcatacctgacttcttaggcggccaccaaatattttgtgaactaagctcttctcatatgcactaggagactcacttggtactccagaaggtagacaacatttatgcatggattcaagtaaattaaccattaactcatgtgcatcctcctgccttgaattgcggaaactacgggagatgcctattttgtagtcaaagattccaattccatttctttaaaaaaactagaagtccaaaatttaaatcaataataggtgctcagttaagctaaagaacattgaaggatacagcgcaagttcttgacaatctgtgatggcgtcactatttttccagttgactgtagagcagtcttaacatggttttgaagagcacatagtgcacaaaatccagcagtacgaccttaagaaaggggaaaagaattagcaatagaaatatcttgtcgcaaaattaagtgtttctctatgcttacttgaacatgacagaccatagaaaacatgcttgcagttcatacagaacatgttacatagtgcagaaatattggtgcaacaccaatctagaaaaggcatgatcagttcatactcgatacctcatatattgttctacggaagaccaacgtaactactctttataagcaggattctccccttcttatcattcttatcctttttcagcctctttgttcaagtgttttattattgcatgcacaactaatgggtctaaactttgaaatagaattaccaactttttcacgaatttcttaatgggcaatacctgtttatgggttaaacaacattcaacctgaagaagtgttgaaattttccagtaatgtaaaaggaataaccttgagcctcttgcaatgtaggtatcattatctagggcagttatacagcaattacagaattactagcctaggctatcagcatagcttaagcatgcagccatataacttgatttcaaggtccaggctcaacttatcgtatgacataaagaacattcacttcagttcagttactactaggtgtggaatttacatgttcaaaagtaacatcataacattggcatctcatgcaacatgccaaatcatccggttgaaaactgtaacaatacttacatgaagacttgtgcttcccgctctgcaaataggccgcaaatggttctgtgtacgtcaagcattgcagcaccgagttcaggtagcaagtgttcccaagattttgcaggccagcaccctacatcacatcaaagcactccaatttaagaacccgggaagaaaaattacaaaataataaaacgcccaccatactaaaaccccgataaatgccagaaccgttaactagatactacactagctacgatccaaaaaaaaagcagctactaatccatattttataaactaatacaaatcgacagattccgtggtaaaaacaccacgcattgcagctccacccccaaaacccctaacaaaatcgcggcctctaagatacaccaacagaattacacagcttcgtgcactcacaattctcccgaggtagatcctggcgacgctgagctccggatccagcccaccgccgaccacctcccccttctccgccctcctcgcctccccctcgccccccgccgccacccccaccccttgcgccgcccccgccgccgctctgtcacccgcgtcggggttcagcgtctccatccggaacccgcctcccccgaccgccaccaccgagtgcgacctcctcgcgaggtggaactcgatcctcctgtgcagcaccccctccgccgccgccgccgccgccgccacctcaacctccgccattcctagggtttcaagccccaacacagaagcggaaaccaaactacacctcaggacagacagggacacgatgatggatgggtatcggacgaatcaacactccactctgaatttttctgcgatttttccgggattaaactcgcgcggattcgatcgatacgggtgtgggtaattggtgcggcgcgctgtttttttttttcttttctttttttttttggttcgctcggccgccgttcgagctgcgggccggaagagagggggaggagggggtgggatgggggagctataaaccctatacccctagcgagtggacggttaggattggacgggagggaggggcggggcgatctgggacgttggatttttttgtggagcacgtgctttgattgcgctctggctggtggggccggagcgggaagaacgcggagtggctgtggctgtgagccatgtgagagtggtgtggctgcgggttcagtcaaatcgtgtgtggcctacatggctacatcaacctttacccatgagtgctccattgctcgtatttccttttttttttactgtttttaaaatcatgcacccttcgttaaaaaaaacatttattacacatttcctattacaatgaatcttgtattagaaaatatctcatccaatatttagattggttttttaagggagtattcgtcttcattctggtgcttctcatccaacgtagaagctcatgttctcttcgtgtgtaggtaatggctaaaggatccaatccacccatatagtcaatctctaattatatgagactaccccgtatattatcattaatctattcacccattcaatcttcaattatatggatctgggcattttaaagcatgggtgtcagggttatggataccacatacctaatagtagttgactaaatctcggcaggatccaccacataccatgtcctatacggaagcaaccttcggatataggaggagttccggataaggaaagacaaccatagttctacatggaaacgacaaggactactcggattgtatccatattggtttccctagttctacttggacaaggggacacctatgggtataaatacaatacctcctaggaggggagaagggacacccaccagggagaaccaacacaatcaacatacacccaccagggagcaccaacacaatcaacatacacccaccagaagccacaacatacaagcctacatatgccaagacaagccgccggatatcgacatcagagatatgcctagatcgaccctatccggtaccttcagaggccgcccgtagggatctagcactgtctctgataacgtcgggcgcgagctcgaggaggaaggctaccctgttgtcgactacgagtcagaccttcagaccaccatgtcgacaacagttagataggctaccccacatattgtactggtgtgattatggtgaataaaaagcaatatcggctccggccaacaggatgtagggctattatctaatagctcaggggcccgaacctgtataaaaatccatgtctccatctcttttacctcagtctcgcgtatatcctagcaccaacgatccccatactgtgcaaataccgtagtcgtgacatcatgcaccctccgttaaaaaaaacatttattacacatttcctattacaatgaatcttgtattagaaaatatctcatccaatatttagattgttttttttaagggagtattcgtcttcattctggtgcttctcatccaacgtagaagcttgtgtgctcttcgtgtgtaggtaatggctaaaggatccaatccacccatatagtcaatctcattatatgagactatcccgtatattatcattaatctattcacccattcaatcttcaattatatggatctgggcattttaaagcatgggcacattattaatatgggaaaaaattgttaatatacataagttgataaaatgtatcgatatgcataaactgataaagataacggaaatcttagtggattcctttatgttctaaaaaaaactatcaactaatgtctcctacttccttcgtttcatattataagactttatagcattactcatatttatatatatgttaattaatctaaacatatatgtgtcgctagattcattaacatatatatgaatgtggtcaatgctataaagtcttataacctgaaatagaggtagtacttatttatgatactagtggaatcaaatcttgccggtcaataattcttgtactatctcttgattattatttttttcgtctcaatgaaaattgttattatgtggtattgtccaaaatatcgtcatcgagcctttttatttgagaacaagctgtcttaagtgagcttttaatggcggcagtgtagtcacatatatagctccttcaagccaaactctatgcttgaacatattggttgtttctgaattgacatcctatttaaaatatgaattccaaatgtgaatactagagggaaccaaaaaaaaacttctcttttgttttgtttcctaccagtactattttaccgtgttagattagacaatatcacaataggcaacatatatagaaaaagtggtacatatcgatgaaaatgtgcggttatccgaaaattcttgctacttgtgattagactttagtgccagttttcacaaacaactggtagttatatgaaatttactttgttttcctactttctttttctacatttatgatatattgttatcgttatcttttctaaattctaatagtgtgatctttttttcgcaaacgcctaatagtgtgatcataaaattatttttttaaaagaattaactgaatgaaagtatttttatggcattaattccactgttatcattgtgtgatcataaaattattttttttaaaagaattaactgaa

SEQ ID NO: 16294 - DNA, 7098 bp, Oryza sativa
ccagaaaactgtgagatgaatttattaagcctaattaatctatcattagcaaatgtttactgtagcaccacattgttaaatcatgacgcaattaggcttaaaagattcgtctcgcaatttcctggcgaactgtgtaattgtttttttttgtctacatttaatagtctatgcatgtgtccaaatattcgatgtgacagcgtgaaaaattttgtttggtaactaaacatgccctcaatataagtgcaacttagtacagatgtacttcctccgtcccaaaatactgctacctaggatagaatttaacccatcctaggtagcaacattttgggatggatgtagtaatatattctactgaatataagggagcaatctacccatcggacgtccgatgacccaaaaaaaatcagacggtcaaatgttgcagttggccaacaggtgaaacattaagttatatatggtgaaaaaaaattcagcaactgaaacatttaaatattttatgaaacatggtgaagatatatgttgaaacatgtcgctgtcatgtatgaaacaagtattaacggatcgaaacatatgtttttcttttatcaaaatataatcattcgatatcttgttgtaaagatttaattaaaacgaatacaatgatgtgatcggatcatagattggataagtaatttaagagaaaaatcattttgaagcttgctaaaatatatgcatgtatgtatggatgaggtggagagagaggagagtagtggcagttagtttcaggaattttgtgaaacacactgaagatgcacgttgaaacatatcactatcaagtatgaaacatttagttttaacggtttgaaattcatgtttttcttttgaaataatataatcatatgatatcttgttgtaaagatttaattgcaacgaatacaacggtgtgatcggttcgtagatcggataagtaattagaagaaaaaatatttaaagagaggagggaaaaaaatgaaaagaaacaggtagcatacatgttacagtgaggttcctccgatccatcaggctttttagtagggtagacgaggcgtccgatatttccgtttcgtcggacgtgtgatacaaagcattttctgaatataagacaaggttatacttgcattgggacgtagggaatagaagaaaacaaattctactgaatgttgcctatatctgtgacctttaaattagacccctctctattctctgtccaaaattgctttcctagctacaaattaagagggtctcattgcaaactagctaggtttctattaaaaaggcaaaaagaaaaaaaaaccatattattactatccccattttaaatatataacgctgctacataaaacaacccgttgttaattagctttcatttgtgtcggatcctgactggaacaataacacacataggggcaccgatgagccccctatcactgccgattaattttgaaatagcacttatgaggttgacgagctgcaaagaaaaagattaattcgagccagctcgttcaaatcaatacatagacgcatgcccagatcaataccaaatgtccatatcatcaaatccaagtaaacatcaatatttcacagatcaatacacatcgatgtacacactcacaaataaatatgcacagatcaataactgagaaatccaaatcaacatcacatataaaaactaatcgatgtatgcaccaccacaactacagaacctaccgccaccgcggtcatcgatctccctcttcttcagtccagggtccctagatcctctggtctatatgctccttcgatcatcgtcatcgtcgcattaggtcaggcccgcctcctccacctgctcgtgttctcctcattagggtggaagaggtggcaagagggtcagattgtaggcctgagcttggggggtgggtgggggggggtggatttggcacccatgcgaccttctccaccatatggatcggggtgccagcgtgaggagaaaccctagtggagatggaggaaaaagaagagctaggtagcgagcaaggaggtcgctgcctacgttgatgcttcaggaggagctcgtcgttggcacctatatacgttaagaagcgcgtcgacaacatagagatgtagggcagtgaggttagaggccaccgctacctgtgggctcattggccttgctattctcattctcaagctgattgacgtcataagccaagttagacgtcgtcgcgagttggagagattgaaaaaaaatggagaagggggagaaaggggagatatttaactatttccattcttagatgtggcgattaactatttgctatatggacccacatgttatagacatatgaggtcccacgtatcattgacatatgagtaaaaaataattaaacaccaaatttaaaagtagcaaatagttaaatgccccgggagagagtgagataggtcaacgaggggagacttgagatcgatgtctacgggctcttgggctgttgacttggcctgagatatggttcggctcgctagctagttcctcctatcagtatcagtttacctaaagtaactaatgaattatcattaattagtgccggtttataataaaaacggtacaggtaaaacttgatactccactagtggtgccaatttacggacactactgaggactcattactgcaggttcttagtgacactaggcacatgtatgtgggacctaatggggcatcatcgatgaggcgctacttttagatttgatatttgactatttcttatattaaaaatactttataagtaccatttatgtcattgtgacgacttactttctcattaaatttactttaatcataacttattttttatttcttttaataaaacaaatgcttatacgtcatctcaaaaatcacattggcatatatttaaaaccgagagagtagcatggggagcattgtaggaatattcatcattaattaccacaacacttattggcaacttagagcaggtacaataatgggcgataggagatccatgtaggattttctgctgagctggaggagagaggggaggggagagggcgcaagcgggcgactaattagtcgcccggctgtacgcatggcccgaggacgtgggcccgcctgtagcaagcgatgcacccgtgctactcgtcgttgcctgcgtcggagcgtccaagtccagggccgcgccgccatcgtcgcgcacgtccgcgtccgccgccgctgccgcctttgtccactgcgaccaccgctaccctcgtccttgtcaaccgtgctcgtcgcctctgtatgccgctgccgccgaccttgtccactgcagctgtcgccgccaacttcgtccgcctcggccacggctgccaccgtcgtgtcgttgccctcgccctcatcggtcgatgttgcggctctcgtctaccgtggccatggagagcaagtaaaagagagagaccaagagagcacaaagcttggattgagttttgaggccttgtgcttatgaatcagcttgatggtttgcccggttgcttcacttctatcttccaccgttccgcgtgtagaaggccagctcaacgccggtcgccggacgacgagctcggctccggtgacccgtttgctctatccccagctacacgggcagcgtgagcctgcacgatgagctgtttatattttctgattgagaaaatagaataacatctttctctagaaaaattagatagcttaagcgaagtagtagcatacgtatatgtatatattgttctgtaccgattccttccatgtagatgagcagatgtatagtacaaaacagatgtgtatatagccataaatttgttcatctttttggccatggatgagcttggatgcatagttcctgagaagcaatcgccggcgagaacaggggattaggggagagagagagagtggggatagaagggagattaaaataaaatttcttgtacagtgtgggccatagtagtatagcttgattattgtgtttactggctacagtgttacctatagctgagatgaatcaaaattagagtaagcagctggctgcactattgaccttgctcttaaaaactaatttatatatgggtaaaactattatataaatatatgttatatatacgctattagcgacttaaaagccaatgctaaaaaataaattatgataaaaataatcaaatcaactctaaagtttagattttagctgcggctaataattaataagagtgaagaccacgcgctgtgaatctagatagatgatcttcccctgttccagcatatcatgggagcacgtacttcccaggccggccacaacaatatttggtgtattaattgacttaatttggttgaactgatataagccaataattattaatacatgtgtgtttgaatatacaatgaactcatttgacactattcagtactccaatcctggtacatacgtatataagtacgttcatatgaattaatacaatagataaaattaagcaactggacgtatagacgacggtatagtatactgtacacgtatacaatatacgctcgaatgagcggaatctgggtacagtcgccaactgccaaaacacaatacgcacattaattatattcacacgtacgtaattactttctctgttccaaaatgaagatatttttaaggttgacataagtattaagaaagtacgtgagaatgattgaaggaagtgtgtgattggttgaaaagagaaagtagctaggtgaagaagaatgattgtgattggttgagaagaggaggtaggtgaagaaataactttattttaggacaagacactgtgctagaaatagctatattttataacgcgccacgcatgtatagatcatcgatggggatctatgtatatctgtatatatatgtgctgcaatacgcacatcatatatatcgatcgtataaacataaaatgataatatatctgttctctgacgagagcttttactacccgtgtcagtgtatttattgaccggcctaattgagctacaggagcctgcaattttttcacttggaaaaaatgggacagaaaataattaagttgaactagtatacatggtatagtacgcgacatgcctcgctggatcactagctgtcgtacgagcgtacatgtacgtgaaaatataccatttggcctacgtgcaatgcgtacatatatatactagtacgtgcgtgttgttgggtgtgcagcgctgcaggccgcgcaaagtacaaattaaatttagtgacaaataaaaagaaagcaggagttaatattagaaacaaaatatgaaatttaaagttggctgtggcttataaatctatcgcaacgcaaccctataaggccatgtctagtgtattgttttagcatcaatttttcacactagctagataaaaaaaattaatggagaaatattatttctatactcttgaaagcttagccggcgatcccttcaatgcccttaagtatcatttgttaatatataaaaaaataaatatttgttatcattatctagaagtatcattttgctgtgaataatatatatatcgcacaacaaagtcatgaatttaaaaagtcatatacaacaagcttctacacttttaacaatatagtttatcaatttatgtgttcttcttccatgcacgagggtaaaattaacctctttcatagaaattaaacgatcaactaaccgtcaactgacgaaatgggtataaatgggtatgtaagggactaaaacaaaaatccaggggcattcaagaaagtgagcaatacttaggggcgcataagagattagctgaaattttaagagcgttaaagaattttctccaagaaatgatagcacctgtgcatgtacagacatccattatcacaatcccaataccgataaaaaccgctcccgagtgctatctatgaatttcgtgaaaacctttgataaactaacaagattaaatatgaaaaaatcatataaaaaatttaaattcattattaacttacccaaaaaccaagttgtttgtgttttttacttggtccagaaagtccggatttcacggtttccattgatttttttaaattcatactccctctgtcccattttaaacgcagctcatgagtttctgtggccaacattaatcatttgttttatttgaatttttttaaaaaaaaattaaaaacataagtcacgcataaagtactattcatattttatcatctaataacaataaaaatattaattataaaaaattcaaataagatagacgatcaaagttggacataaaaactcatgactacgcttaaaatgggacagagggagtagatatattaattccatggactaaaaaaaatatttctcacccttaccaagtttgctagtaattgcttactatgggggtgtttagatccataggtgtaaatttttaacgtgtcacaccgggtattatatagggtgttgaatggggtgttcgggcactaataaaaaaactaattacaaaatccgtcagtaaacagcgagacgaatttattaagcataattaatccatcattagcaaatttttctatagcactacattgtcaaatcatatagcaattaggtttaaaagattcgtttcgcaaattagccgcaatctgtgtaattagttattttttagcatatatttaatacttcatgcaggtgtttaaacgttcgatgtgataaggtataaaatttttgtgtgggaactaaacagggcctacttgttccttgcattattttttttgttaggcccactaaatgctactagcattgatgatagcaacactagagagaaagagaaaattcatgtttataatagttttaaatgtatactcgatcgtctcgtttcacctgcaatgaaaaaaagcttaagccaaccctcacattcaagcacagtactagagagaaaaagagaagatatatattcacctatactatttaacatggtatatatatactacccccatccatatatgtataacattggttagtttattgaactaaccaacatcatataaaaaaatggagggagtattaattaatgtgataacattaattagttttatctatactgaagacataccgttctgat

SEQ ID NO: 16295 - DNA, 5706 bp, Oryza sativa
  unsure (1)..(5706): unsure at all n locations
cgcaagttggtcggcgcacttatgcgtatggaaactctgattgaattttgtccggttcatgaattcgttttagtttatttacccctctattttcattaccaccatttttttcttgattttctaccataaaaaaatgggtctagctatacaattttcgatagaaaatccgttaagaaactatagtactacattggaattgccaaatgtcatttgacagaaaatccatctccaaatgttgcagattttgtgccatttgatgtactttgcgattcgtgctcctgcccttctttttcagctcaggcaacctccttatcttctccggcgctagcggcatccctaaactttggtagggacctacagattagggtctcggttggggtcaaggtggaagggggaagaggggggggggagtttgcctattttagagggatggccacgtgaggtggcagtccggcggtgagtagcggattgggcaggtggcaaggtggcgttgacactgtcgttgccgcgtggctggtgctggtagcgagggtaaagtagaaggacattaggatgtaacgtcccgcctcccccaggccgggcccacttacatctgatagctttcataggtcatagactgccctcacagaccaacacatatcttttctgcacactttgtcctcactcatgtgcacccgggttcccggtcggtcacccatccctgccctcacagaccaacacatatcttttctgcacactttgtcctcactcatgtgcacccgggttcccggtcggtcacccatcccaaattgctccaggccaagcacgcttaaccctggagttctttggagattggcttccggaaaagaagttgcaacttgttgatatgagtattctattaatcctattaagccctaggctgggatgttacaccctcacccccttaagagagatcgacgcccccgtcgatcaaccctaggccaggaacgtcctctcttggccacgtccatgtgtccagtgccagcgcatgtgccatgctgtgtaaccactcccggtctacaccagccatgcgcaccatgcctgcgcaactgcgacacacgcgcccgtgaaaccgcgagagtcggctctgataccattttgtaacgtcccgcctcccccaggccgggcccacttacatctgatagctttcataggtcatagactgccctcacagaccaacacatatcttttctgcacactttgtcctcactcatgtgcacccgggttcccggtcggtcacccatcccaaattgctccaggccaagcacgcttaaccctggagttctttagatattggcttccggaaaagaagttgcaacttgttgatatgagtattctattaatcctattaagccctaggccgggatgttacactccgttaagaaactatagtactacattggaattgccaaatgtcatttgacagaaaatccatctccaaatgttgcagattttgtgccatttgatgtactttgcgattcgtgctcctgcccttctttttcagctcaggcaacctccttatcttctccggcgctagcggcatccctaaactttggtagggacctacagattagggtctcggttggggtcaaggtggaagggggaagagggggggggagtttgcctattttagagggatggccacgtgaggtggcagtccggcggtgagcagcggattgggcaggtggcaaggtggcgttgacactgtcggtgccgcgtggctggtgctggtagcgagggtaaagtagaaggacattaggaggaggaggaggccggtggtggtggatccaacagtggggagtcaccgaagatggggaagagaacgatacggaggaagctcgctgccagcagcttgaggaaaaggagagaagggggagggggaggaggctcactggcaccagccagctcatgagcccgagcgacggcaatgctagggctacggtggcggaggcgacatagtcgtgatcttgcatggtgagcggcattgtgaggagagccaagagaaaggggatgagaacagggttttagggtttggttgccctgtataaatcttaaagcaatcgagtggtccagaatttacgaaattttttagagcgttcctatcaaatggtgtgtagatagtcccatagtacaatggtaactttaaatatttacattataactcgcacataactatgatataagttggatgtaattacattataacttattctaagtcacgcaacacagtggtggagtgtgtcgtgggttttaaccttgtcccctgcatgcgccgtttgatttttattttcttttcttgtcctgcacatgtttctcaaagcatatccaaatacgaaaaaagggcaagtttctcaaagcagattagggccttctcccacccaaatccggtggcggcggcgacggctcgacagtagttgtcgacgctaggccacgagcctcctcccacacggatccagcggcggtgactatcccccgcccgaatccggcggcaggagcggacgacggcgagagcagcggcagtgggagcggacggtagcggctcccgcgacagcaggagtggagagcacgacgccgatggcgggagcagccggtgtgatttttttttattttggatttttagttttacatgcagcccatgtaagcagccacatgcgaaaatcactattttcgcataccttctcgtgcagacaggtccggtcatccgcatgcaaaaatctgatttggccgtctgcaaaaatcctttttttagtagtgttcccctctctcgaatttttcgtgaattagaaacacaagaatgttacaaggaaaaagttcacttcttcagaaattctcttagaattcatcaaaatagagagaatctattctataccattgagtttgttatagttcaacaatttaccactaactttatttctttctacaatatatcggcgactttataaattattctacaatatgccattgggttgggcttatttttcaataatacctaaaatacccttatggacatataagattaacagttgatttatctcattagaagtttcaaaaaaatatgaaacttttatgtggcctccttacacagtataaaagtttgtatataagtttcaatttctttctatttatatttttataaaatataacatatatgttatatactatataaaatatttttttgtgttgttgtttttaatgtaaattatctttcatatgcaacataagatattttttgctgttatcttttgtgtaagctatttctctctggtataccacacaaaaatattttttctaaaaaaacaaaaataccaaaaaaaatgaaaatatgtatacatacttacttccctgttgtgtgaggaggccatataaaaaattttattttttttaactttttaatgagataaattaattgttaaccatgtatgtctctaagggtattttgggtattttttttaaaaaagagccccatctcaatggcatattgtagaacaattgataaagtcatcggtatattgtagaaagagacaatatctgtggtgaatcgttgaactgggataaactcggtggcataaaatagattctctcaaataggtatgcccatttaacttagctatgcatacgacccaaccatccgactaaggtacgactgaatttgatcaacagttgcaaatagctgtaacacacatatataaacatgctctactttaattgatttacggttgcatatctctagttgtaaggctgtatacatcctttaagagtagagaccggtttaatccattatctttaaaaaagaaaaattacgaattaccccccaaactatcgcggccgaccgaattacccccctgaaccacaaaactggacattcttcaccccaactatgcaaaccggatgaattaccctccccccttgatccaatctatggaggttttggtctacgtgacatgtggcagtccagtcagcattctatttataaaaatatcggacccacctgtcatactcttccactcttcctctctctcttctctctctcacgggcagcggcgcgagtggcagcggcaggcgtggctggtggagggtggcggcagacgggcgaacggcgcgcgaggacggacagtggtctcacggagcggtgccgtgacgtctcacttgggggaggccgcgacggcggcgggcggtgtgctcatcggcgtgggggtgggggtggncgcggcgccaaccgaggaccaccggcgcctccgcggccggttgcggtggaggaggtccccggcgcgagtagcctcgcaccgccagagatgcgggcgggggagatcctgtcacgtatgcaccacggcgccgccccacgggaagcacccgtcgttatcggcagcgccctcgtagaacccaatcctcctctcccgccgccgccccttctcctcgctggaggagctcgcctcggatccctcctcctcctcctagtcgtcgtcggtgccgtcggagtcggagtcatctccggagtagtaggtggagatttgggaggagatgacctcctcgctgcgggatcggaggcggaggatgagcaccagcagcgccgccatgctcggcccctggaacctccctaccccggtctccaccatcgccaccaccgccgtctccatcatccccacctccgccaccaccgcccaccgcccgtccgctccccgcaccactgctcgccgccagccgcgcctgtcgccgctcgctgccagccgcgcccactactcccgctcatgccgctgcccatttcctgcccctgcatcaccccttgagagagagagaggggggggcaggaagaggggaaggggaggtatgacatatgggtcctacattttttaaaaattagaaaatgctgactggattgccacgtgtacgctacgtaggacaaaccttgaactagcattcgtttggtattaaaagttcagggtgaacagtgtctgattttcggattcagaggtgtaattcggtcgaccgcgatagttcatagggtaattcgtactttttcctaaataaaaatatagcaatactcttagctaagctatgtgaattctgcactatatacggtgcccgtatacaagggagcaagctatggacctgtttaggtgagttttagattctgagaagcagttgtttggtagacagcttctgagaatcaggaaaagctctgaaacccagtttctccagcttctggcttcttagttcatttttcagaatatgtaactataaattctcagaagctgtggactgtttagggcagcttctagcataaacagcttttggaaaaagctgcagctttccaaagctgcagctgggatcaagctcccccaaagagggcctatatctacaagccagctacaacttattaccccgcctcgatcgtctagctcccttccttccgggcgttcgtgcaatcgtgcgtgcgcacgatactacacggtacgatcgatattacaacgcgcgcttgcatgatcgccacattaactgcatatatgcatcgatatatcagggtgattcggggatcgacagccggcgatcacgcgtatccgcgcgtaaatgcatcccatcccatcccatccatcgcacgctgtactcaccaacccacgtaccatccatcgatcgcacgccggaatcgtcgtcggaggacgacgacgacggagacgacgccgcacctgacgc

SEQ ID NO: 16296 - DNA, 4259 bp, Oryza sativa
ttttcgcattcatttctcaggcggtctatatatatatattccttttgcaaaggttttgcatttgaaatgtttcaaattctgtactagtaatttcagtataaaaacagagagaggggagcttaatttggtaccttcagttctcaaatcaaagtcaattcaaatctacagaagaaagcaaatctgcgccgcattgatcaatgatcatcactacccctgatacgaattccatatagctttgttgtacaagattttgaacagaaaccacctttcaaaaaggttgaacagcaccagacaacttcacaccagcattcaaactgctagccaatatttgagcacacacaagaacactgcatctctgcagctgtagcaatcaattaaaagatcaaccgagtagacagtcgcattaacaaactataaaactgtgatgagatcgacggatatataaccaccagattcggtacgtacgaagcttccagctgctcatggttttttttttaatcatctgagaaagagatccccagtttttaatccctgagatcctactgggtggtacaccccagaacattcatccccctctctgcagtaataatacaagttactgtagtagtagtacaaagaaaagtatcatcagcagattaatttgtcgatctgggtgtagtacttgtatcatcaggctttgatacggcaacatcgtttcagtttttgtttcttgaaaagattttgattctgaaatacagtactaatagtagtagtacttcgtatgttttagagtagaaatacaattcgagaattttgttttgtgtcattgtgtgtccacctaattgaacgaattgtcgctgtttaaatttcataattcatttatttatttttgtgagtaacagggcagcacctctatttccatttctgcaactgaagatcacaatgtaccttacaaatgactgttcaatgtcgtatataaatagacagaagattgctctgacatttcatcaacccttttctaccaaattggaacagaaatgtggcaaaataccaaattccgacttgagatagaaattttgattagtaaaccaaggatgattttcccacactgtcagccagacaaaatgttaagctagactgaaatgtcatgaaaaagaagtcaagatcaccaccatgatttcttcttcttttttttctaacatttcaccaccatgatttctcaatgagataaatcaacaaacttcagttttcttctgtaatcaaatacaaacagcatcatgcatgtcctctaatctcttgcctaataagcatttgccttttccacacactaaggtgtactaaaaacaaaaaatgcagagtgtagttgtagttgtagtgtagtgtagtggtggaaactagagccacattcacaaaagtctcaagctgacattaagttggaagcttgtgggggtgtgaggtccacacttagcaacaggacattgtatcatatgcagccttgttgccttgtcaccagtcatcagtccactcatccccatgcccccctcattctgatcctttataaatcagccacccagcaagacattcctttccaacctcactcaccttgctctagctcagctagctcttgctgctagtagcttcagctttgctactgctactaccactactactactactactttcacctccaagaaagtatagattgcaagaacaatttctgctgctgttgttctttcttgctgttctttctccttgtgtagttgtgtggtgtggttgagctgaggtgtagttaggacagtggctggctttgcttgcttgattggtcacctgggaaggtcgctgtctctgccttttgttttctttgccatctctttctttctgggctgctttcaccttttgctttccaacctcttcttgccatcaataatgatggaggagtaagatgagggcttgttcttgaagtctctccaatctaatctcatttcatcttcatcatctccacccggtccaaatccacctactactgtttttcttttgtcccttctcttttttttcttcctctgatcttttcttttttcaggtgttttgtttttggcagtaggtgcttgctatcttttcattaggctttggattttcctctcgtgttctttagtctcagcctattagaggtttgaggaaagttttccatttcttagctctttttgcttccagcttcttgggattgctctgtttcttgctgagaattggctcgatttgggaggcctcatcttgtgttagctttcaggttttcttgcctgaaattgaaccgattgggtaggtttttaggtgcttcagtttcagttgctagctcgtcaggcttgttcttgggctcctgccttgaattggggtcaaattgggatgcttctgggtgctttgaggatggaggagaggaagggattgatggggagggagagggatcaattccccgtcggcatgcgggtcctcgccgtcgacgatgacccggtgtgcctcaaggttcttgagaccctcctccggcgctgccaataccatggtcagtatttacagtaaccgcagctaattgtacttccattatcagctatccatgatgctcaacttgctggtttttttgttcgattctgcatgttaatgacagtgttgttcttttgcttctgcttgcattgttcattgttgtattggagtactgtagttttcttagaaatctgaaatgtcactgatactagcatacttggcacattttagaacttctgtatatcttataaatgcaatgcaatatgcctactatggtgcactgataagagctctcttatggtgatttttaacagtaacatcaaccaaccaggctattactgcgttgaagctgctcagggagaacagggacatgtttgatcttgtcatcagtgatgtccacatgcccgacatggacggatttaagctccttgagcttgtggggcttgaaatggatctcccagtcatcagtaagttcagattttcattttttccccttagtacaaacaaagttctagataggaaggatcagctgttgtgtaaaaatgtcttagctgaatttgagcaaaagaaatggagatgctaatcgggtataatgcctgcagtgttatcagtaaatggagagacaaagactgtgatgaaggggataactcatggtgcctgtgactatcttctaaaaccggtccgaatcgaagaactaaggaacatatggcagcatgttgttaggaggaagttcggtaatcgtgagcgaaccaatcttgatttctccaaagaatgcaataagccgcaaagcgcggatactgatcatggaccataccaacctacctgtggttcttctgatcaaaatgggaggtccagcaggaaaaggaaagaactacacggcgaggacgacgatgaaggcgatgataatgattatcaagaaaatgatgagccctcagctgcaaagaagcccagagttgtatggtcagttgagctgcaccgaaaatttgttgccgctgtcaaccagcttggaattgacagtaagaaagcaccccccccccccaccccacttttttgcctttctgtaaatgtccttgcaggtttgcagcaaactcatttatgtttgtgtcctttttttttttttacctcactgttgatgcacaagctgtaccaaaaagaattcttgagcttatgaatgtggagaaactcaccagggaaaatgttgcaagtcatctacaggtatagcatttacttccatgacaaaattatctgggtgccttttttttttcttttctttttatccattcatgagagctcttgaattttgctcaaccgtcatcctttacatgttcttctgtaccttcagttgttgatgcgtttttacttcagtttatgaggtcgtccatcattcattcattcatcaggcctgcacaaagtgacagaaaatctcttatcattatacatgttgcaaatgctgatgctgcacagcatcgagaattcaagattccaccacatggttgtctgaactctgaaaaactcaccattttatcacatcatttactcaacctgcacagaaatgtagtacaacaaacttcagatcaggattgatccacacagactgcacattttcttccctgatgcaaaattatcatcgatcccgatgaacaccatcgaatcaaagcttcatccaccatttgatttcatcaatgaaatggaggagtctgcacctgagcacacacggccacacagcatatgtagctgggtagaccttcact

SEQ ID NO: 16297 - DNA, 6560 bp, Oryza sativa
  unsure (1)..(6560): unsure at all n locations
cgaggcttcgataagcaaatctcgaaggagcaccgattgaacccctcgcaatcggcctattggcccaagcccggagaattacatgaccttcttgtgtgaatttcatggcattgccaagaaggttgtcaaggatctgcttgaatctcttactatcaccgatgatgttgtcgcatttcatgacagagaaatcgcagggatcccagatcacttcgatccctttggtgatgccgacaacattcgccatgtccacggattcttccaaaacgtctgccatgttgaactccacttcctccagctgcaccttccctgattccaccttagttgtgtctagtattgagttcagtatatctgcaaaagttatagcaggtcagtcatgaggacatatattgataggtccaacaaaattactcctaacaaagacttagggtgtgtttgaggagaaggagattgggggagattgggaagatacgtaaaacgaggtgagccattagcgcatgattaattgagtattaactattttaaatttcaaaatggattaatatgactttttaaagcaactttcttatagaaaatttttacaaaaaactcaccgtttagtagtttgggaagcgtgcgcgcggaaaacgaggtgctttctcaccctatatcacacaaacgaacgcagccttagaacatactcctaacaaagataatatatttatatgtgtatatacattcactggtgcaaaagaacaaaacattgcatttacagttattttacatgcatgaaaattacatattacacgcaagttttaaaacataaatatgttgtaaaataagttgtaataggatatgataaattcccaaaacatgtgacctaagcaacaaaaatgattttaggatacaactttaaaggcctctaaagcagctctaaaaataagttctaaaattcaaatttgcctatggcttataactcatcgagtagccaagcaagcacactttgacagtgtaaaaatcttaaaaatgagttagcgaagctaacctaactggagtgctaggcatgtatggtccgtttggatgtaaactagtaaaaactataaactaataaataatttccaggatattactccctccatctctaaatatttgacaccgttaacttttttaaatatgtttgaccgttcttcttattaaaaaaaattaagtatttattaattcttttcctatcatttgattcattgttaaatatacttttatgtatacatatagttttatatatttcacaaaagtttttgaataagacgaacggtcaaacatatttaaaaaagtcaatggcgtcaaatatttagggacggagggagtactagaatttatctactcccaaatgcttacagctgcagatcaaggacatcagttaactgcttgaccataatctatactatgatcaagatatgcaaatggcataaataaataaagacaaaattaatagaccaggcccagcaaaaagaataaaaataaaataagagaaaaataaatcacatgaaaaaaaagtacgtagcaaagtccaatttaacaaaatatattgatgtttaaaatctttaagtttgacttaaaaacatgtccaaatcaattgacatgttctcatgattccagcattctggagactgatagcaaattataccccctccgtcctaaaatataaaagattttggtggatgtgatataacctagaactacgaatctgaatagacttcttgtccagatttatagtactagaatacgtatcatccatctaaaattccttatattttggaatggagggagtacactttagcacttctcttcaaaaattgaactaaaaccttgacgaaccatagagctaaagtacccaattgataatggagcaacaaacaaacaaaatcttgtcggcaacacaagaaagcataaaacagtaacaacaaaagaaaaacaatacgatcagtggcggatgcagcgcccggccaccacgggcaattgccctggctccatgcgtacaacaacactgctccaatgcatatgcagcatattactcattaataatatacttaatcactttgtctcttaggttataatggagattaattagatgaaaaaacagaaacgaggaaacaaggaccaaaccatcaagctgtagctacagagaccaaacaatacaacttactcgagtagcacctatgttcaagatatatactagctttataatctaaattatcggcgataatatattcttgcctaggctccaaaaaatttctagatccgccactgaatacgatcaggggcggatctacagtattagaaccggtgtcaggcgacaccgacgactttcggtagaatctatagcaaaactgcttaattatccatatgttataacaccatgatctaagtataattagcatactatgacaccgatagacacgttatgacaccaacgaatcgattttctagatccgtcactgaatacaatcattattattatttttgttgttgtgcttaccaagcagcttgttggtgcagagctccatctggttgaggttgtcgacgatgttggggttggcctcggggcgcgacacctcgacgagcccggcgacggcggcgagcgcggagcggatgtcgtggctggcgctggcgaaggcgttgctcttgttcatgctcttgcgctccgcctgccggagcgcgtccctgtgcctcgcgaggtcggcgcccagcgccgtctccctcgccaccgcccgccgcagcgcccgcgccatcagcacgcacgccaccgtcgccgccgccgacgccgcgcacgccaccgccaccatcgtcacgccgccccgccggaacacgcccaccatcgcgctcttccggagcaccaccctgaaaccctgcaacggcaacgcacgagccaatccagagcagcatgggttaattagctagactagctcgatcgagaaatcatcgaagcatgcatgtgtgcatggacgtacgtacgcagctagctaggacacgcacgtatgaaattttatgaaatttgaatttgttgttatggaaatatggagatgatatctgcattaaggaaaggaaatcaatcaaattaagtatatgatatctcgtcttccagatctctttaccgtatattactatgtatacatccttattggtatatatgccaacgctggtttggcaccagtttagtttgcttgcagtattatgctgaagtgaatttctaacatttgaaagttcgaaaatataacaggtttgaaacattagggaatgttcaatggtagggtacaatataagattatttagtagagaccatgttcgtattaaagctaagataacaaaaactctaaccattagttctcaatacatattttttttcaccaaatgcaaccatgttttcattttatagaggctaatagtctatgtaaaatgctctgtctcccatctttctcttttccatattaacaaaaatttctaattaataaggctaagaacgccctccattaaggattatcgtatatgccctttagggcatgttcaatggtagagacgagtatggtctcttaaacaatacaatattatttagagaccctgtctttacaatagttgagacgacaaatgctctaatcattaattcaaaaaatattcctttggttaatattctttccattttcttaccctcatgcaaccatattttcatattatagtgattaagagtcgttattaagctgttgtcatgcataacaacgatgttttgtctctcctctttctctttcctccatgtcaacaaatattcctaattagcaacgctaagagaccactattgacaaccattgtacatgcccttagccagtttatttgaaaaagtaaattaagcagcgactatgcacttaattaatgaggcagatcaatgtactccggatagatagaaatcagattaaatcaaattaaattaaattaaattaaattgcctcacgcaccatttgtactccggatatgtcaaagttggtgcacgcgaatctgtacttgtcagacttgacaccgtgcacgtcgagcttgggcggcgcgtcaatggcggacgcggtgcacttcacgctcgagaacaacgccatctcctccgccgcggcgccgtcgccgagcaaagatctatatgccgccggctccggtgctggtggtgcggcggtggcgccgccgttgccggcgaccgcgtagtacatgcccaggtcacggagctgcctaaggccggcggcgccacggaggacgacgtcgtcgacggccacggcggcggagaccgcgccgccgccgccgccaaccggggccgagaggaacagcatccgcacgccggggcgcgcccacccgtcggcgagagacgcgccgccgccgccgccgtcgagcaggagccgcgtcacgttgggcggcagctgctggtgcggcgccgccgccgtggcgttcccgacgggccggccggtcgccggatcaaccgcctgggtgaaccacgtgccgttcggcctcgcgaacatcgctctcgcctcgccgtcgccgccgccggcgcggtagtaggcgaaggcggcgccatcgacggcggcgtaggagatttgagcttgcagcggtgcatggagaaggccaagaacagcttgggtcccacctgcaagtcagacacggacaaccatgcagtacacgattacaaaacgacatttgagtgtaatttttacagtaataatgttgttgcttacataatattattgttatttcttagtgcaaaataaaaaaaataaagatataatgatattggaaacatgaagagtttaagcagcattaatatactgaatcagtacagatatcacttgctgatattntgctatatanttcatatatacnagagacaagaaaaaatcanctgagattcttattttaaagaggagatatccccgttaaatgaaatcgacaagaataccatttatatcaaggttagtcaccgcaagaaaattaataaaacacggttttaatttcttgtgtgtttcttaaaaaaaactaaaaataaggataaaaaaaatgacaggtacatacatgagaaaaggaagccatgttgccctgaacatgcaaggtgttggcaatggtgaaaactgagcgatttgcttcaagaagaggtcgcatgttgccggcgatgtgcatcaaagccgaatccatggcgcccttggtggcctcacccatcacctctgtcatgtacatcgtagaggagcagaaggtgactactgtgattgtcatgcatgttgcaatcacagcctgcacacatatgagaatgtatgagaaagataaaattggggataaaacgcataatttcagtattcttcggattttccctgtgttagctatacttattaacaatctagatttatagtcccctaagtgacaccgaagaaagcacacgggtaccaacagatatcgattgagaattggtaacgctcctgccctctttaaagggaagtccaaaacaaatcgttaaaatacatatttttatatttaatatgtcgggatcctatctcttaacatgaagaattttaaaatagcgttactgcgcgcctttggggatatggtgtgtgggtggatgggcggagagtgatgaggatgctacacacgcggataacaaatgtttcccgcgtatctctgcagatacttcatcataaacaatatatatattcatgtgaatattccagcctccacatatatatgaaatcaaaagggagataacctataagacccagaaaaaagggagttgttccttaccaacgggaataggatccagaagtagcagcaacggcgtctccatttgctaacttcttctacctccctcatggtcaaaagagagcacaatctgtgtacttgggagagcagtaggaaagatgagctttttatgacacaacaccttgatgcattgtactaccattttatacatgccaaataggaaaatatatattaggaaattttttttaaaaaaatgtttttctcaataccgccaacggtttggagaatacgtttggtggtattcatgtatagtggttttcatgatatttaatccgccagtagcccaacaacgctagaaatgtcaaggtgtaaaagaaaccataaacactaagatctccaattaattgaggcaaattttaacacttattagaacaagtttaatagtatagccaactactagctttaattcatctatagccaatctaatagctcatccatacaatagttacatactatactattaatatatggtcacatctgtcatacacactgcgtctaatatatggtcacatctgtcatacacactgcgtcttggagtctgtgctacagcaggttacaaatatgtagcccgctgctattctcgctccttatttatcttcttaaaatatatttgcagctggcttatagcctgctattgtacctgctcttagttgtagtacatacgtgtgggacccaccacaggtggcattagttgtgataaactccaatgctcgtggacgtagtagaaaataaagtgggtcccaatagcatctctctct

SEQ ID NO: 16298 - DNA, 718 bp, Oryza sativa
catgtccgccgccttcggccggcattcccgtctcatatggcccctctcttcctctctaatctatttcttttcgtttttaggtcgtcccggtcgccgtccgccgcgtgtcgacctccctccgtcgctcctcgtcgccggtcgccgccgtcccctccggtgaggacttcctccccttccctttcctttcccgattccccgtgcgtcgccgccgcccgcgctcgccgtcgccttcggtcgctgccgccgtccgctgccgccgatcgctgccgccgcccgcgccgccgcttgccgtcaccggtggacgcgcgcgcgtgccgccacccttgccatggccggccggccggccttgtgccgagccgagccgagccgggtgccgccgccccgttccttcccaccccaagccgctgaccggtgggcccgcgtgccggcgcccttcctccctctcccgagccgctgaccggtgggccccgcatgtcggcaccgccccctccgtgctgacgtcagccctgggatttattgcgcaataaatgatttaaggtttttcttttatagtaatagacacagtgaatcttctaaaattcataactaattcatccgagctccgtttaagcccattcaagtctcagtaaatcaagaaaaatgtgtagaatccactaaaaatggttttgttccctgtttcagtagtcttatagcatgtttgcaatgtttgccttgtatg

SEQ ID NO: 16299 - DNA, 3650 bp, Oryza sativa
caacacctcgccgcaggagcacggttggtcacgccgcgcagctccacgcgcgcgcgctctagcacgtcccgtgtcgcgccgcggcgcgactgtttggcggcttggcgcgacgcgctggcgcgctggcgcgcgcgcgcgcgcgggggcgcagaaatggcgggaaggatgtgcaggagtgacgcgtgggggtgggggtgtgagtgattgtgcgtgcggtgtagtaaatgtgcaatgatcctgctgtctctgcggcgtttttcagaaattttttttccagggaatccaatccaatccaatccaatcgagacgcattcatgtgtccactgtaaacttgtctctgcaaattctgttggattctgttctttgcattgcccatgctgctgctggtgtttctcgttgagattggccaatacttgctgaagttttcccatttttcctgcacaaaagtttgccctgagagtactcataactaattcataataaattttgaaaagttgaaaacattgatcttttttgaaaaataatgcatatatatttcgtatgatatgcaagatttgaagtaaggatgtttgttgttgtttcaaactcttctcttgatacaactatgcacaggtcttttgcgtatgccggagaaaaaaattccatttcaaaaatgatactcgtaatttttcagcgcgattgattcgtggcacaaaaccacactgatcatctgcaattcgtgaatgcgttctaaattcagggagggaaatgtacatttgggaccaggcgagatgaacattatctcgatgagcagtaacggttctgtgctgaattctgaatttctgatcgaatttacttgcaggctgcagtttgcagacgccatcagtacactgcggctgcattaaccccagcaggctagcgatcgaaagggcaaactggcgctgtgaaaaaactgaaaattcagaaggctgcagtgaacagtggcagcagtaagaacacgagggtagaatagaaggtttgagcagagcagtggcaggcaggcagcgcgtgcaaaactgaaaatgttcaggcaaattttgtgataaaaactctgcagaaacgaaggaaacagtaggcctacttcagcgagtttgcaggctttgaatttggatttcgcgtttgaagcttctggtccagctgcattgcagtggcacagtgccaggctctagattttcgaggtacaggctgggacatggtggccgaaaattgtacgtaatttgggatttagtagtactgctttaaataactgaattcaaacttcagggtctgtagggttaaccacggaccctggctcagtgttttagtgaaattcagatcataccctcatttggacattttgttctagatctacgatctaacttttgattactttactaagccctttttatttgggcttataagctagcttatgaactgacaagccttttctgtctaaacgtgcaggtgtttttttttcttttggcttttcgaatgtgcactttcctaacttcacctcgctcgtttgtcatgcaaacgttttctaaactgctaaatggttatgatttttgaaaaaaaatatataggaaagttgtttttaaaaaatcacataaatccatttctcgcataaaaaagctaatacttaattaatcatgagctaatgagtcattctgttttacatgcgtgagagattagtttccatttcattgtgccgaacatagcatttcaatcttaaaccacaaactatgttggagaatcttttttgttttatatttttttagataattttttttgttttatatgagatagaggtatgactctactattaaacttagtattttaaatccacgtacttgtaaaatatacttcctccgcttcacaatgtaagtcattatagcattttctacattcatattgatgttaatgaatctagataaatgctagaatgacttacattgtgaagcggattaaaagacagcttaagtcaccaagaggggggagttggaaatttgttgtcacctgttgaatgttattaaaagacgcgaatattaggagaggacctaatatcaaataattagaaggggtgaggcttcgaactcaggtcatctagcccactaccttgtggagctagccggaagacccctgacctttctcacctgttgaatgttattatttggtagcttggtgcaaaagatactagattgaattctattttttgctatgcagagaattttgctgtgacaatcttttagtatgctcaatctgacaaatacaaatattcgatgctattgcttgattcaataacttttgttctgcattccctcctagagcatgttcacgtgtatctaaagaacatgttaaacatgctgagcaatacataattacacacaagaatttttacagtacttgagaagttgagaggtatgtaccaaaattttcgtacctaagtatcggaggtaccaaagaggtcccaaattgagataccaagaggttccaaattttataatagtaaatgtagaaccttctcgagaaccctaaaaccactctaattacactgtcaattttttctggtgggctaaattacacagtcaaatttggcccagagacccacctcaccaaccaaatcctacggcccagaagcccatacaagttttcaggctctcggtcccttctcgtgccgtctccccgccgccgccgtcgcccagcgccgcgcctccccgccctccgttgccggcgacaagcccccgcagggagcgggctatctggagtccaagctgcagcctcgccctcccgctccgtgcgccgggcagcagcaagcgccgccccaagccctagcctcgccgcctgccaggtgcctgaagccccctcggcccgtgctccccttcctgtctgcttgtcggattcaccgattgtagcccgcaggtagttagctagatcttgcctcattgtgaatttgtcaatttgtgcatgtaagtttaatttgtggtgccggttgtatgtagtctgtagaatcgattctagtgtggtaatactcggtagtttaatgaatagcttggctacttcagcgctgaatctagtgagaataagttgagaaacaaatccgtgcggtaaattgttggaaaaatgtttagccacatgattgagtgcgatgtcttcttcagagttatgtgagcatggtgtaatgaagatttacttgggtggctatgagaaagcttagagttgagtagcagaaagcttagagttgagtagcattgcattcttctatttatgattaagatccatatttgtaccaaagtacttatgttttttttgtttagtttttttggcaaattttgaacttcataattggttttagtcaattctaccaatgtaccgtgttgattattgattgtttgcttagtaccctacagtactattttacaagggaaataacattcaattttgataagggggtctattgatgcacagggaaattactactgtgatgtttctagaggtgcaaatattttacttacaagttacaaccatgctaatagagatgagcttatggttgtcagatgtggtaacctaatcttttgaataatatagtgtttagcttcatgaaatttctttttgcagctgttgattttgaattccataaagctttctttttattt

SEQ ID NO: 16300 - DNA, 2099 bp, Oryza sativa
aatgtggactggaaaacagttggtggtggttcagtgactactgacccaagccaaccagttgttaaaaagcgtctcccaaagaaaattagacaagttcctgaatgctattttctgcctcggcgatatttgccttctgcattggcaatctatggcgctgtgtgtgctgctggagttggcgcagggatgctgcttgaggtttggataaacaaaaagatcaaaggtgcattcttgttttatctggtggcaggaggggccattcaactcacgttcttggaacactgctattttcttgaaagcttatgatgttggattatacaattgaaaacattactcttcttttgtcttagataatgttggattgaacaattgtttgttgcctgtatattttgtacatatacttgctcttcttacttgctgatgcagaggacagtgccattgtctgggaaatgggcaaatgatttgattgctacctctgaagagttctccttgctcttgtgttcagctgctaaagctgcatctcagaaataatcctagctatattgattcagattatcttttgattcccagacaaagtaaaactatcctttctaatgtacggcactgccttatatctacattcctgatttcattttgaatgctagcattacagtatggtgtaacaggcagtatcagaaataacggtgttccagaacgagccatttctgtttgacattatcagtagtccgtcatacgaattaattgattgtgtggacagtagtgattacatgctgtgatggaaatataaaaaaaatcattagagctgatcggagtatctctgattccttttcatgtgtggtgataattcgatagaattcaatacatgatatgccatattacaaagttatgaagtgcgtcctctgctcaaacaaaagatttgatatcttgatatttgtatggggaagcctccagcgtatctacgctagtaaacatattttgggggttctcaaatcctccccgtattctgaatatgaatgtaaacttgcctgcaaatgaataaaatatccgtgttttatctcaagaaaataatagaaaagcatttttgttttccaacaaaaatggatcctgtagatcgaaacaaagggcagctatagatgcatgcctcgggaaaacagaactgcgattataaaacagaactgtagattctaaacattatgaagctgtatgcattacagcagatcaatgaagcttttctagcgccaagtccagattagcttcattgattaacgcttcacagatccgcttcacagatcgggacacacaaataggcaataagggtgtgtttagttatttgggtgtaaagtttttgaagtatacggacacacatttgaagtattaaatgtagactaataacataacaaattatagattccgtctgtaaactgcgagataaatttattaagcctaattaatttgtcattagcaaatgtttattgtagcatcacattattaaatcatgacataattaggttcaaaagattcgtctcgcaatttacatgcaaactgtgcaattggttgtatttttacccctctcctgcatgcacgaatcttgatgtgtgattcaatgtttagaaatttacaagttgagtaaatttcataaaactatagatattttgacaaaaatcacaaaagcacagatttaatatgatgtattacaaaactacagatttaacgataaatttatctcaaaactacaaattaaagctgaaatatcgtaaaagtacatattaataacaaaattatcacaaaactataggttaatattaatttaatcacaaaacttgaatatttatatctcaaacatatattagtgctaatgctttaaacttaaaatatgtagttttgtgataattttattgttaaatcagtagttttgtgataattttattgttaaatctgtagttttttttgatacatcaccttaaattttgtgataatttgactaaactacctgcaattttgtgaaattaaggggaaaaaactgtcgcaactaatgtttcaatttctaaggaaaaatctgttatattttcgtttagaaagcattgataccgggctgcaggaat

SEQ ID NO: 16301 - DNA, 1182 bp, Oryza sativa
aaagttgagaagaaaaatggaaatgttgctcaagttccatttattttttggttgaaacttgaaagaggcagtaataattgtaagatgatttcgtgaacagtgacaggtttgacgtagctgatttgatctgtcagatttaagcacgagccagatcaagcattttctgctgtcgtgagtaaacatgtctagaattctactagtactaattttaaatttttaattaagttcatagaaatatagaatgccagagaggagattgagttggtagtgggaagagagtggcaggcaagcatgcatacacgttcggcgatgctgtgtgggtcggtggcttgccctctcctcgcgcgcacccgctgctgccgcggcggcgccgtgccaccgccaccggaggaggtgaccggcgccgtgcctccgctcgccgccggccctccgaagctctgccccgacattgatcctcccttgaaacgacgaagaggacaatcttgatgtttgagtcgtagagattaattacagtggcaagttcttgagcgatcggcttgcttacctggccgaacggcggctgcccggcgccgccgctgccgccgtgcacgccgaacccgttgaacagcgcgtgctcgcctccctgcaaatgaaagagaaatctcgtcggagaaggaggagaagatggtggtaaggaaggagacgagagtttccaagaacgtgggagcacgcacggcggcggcattgggcgacttgaagccgccctccatctcctcccgcggcggcacgttcgtccggtccgtgaacagcggcagcggcgagaacgcgccgctcccgtcctcctcgccgccgccggcctgccggtgcagctcgctcagctgcagcatcaccggcttctctcccccgccgccgccagccccaccgatctggtgatgccggaggcgggacgcgagcagcgccgactcgtcgaacacctgcgacgccgccgccgccgctgccggatcgacctcccacggcgacttccccgccgcgccgccgccgccgccccccaggtcggcccacgccgacggcagcgtggagagcatctggtcgaagaagtcatcctgcgtcccctcgccgccgccgccggcgaccgtgtcgcggctgctcggctgcatggaggcaaagcttagcttagcttagctgaagctcaagctgacaagc

SEQ ID NO: 16302 - DNA, 967 bp, Oryza sativa
attttgatcagttcatcaaaaaatggcttgtgctcttatcagccaagggaatcaagatatgtattgctggacgatggtcgcaaactctgcctggagtgccttgattctgcagttatggatacgagcgagtgccaacctctttatcttgaaatacaggaattttatgaaggcctaaatatgaaagtggaacaacaagttcccttgcttcttgtagaaagacaggctttaaatgaagccatggaaggagagaagactgtatgttgaccaaagctggacaatccatgattctcctgtttttcactatactaatgttagtaaatattttgtttcctgtggaaaccagggtcaccaccatcttccagaaacaagaggtttatgcttatcagaagagcaaactgtcagcacggtgagaactattctgagcatgagatgaatggatcttttcataatttaaattctatttcaattgtattggtctgctgtgttctgacttctgactgagttccagcatttatttttaatattttagatattgaggagaccaagaatggctggaaataaagttatggaaatgataacggagccatataggttgactcgtcgatgtgaagtgactgcaattctcattctttatggtctcccaaggtgaaccacttactatctgtttcataatgccattgttaccttgttgctactcttttaatatcaacaaaaactaggaggaatattcgaatttataactgatttgaaataatatttctttctgtgttggagaatacattcttctaaaaaatgttatggattcactgaagatattctggactgcatgctgactctacagagttaatgggaaaagatattactcttgtgccttgtcactgtagcttttgcagtacaatatgcaaattatttgttgtgttatcatttggttcttctgtattgggacctcatgaagtacattgtcggt

SEQ ID NO: 16303 - DNA, 1951 bp, Oryza sativa
attcctgcagccctaaaggttcaaagcagtattgaaacctcaaaagaactaactataagtagctttcaacatttaattttccattaagctaagaaaaccaacaatgaaggtttttagtcaatgaatataaagcagtaacctgaactggggttcccgttaagagaacacgatgcttagtatgatactctttaagttgaccgaacaacttggaatctttgttcttcaaacgatgcccctcatccacaatctgcaataaagcattaccaattggagaaaagtcaatcagaacttaagagcaatttaaacattctccagagaattgaagcgtatagaaagggagatggcaaaagaagtaccatgcattcccattctatggtttttagaacagtagaatccatattgatcatctcataagatgtcaaaaggacatcaaattttattcttgattgtttcttgtcttcattagatggagatgatttctttttcttaagcttcttaggtttctctttggggtagtaaaattcatacttcctaataatttcacgagaagctgcagatccaaaatacattacctggcaaacatgaagaaaaaaaataagtcgaaagaattatgagttagtataatccacgtacaacattataaattagtataatccacgtacaacattcatttgaggtgcccaagttgcaaattcacgctcccaatttcgcaaggttgaaaggggtgcaacgaccagatgaggaccaagcttgtccactgatagagagcccaaaaaggcaatactctgtatcgttttacctgcattatttttgtagtgataagtgtactcacttggtcaagaccccaatacagcataccataaaacactttcattcttaacagtaaaaatcacttaccaagacccatctcgtccccaagtattacacgtttattatggtaccaagaatagcgtaagaagtttaacccttcaagctggtagggatgtagtgtcccttcatgtaaaaaatgcaaaataaaaaacaaggaaatatgtagtcaattagaaataaaaatttaattcccaggaattattcgtgttttaaatgcagcataccaccagagagaaacttcgggctctccttatattgacgtatctcacgagtgacactcttgcacttgtcagtagacttcttcctcctggactgaatctcattgaagcgttcaatctgaggctgaaagactgcaatgtcggagtcattttcccaagtacattcgtcgtatgttagttccttccatttcacatagtactccctttcaccagtagagctttttcttttttttcacaaaatatttaaaaaaaagacaatcatacagtcagcctttgctaaaaattgatgggtgtaaagaagataataagtgaacactaagattggtgaaactaacctgacagcactatgaaagtaaagtggaatgatgttattatttctcgttaccacatttaattgaggaataacatgacagcaatagggttttcacacggtatcaaattaccttcaattggaaagtttgtcgttgagtaataggctaactatcatggtaaacattataaatggagtacatattaccactaacagcatcaatatatgcatccacagtaacagtaataactattaacctaacacaaagctacatgcatgtgtcagttaccaaagaaaggctggtctagctggtcatattatcataatattaatagcaacaaaagcaactaattatcagccagtaaatcacatcccttctattgtcacaactatacaaggtaaaaagatcaagcctcgcatagctttgttcgttgtatccatacctggtagcaaggatcctgtcaacagtagtccactcaggtctaattgcagaatagtcatcatcagacttatccgttgaatccatttgcttatggaagttattgagtctagt

SEQ ID NO: 16304 - DNA, 4797 bp, Oryza sativa
tttccgtaagagggctaacctgaaaataacaaatgaggtgctttgttaccagcggtgtcaatcattaagtggaacggagtctactgaagaagggaaatgcatacacattcagggcagctccatttatcagatgtgatatttaagcgaggaaccaaacatttcctgtgaaatgcataagtacaagttgaacatggtactagattgtcattttctccacatttctggcaagcatcttctttctgcacacacaggtgaataactacaaataaatacaggaccattaaactgaaaatagatatatcaagaaatacataagcatatgaaaattacaggaagttaagaaaccaagccccgaaaaactgaagctccactacacatatgagaaataaaaagccaagtacaaaatcaccaaacgaggaaaaatggaaatgagaatgatgatattggcatgctcccttttgtttaaaaacagattgaattaattttcttacaaatctcagcaaattgccaactcttctagtttatgataaaatctttgaaccaacaaaataatgtaagtttagctatcacgacaaggacagttagaaacaccgtcatcacctcttatcatccaacaattaaacttggtatactaaggcatcgtatatttctcaggatgcacactagagactgtattttttcataatcccgaattagtagctgcttaacgtagcagacagatcaggcctaaattcaaatttcagtaccccatcggtaccaagcaacaaactcattcaaccaaatcacccactggctttctcaaacaccagccagccaagcttaacctatcaccgccaaatccctaaactaatcctcccgcttctcagcaattaagccatttcacaaccgactaccctagcaaggcagccatcaaattccccaaaaccagaagctaaaatcctagcatggcagcagccaattccacaaaaaccacagaaatcagagccaattcagcagtaacagctttagaaatcagagcaactgagaccaaaaacagaagagaagagaatcagggcccccctgatcggccgccataccgcgtcctcccgctcgatccgctcggtggggccgtcgctgtgccgatccctccccttcccgcccccgccgcgcggcgggaggtcatcgtcggactcatcgagcgtgtacagcggccgcttctccgaccgcacccgcagccgctccaccaggctgctcatcccgccgccgccccccggaactcccttccggatcaaaaccctaaaaccacccaccctctcgccgcgccgcgccgcgccgcctcggagttgggggggctagggtttggtggtttttgggggtagggagaggggagcgtacttatacccccgcgtgggggagggggagggtgaggtggcgcgtggagaggaggcggcggaaatggaaggtagtgacggcgaggggaggcggcggcgaggcgcgtgcccctcgtgtgggcggtggaggaggcgggcggcgaggggacgcgtctctctctctctctttctctgcgtgtgctctcggactcggagagaggagggggaggagggaggcggtggtaacggccactgcggcaagggatgtccaggggcagtggcggttttgcgattaggctcttgggatataagacaaattgcgaccggattgttgtaaggagtaggatttatgggttcctgtgcttgtttgggaatcatggacctttttgtggaaatttatttctcatggtgttgtacagttgcaagattgggaaatcttgttttcctggtgtgaagttatcaaaaagtaaaagttgttgttgctcttttttttccacgggtgtattaattgttattgaggtttgttatattaggtggttgtccggaaataaatatgataaatgttgagatgagtaaatagaacataccttgaaagaagtattctttgtgttatctctattattttagaatgggagttccatctgtccctcaacccttctcatcctgccaaagttttgttctcttgcttaaaaaaaccgttccaccaaaagaaccagttgacccacatggaaaccgtcaattgagaaaatcaaggataaaaaactaaaccatgtgaaaactttgaccgccctttacaggatcatgctgcccttcctagtttggaaaaaatcagaaataaccatatagtatttgtaatcactatggtatatacatatgtagtaagttaatagcataaagctattcaagcaaaataggaatgataattcatacggggaagcatcactagtccatgacccttcccatcgcacgcaaagttcggttccatcatgtacataagtaaattgctccacccaaataaacatgttgacccatatggaaataaattcgttgagaaaaaactggaataggaaaaattaagggcttgttcacttcattgaaaaaacaattaccaaatttcggcattaccaacctttggttaggtaaggcgaagattggtggtgttatgtttgtgaccttaccaaactaaaccacatgaaaaccgttggtctggcttttcccgatatccctttgctcttcctatgagaaaataaattaataagtatatatatttttaatcactactatctaaatacccacgcattgcaacagattactcaaaaatagcaaaaaaaaaaagtgcgtccatgttgaacaaatattaacagacttggttgaaacgagtttcttcatcttacaaacaaaaacaaaaacaccatagttagtgtaccgaaacaagagtagcggagtaaagacaacaaaattactccacacaagtatataaaaaagctagcaaagcactctcacatccatgtctcacatgctagtggtggtggcagactcactactcaccactattgtcttttagaagtagtatatatataggatacatatggatagttccgataagaaaaactaaaccacatgaaacagctagcatgccctttccgttagcaattttgtccttcctagctggaaaaaaggaagaagaaataaatatatacatttataatcactacgaatatgtgtggtattgggacatattattccatcaaattagggatgataattcttgcaattccaacatgaaacatagtgtgataaaatgacacgatgatcctaccaaagtacctgagatgttgggtgattgaaggaggatgtagtggagattactttttaagaaaaaaaaagggaatatgaggattcataacgagcacaatgaatagtaaacagtaaggcaataaatttcttttaaaaagacattgaaactacgcatctgacgagggtgtcaagcttcacttagagagcaactaataagtcaacaacaaagggaagcggtttggcagtagaaccatggatacgtgacttcttacactagggttcgaaaccttactgggcatatatattacagtgtacaattatggttgcaataagaatatagtgaggtcaacaatttaccactagcctttgtgtctttgagagtgttataagcccatatgcacctaggggtagttgtatttggcgtagaggtgagttacaacatattgcagcaactgaaataaggtaagttttgtctcaagaagcacatagagatgactacagagaactttttgaaggtgacaactttggagttcatacgagctttttaccgttacctatgtaggttcaaatttgtgtggaaaggatgggcaatgttgggcattactcatacattgttagtttgatactctgaacaggattcataactttagggtagatcgcaaatgccatagttcatagtacttcatactctacatggtcttgcacacgagtagaaatcaaatttgaagtgctccgacatgtaaagtcaatgggagaatagctactttagttcctaaagtttctctgtaggatctatttagtttctaaccttataaatggtccaaagaaatccttaaactttatcataaggcctaaaatagtccttgggtccaccaaaatcatcatatggatatgtcatatcatcattcatgtaaaatctatgataaattgtccaatctacccttatgtatatcataaaaaataaatataagggtgaatttgacataatcataggaaaaaaatacttcttttttttcacccttctgaggtatattttttctcatacatataccatatatttttgtaacttttttccttttgtttttttattttcctatgcataaaggtaaattggacaaatcatatagattttgtatgggaaggtgacatggcatgtccatgtggcgattcaggtggaaccaaggattatattagcccacatgacaaatttaaagaactagtttggacaatatgaaagattaaggactaaaataatccaggagcgaaactttagaaactatattagctattctccctaaagtcaatcatatcctctacgcgtttaagcgttttgctctgctgctgaagacttagctacatttatgaactcgaggtctgcaacctggcagtcttggcactctagttcagtgtaacatgtgaaaagagaaccaagagttgctctgtagaatatgtcaaaaataaaataccccctccatccctaaatatttgatgttgttaacttttttaaacatatttaaccgttcgtcttattcaaaaacttttgtgaatattatttaaaaacttgagtagtagtagtatatttaacaatgaatcaaatgacaggaaaatagttaatacttatttaaatgtttttaataacacgaacagtcaa

SEQ ID NO: 16305 - DNA, 8632 bp, Oryza sativa
ttgcatctttcctcttataccgctgcatatctagacacttgtacattgatctaatggcggaatactaattttttgcatcaacccgcccctggtgatctaaccctccgtgccatgctttgatgactcttccagctcatccttaccaatggatggatacatcctaacagatggattttgcctgcatgccagaaagagccttctggaaggctcgggaaacggatagtccgctgtaagttaagcatagtaggggattatctatgtcgtgttgtgtaacaacatagttaataaagtagtgtgctataattcaaatgtttgtgtcatatgataaaccttgttataagacaaaagaaatataaaactattgcattttcccctttcctactttaatttgtctttgttatatgttatatttgtttccagtaaggactatttggataagccaaaatgctgataatcttgctgtgtaattgtggcgcaagagttttatttgtaatcctctattactatacaatcgcagcctactaattagcattaaatattttctatcttgcaccacagtcttccacgtaagcatcaaataaaaaatgtcggattcacttctacctcaaaaacacgctttcaattttttaacagctttctcagtactggcccaattctaagaccttgccaacagcccagctaaactcctgcaaaaagcccaactcacccacacccacatcatcgttaaaaacaaaaaaacaccagagagagatgcactattcctctgtttgtcgcaatgcataccaggaatgtataaccatatatgtatagatcatattgtatcattgtattccttgtattctcctccatttgaggatcttgtaccttagctatactataacaatacatggtcatcccacaacattgggtgtgtggtgttcctctaattccttctacattgtatcagattccaggatatttccctctctttctgcaccttcctggttgccgcgcctacactgtcgcctccgtagcctccgttggtagaatgccgacattccagcactcctccgtaaaattctcgaaggaactccgatatttcagggcactccttcctgaacttcccctcactctctactaagttaacaaattaaatatgaaactgtcacgtcctgataaattcatcccgaattaaaaatcattccctaaaaggaataatagaattaattaaaattcgaaaagaaattgacaaacactaaaatacgtaccagaaaaattcgaatgtggcccggagaatttttgttaaattctccttggtctaaaaggagccctcaaattttacttgaattttcagagcaccggaaataattattaagcaacaaaaacaattatcaaagtttattaaaaagaaaacctaaaaataaatcctcttcctcctttgggccaagcccagcccaaagtcctctcttcccccccccctctctttctccccctcctccctttgggccccaaagcctccctccattcctctcagcccggccgaaagtctgtttatctcccccgtgctacagtgctccttcttccagctcaggcagagcccgagctctccagccgtgccgtgcacagtgccaccgcctcctccttccaaatctcgcctccccgttgctcctttttccaaattagttgcgggaatggaatcctctcaatctcctcttcctttcccccaactttccccctttaatcccgcccccaatcaccgggatttaatccctcttctttgaccaccattgatgccgccggccacctcctccggcgccattttcggcctctcccgtgaccggcactccgtccttgccctataaaacgaagccctcctccttcctttggtccattttgctctctcccgagcccctagccacctccccatcaccttcccctctctcctgtgccgacggccatctccggccgcccctgccgcggcgcctgtgtgccggccggccgtgccgtcgccatccgcgacgtcgcagctgcctcctcttcctcggcttcgcctccgtttcgcggggaaatcaccggagacgcgtcttcgccggcaaaacagtggcgttgccgccactgtaccgccatcagtcgccccggtcgccgcgtcagagcgtcggccgatgtcgccgtctccttcgtcgacgtcgcggcgtcgccctccaccccggcctgccctcggtttcgccggaacgccgtcgcccgcgccgcctctccctcggtcttgtcggcacccactccggcagccccttccgccatgccagtgcgccggccgacgtcgccgtctccacctctggcatcgcagcggcaaggtcgtcctcggcatcgcttcccctccatccaaacccctccgcggtccatcatcgtcgcctctgttcgttctcgtcgtcgacgtcccgtcggtcgcccggctcgtcgtctcgcggcgtcgcctccgtcgtcggattcgcagcggcgcgttccacgtcgtccccgtctccgtgcagctgttgccggctgccctcgtcgcttcctcgccggccccggtcgtcgtcgtcgtcgtcctctcgtcgttcccggtcgtcgtggcgttcgtccctccgtcgagccgttctcgtccgtcgtccgcgttcgtcaagcgagccgctgcagccccgtcgtcgtcttcgtcctcggctccgcgtcgtcaagcattgcgccggccgcgtctcaccttcgtccaaggatcgccgctgaagtcgtcccctcgccatttgtctccgtcgttcccggccgcctccgccgcgcccgttcgtcgttgtcgttcccacgcctcgtcgcgtggtggtaaggatctctcctctcgctgccccgtcctcgtcctttcggtgtcgcccgtgcccgttgtgcggttgtcagccccggtatccatgtatcggtatcggtagtcgttcgcttgtccgtgtagtgtccgtgttagtgtgcccacttggtagccgcgttgtttcctcgtgtgcaacccgtgtggtgtctagtggagtccgtttgtcggccactcgcctcggttgacacacggggtccgcttccgtcgacccgtggaccgtctctgtgtacctggtctaccgcggtcctttaggttgacatgtggggttcgcatgtcaacagcgcagccttcctgtcttttccaggctagcgcttacacatgttttatagtcgcaaagcctaattataataatccgcaaatctccatataacagcattaaacttcggatgatcatatcttggtcatacgagctccgaatcgacccgttcaagtctcttaatgtttgttataacctaaagaactgtgtgctttctttttatgtgttgttattgcttctttataggcttgtagctttgcttgtgtgcttcgcgtagcttctgtcgttccggaggttcccgaagcgtggttcgtggtcgtcgccgaaggttcggaaggccgttctctctgagcaaggcaagtcacatcatccttgagcatattgaatcccagtttataaaattattttgatttaaattaatgcattatcgctttatttaaattcctgcgttatcactgttttatttagccatgcctatttacctttgttatgaccttattattattgctattgttattattaccttgttcaccctagaataaacaaaaccccaactagtggacactctattcatggttccactagtatgaatttaggtagatgcttcgctgtttaattaggcaacattaggtggttttataactttagacttggggaattctcatatcacttggatactatggaatggttggcttattgtggaattggacatacccctctcttcctctttcaaagcccctaaaacctgtttttcggtggggtttgggtgcatgctagttgtgggaagttgcaccccggccactataaggattaagctcaggccactgttgcaaagcactaccgtacttccacatgtctagtgggtaaggcttagtttgtggctcagtctggttataaacaaaagtacacggatggagatggacgaagtcgggggtcgatggacatctctaggacaaatgaaggctacacgagctgcggcccggtagtcgagatgtcatggcacagggccggtgtcctgctgctagggggctcaatcctgcctgcctgtcccgggggttccggccgtaggtggggttgggtcggtactcttgtctatggctaggatgggttggaaactatgtcacgtcttccgtccgtataccgtggtggtatgtggcacgtggttacacgtgaggaagatgtgtcttgtgggtaaagatgtacacctctgatcagagtataatctattcgaatagccgcgccctcggttatgggcaagccgagcaatgtacccaagttagtgttttaattcttaaaatttgctcaacaactaaaatgtggaatggttggcctgggatggctagggacgagctgggacccagggtcgggttgccagttcggtctaaatcatcgtaggccttgggttaaggcaggttcgtgcgggttcacgaccttgattaataatactgtgtagctttaggatcgtctttttaaaatggctttgggcaactaagtgacttttaaatgctgttttctgcaaaacttaacccctatatcattaccccttgtacccccttgcattaatcgtgcatccgccggtgtggcttgctgagtactgtggttgtactcattcttgctctatctttctccccccttcagtaagagaagctttggagaagaagtcttaggtggagtcttggcttataccccagttgagcgcctgtgaagatggagccgtaggcccgctagtccgctgctgtttattttttattgtcaggccttaagtgcctttgtaataatgtaaatattatcgatataataaagatgtgtcttttatatcatgtttgtatggtgtaccccggcttttcctgggacggggattaatacactagcgttcgggaaaatgcaattttctcggtcgcgacaagctggtatcagagccatctcgactgtaggataagccaagtggataaaacctaaggacatattttataaataaaactatttgcgaaagttccttttttctccttcccctaatgctatttgcaaaaggtttactcccttcttccttcttcgaatttccactagtactagatggttagttttgcgaagaagaagatgtcgccaattgtttgccgaagctccggaagactgcaggatccgctagcgaagcgaaggaagcagtgaagccagctgtaaagcaggagtgaagatcttggagaacctgtcgcagaacctaagccaccctctagggtagagtcgttagtcgtgtgtttccttgcttgtgtgtgtagcgcgtggttttcatcagtggggtgtgatgtaaccatgctaggttgtttgcttaatcaacttgcagaataagtgaaacaaacaacacatcaacaagaagagttagttcctttaaggtcctgtctctagttctggtctattctttcctagcttgtttcctctctcacctcaatccctgtaacagatgtttaacagagaaaaaggaaagaatgtcagagggtatgcctccagtaactcaagttttcaactcaatccaccactggcctcaagagagttaacaagggcacacccttggtccattccgagcatgctgcttggttcacagctaccattggttggaagtcaagaccaaaatcagtatgtgtttgatcgagcatttgccacccaggtcaatgagcttccaatgccagaagagcatgtccccttttgtcatgattgtagagagtaaggacactatgccctgaattgtccatgggtatatgtcaaagaagccccttcctttggtttagcagggcagacatcgctaaaccagcctcctcacaccaagtcaagcttgcagcctagtgtgcaaagtagagagcccaatggagagaatccattgaatcctgggaaatgctttcctcctagcctttcgtaccacgtggggtcacgtactaagcaagccaaaggcaagaagagtaagaatcagaagaaaaaagcaccgatgcgaactgaagaagaagtacgtaagatgactataaccagcaccgaatggcctccagcagggataactattcctagacgtcaaagaggaaataccttccgaggtgcacgaaagttgacccagcacctcctaagccatggcggcagagtatctgatagtgaagggtcagatcaagtctcctcggattatgaagatgagtctctccgacatctcggcgaggaagagatggaatcaaaagcatgcccccgttgtggagaaattggacacgttgctagcatgtgtttcacactctgccctcattgtgaggaagaccatccaccaggtgaatgtcccacccgcaaggtcacatgttttctgtgcgaaggtacaaaccatgtgcccaaggattgccaactcagtgtgttgttgaccaagaccgcagaaatccaacgaacaaccctacgattgtctcgtcagttagtcagctccaacagcaacatacgacagaatatgcatgccacaagtcagccaagtgactgcctgcttagcctggcagcctgaagctgcgtggcaattaagatgcataaggcaagtaatacccttcaagcaccaagccattctcatgcaccgacggcctcagcaaagaattgtcatcgatggaagaagttgtgtctctccccgacctactccaggccgagcgaagggcaatcaacctcaggaggatgatacgaagcagaagaccgttattcgcttcaaccagcaatcagaaggaagcttctcctgtgaatgataacaatatgcagtcctatcacatcatcacagaaccaatcaaggatgcagtcactagaacaatgccagctatatctctccagaatcaaaatgagcagccatgtttgtggttttcagttcgcgacttatcattgtgtaatggaaagtatgcagacaatcagtgtaatacataaatatattcatgtctatagacagtagacaagctatgcttatggatgattcatgttgaggatacaatgtaccgatgttgagcaccttccctttttgtttaaggcagtgcctcgtattcatgtaatatgggagaaatgtgtaataaaaacaagttctatgaggactctttcagaagatgctgatatgggattatgtgtataattgtttactgtcaaaggagacctagggtctcatttcagaggaactatgttctaacctcgagttaataaccaacctgatgatggaaaagaaaatcaagcgattaaccaaagagacatttgtttggactaagagtttcagatgtgtcttttttggatcaaaggcaatggcagtcagtatagcttttggcgaaacacttcaaggattcactgaaaggcagtagaccaaaggacctcatcgccaccagaagtgtccgcaacccacattaaagagtaccacctgttagagataggccgaaagatgattgataaaagatattggcaaagaggttctctagcaggaaagatgtaggccgaaaggtgattgataaaggataatcaaaaacatgctctgcatcactcaaggaagacccctgatagtaatcgccctgcaacagtcaccttgtcattgagagaaaaaaaaagtcgtgagtaagcaagatgacctaggtaaaagtgtttctatgaaggcaaggagtgaaatcttcaactcagtatcagatgctacacggagtgaaaactgcaagcaccggttaccaggcaatgccatgtcttgggagatgatccaatgggaaggaactcatcaaggtcaaaggagtaaaggaatacgttgaatgctaaataatgacaacctgaagataatagtgggaagtaaactgaatgtaaagaaccaagtgatatgttcgaagatagtctacagaggtcagattaaaatcacatctaacaacgaagcttcaaatttggcaggataacgatcaaacaataagaagttcagcagtaaagtcatttgggaagacgtcaaagcatgtcaagtgggataatttggttcccttgggaaacataattcaaaggcaaagttatcgaccctcacaatgaatagaggaaatatctagcaccggagaccaggaaagctaatatgagacaatcagtggcaagttgtcaatcatggtattcttagtaagcaggatatcatagtctaaagcatatggtggtaagttagaagtaaatgacaagcatggtattctcatgatgacaagcatggtatcctagtaatgacaagctgatatcggcgcaaaacgtgaagtgggtaacttgtatgaggttgacgccaaagatatgaattatgagaagttctggaactgaagccccatcttccaatgccgcagcctagtcgaagtcagctagaggtgcaaccagggaaaagtcatgtgaagagaagattccatctataacaggagatcgagccaagcagtccagagtggagaggttttgctaggcaagtttgttatagaagacgcgacggaagaagtcagataagaagagaagcccgcccaacctatcttcttgctagcctcctcgaatctcgg

SEQ ID NO: 16306 - DNA, 1440 bp, Oryza sativa
gcaaatcatgcattacaattgatcatattgtacccaatttacaaatatcctgcattctattaaatgttgcattcttttacaatgtcatgtgggatggttcctattactcatccattattgtttaccctatgccattgataacttgggtatcaaaatgactagatgttggtttaggaaatgcttagctatgcttagctcaactagtacacaaatggggatcatattactatatagactttgactattagcatagctttggattagtgccaccacaatggtgttagttaattaaaatacactgaatggtgggttgtgggtgcatggttttgctggtcgcacccatggcaattaaggaccggttcacgggaaaccctgggagacttaccgtgcttaccacaagcgggagtgggtaaatgcttgatttgaagtacagctcgaccctttcctaggcaccggtggcgagggtgggcatgatggagttgggtcggcgggggtgtccggttgtccagctgccggattcaccgcggcgcaagacgggaccgcccactgccttttgaggggtgggggtgaaaccttagcgtggtgtggatggttaggggagggttatgcagagggtcttgtcacgattaccccctttgcagtatcatggtgatacttcgggcatggcgacatgtgtggaatcgtgtcttgtgggtacagttgtacacgtctggccagagtaaaactattcgaatagccgtgcccgcggttatgggcgaccaaccagattcaccgtgattagtctcacccctagtttagcttaatgaactggtgtagtttaagtggttggttgggcctgttgcagcgtggtgtagcgttggacaatgattggttaatattaattaattactacaattgttttactgctttcaactactgcttttaaatgcctgctttatgcaaatgaacccttagcctcctttggatatatcctgcatcatacctcctcttctggtatgacttgctgagtacagtggatagtactcagccttgctctcttttcccccacaccagagctgaagatcttcctagttggagctgtcttattgaggttggtttcgtcgctgccgtcaaggattgcctgtggagtggagtcgccccgctgctgaagtcaagcttccaagtctagctcgttttaccttttccgctgcatttgtaatcttttatatttttgtaagatgtggatctgtgtgtcaacaattatcgtttgtgtaccctggctagtcctagacaggggtttaatgcacattcagcttagaaatcctggttcgtgaatttctgggcgtgacaactataattataggaatatgatctttctatattctttccacttagcttagataatcatgaattagagtataaatgcttctgcttagtgtcctctacccttggaattatgtt

SEQ ID NO: 16307 - DNA, 3353 bp, Oryza sativa
aactcggaattggaccgttcaagtctctaatttttccttaagaagtcaagaacccatttttgtgctttgtttctgctgttatgtggagtttgttagagtaaaagccttttcttttccgttggtcgtgtagacgctgcagcttcggaagatccgctcttcgtagaagtcgaagccgtcggttgggaaagcgagcaaggcaagtcacatcatctttgaacatattgaatcccagtttgtaaagttatgttgatttaaattattgcattatcgctttatttaaattcccgcgttatcactgttttatttagccatgcctatttacctttgttatgaccttattattgttattgttattatttccttgttcaccctagattaaataaaacccctactagtggacactctactcgtggtatccctagtttaaatttaggtagatgcttcgcaatttaattaggtaacattaggtggttttataactttagacttgggaaattctcatatcacctggacactgtgaaattgttggtttattgtggaattggcttcacaccgccccctctattcaaaatccccaaaaatggttttaggctgggctcggggtgcatggttttgatggtagcacctcggccatataaggaccggtcttcgggcctctgttgcaaagcactaccgtacttccacatgtctagtgggtaaggcttagtttgtggctcagtctagtcataaacaaaagtacacggattggagatggatgaagtcgggggtcgatggacattctccagggcaaatgaaggctacacgagctgcggcccggtagtcgagatgtcatggcagagggttggtgccctgctgctagggggctcagtcctgcctgcctgtcccgggtgtcccggccgtagggggattgggtcggtactcttgtctatggctaggatgggttggaaactatgtcacgtctttcgtctgtataccgtggtggtatgtggcacgtggttacacgtgaggaagatgtgtcttgtgggtaaagatgtacacctctgatcagagtaaaacctattcgaatagccgcgccctcggttatgggcaagccgagcaatgtacccaagttagtgttttaattcttaaaacttgcttaacaactaaaatatggaatggttggcctgggttggcttgggacgagctgggacccagggtcgggttgccagttcggtctgaatcatcgtaggccttgggttaaggcaggttcgtgtgggttcacggccttgattaataacattgtatagctctaggatcgtgtttacaaaatagcttgagcaactaaatgtctttaaatgctgtttactgcaaccctaacccctctatgttataattcccttgtactcccttgcatttattctgcacttgtgggtgtgtcttgttgagtacggtggttgtactcagtcttgctcaatttttcccaagcccagaagaggagctccttgaagatgaaggctttggtgtctagctcgtgcctgccgtcaagtgcctgtggtcgtcgccctagtcttccgctgtttctcgtttgtctttgtgtgttctgggccttcgctgcccatgtaataaattaactatttacgcttccgcttgttaaactctgatttgtatcaacttttggtgtaccttgcctcctgggacaaggattaatgcacgcacgtaaggaatgcccgttgggttatttccggtcgtgacacaaagatatattttgtagacggtattattgtccaaaacctcaattagaatgaaaccgaagggagtaatataatttccacttaaaccattgtactactttgtactattattttcaaataatacactattttaaaataaagtttacacaattatattgtgtacctatcaaataaataatttaagatctatattaactaatttatacgtgcactcccattatttaaatcatccgatatatttttttttacattggactatcattctataataatgcattgtttcaacataaagtctacaacattatattgtgtacccactaaattaacaatttaaaatgtatatcaacgaatttacacttacactaaaaccggtggatccgttatttaaatcatcggatctattatttgctaataaataaagcatccaaagctccctttttggctcggtgcacaatgcacgtctgcacatttgccttttgcacacgtgacaaagcgtcgtgtctgaggcatgatcacgaccgctgcagcgctaccgctttgctacatgtcaaatcatatatggagataataaattttgttaataacatgaaaagaaaattaaaggtgtgatgcagcgagagaagaattaagcaccgtgggttgtgtttttggaacacttagttccatttaagctgaaccaagagttgattacataataattataatgtattatgttatgtcgtatttgaattttgtactatttgttcgtacaggtgaaagaaatcattatattataaatatgagcacaatattaaagaatatcaatagaactcttctaagacaagggagtttaagaccctctttttttttgattccatagtttggattttcgtttgcacgcttttcaagtttctaaatggtgtcttttttaaaacaatagtttaacttttagaagtcaattcattcgtttataccctcaaatagcaatcgcataaatcagataattcatcaatttcagttgtcctaaacccgcgactcatggtggacaattggggatcgacggatactcaaagtcataatatgaatatgtaagagctactatgaataactgtaaataggtgtcaaaattaattgctattaattagacatctaatggcttgcttgccatataattactttctctctacgtgtatataaacatcgacgaagctggaacaaatattaccatatgccccatacatatatattaagcggttaatattgtaattacatgtgttaagtcctttaaaatttcttaaaatgctctcaagctatcacgtggtgctctaataaattagagcaaatattagaaattctatcaaaaaaagcaaagcatatattacttgattttcacttaaatcggtacgtccaatattataaaccgttagattaaattgatcttagaacaaactaaatactatgaggtcccacctctcctcccactgcataggtgcgcacctacgtaagtgggtacatacacttaccctctcttttttcattatcccctttcttctttgttttccatgcatacgcttccctccctttcttattatatcatgtgccttatgagacgattaatcacaagaatttgcatatcttgctctc

SEQ ID NO: 16308 - DNA, 4133 bp, Oryza sativa
ttgtctttgcgatagacgtgtcggacctcgatcccatcgaacctcttctctaacttcctgacttctgcgagatattttgacaactcggggttagagcatttgtagtctttgtgcacctggtttgtgactagttcggagtcccctttgacgattagtcgcttggctccaagtacggctgcagctcgtatcccggcgagtagtccttcgtattctgcagtgttattggttgccctgaagttgaggtggattgcgtgcttgaattgatctccggagggagatgttaagataaatcctgcccctgctccttggctgttgagtgcgccatcgaacgccattgtccatgtttcattgtcaccttggttgtctgatttgttatctggcatagtccaacttgcaacgaagtcggcgagtacctgggatttgatggcagttcgcggcacaaaatggacatcaaattggcttagctcgactacccatttcgcaatgcggctgacgacgtctttgtttctcacaacttcgccaagggggaaggaggagacaactgtgactctgtgggcttgaaagtagtggcgtaatttccttgatgtcatgatgattgcgtaaagcagtttttggatctgtgggtatcttgtctttgcgtcatggagagcttcgctgacgtaataaactggtcgctgtactttctctctctcgacgataatgacggtgctaacggaatatggcgtggcggcaatatagagaaataattcttcattaggttggggagcaacaagtacaggggggtttgataggtagcgcttgaatgcaataaatgtctcttcggcttcctgtgtccatacaaatttgtcttgtttcttcaacaaagcgaagaaaggttgtcctcgttctcccatcctagcgacgaatatgcttaatgctgccatgcaaccggttagcttttgtacctccttgagtcttgtgggcgacttcatgttctcgattgctttgatcttctcgggatttgcctctattcatctgccagagacaaggaatctgagtagcttgcccgacggtactccaaacgtgcacttctcaggattgagcatgaggcgatatcgtcggagtttgtcgaacgttttcgcaatgagtcgcttgtcttggttttgacaacgatgtcgtcaacgtaagcctcgacgttgttgccgagctggttgctaagtgcaccctggaccgtgcgctggaaagtattcccggcggttatcagtccgaaaggcatcttaacatagcaaaataccccgaacggcgtgatgaacgctatcttctcttcgtcctcttttgcgatgctgatttggtggtagccagagtaagcgtcgaggaagctcaatagctcgcaaccggctgttgaatccaccaattgatctattcgagggagaggaaagtgatccttagggcacgccttgttgaggtcggtgaagtcgacacatattctccattttccgttggccttccgcaccataactggattggctagccactctggatgaagtacttctctgatgaagccagctttgagaagttcgtcgagctcttctcgtatggcttgtttccggtctggtgcaaatctctgcagtctttgcattactggcttggcatcgggtcacaccatgagtttgtgcccaatcacctccctggggacccccggcatgtcggacggctgccaagccaacacatcggcattatcacggaggaacgtgatgagcgcgagttcctatttctcgtttagtgtcgccctgatcttgacagtcttgtcggggttagccctggagagtggaacgatcttgatggtgccgtccggcttcggcgtcttatttggcttgctcactttcttgggtggctcagtcgtggcgggtgggctgggtgtttgctcgaccatgtcgaggctccgcttgtcgcactgcaccgccagctttgcgttcccttgaataatgattgttcccttcggtcccggtatcttgagcacttgatacgcgtagtgagatgcggccatgaacttcgcaagtgcagttctcccgatgatggtgttgtaagctgtatcgaattcagcaacatcgaaggtgatctgctctgttcggaagttgttggcttggccgaaagtcataggcaacgtaatcttacccaaaggtctagacgatgattggggagtaattccatggaagggttgatcggttggtgtcaactcactttgcggaagtcccattgcgtccagagtgctggtgcagagaagattgattgagctgccaccgtcgataagaactcgcgctaccttgatgttctgaatagtgggttcgaccacgatcggatatcgtcctgggatgacggaggttttggggtggtcttcctctgagaactctattttctgctcagaccacttcatcttgggtgcagccccctgccacgtcgaacagacttcacgttccactttcttgtattctcgcttggaggaatacgttgtggagccgccgaagatgtgtgagacgtggaggtcggagtctggatacgcagaatccggttcgtgaggaggcatctcttcgttcttctcgacaacgcgtactcgcttgcctttttcaaacgccatgtgcttctcgagcgactttttgaaaccaatgcaatcctccagagaatgtttgtccgttttgtgtatggggcaccatgatttctttgtgtcgctgccttgtgggtctgggcgcttgggagggttcgcgtattctgctgcgaggacttccgcttgagctttccttttcctatttttgtgatttttcttcttgcttgactcagatgcgtctgcggctggtttcttctctcccccggtcttcggtttgtcgttcttgcgtcttagcgcgtcatccacatgggcgcatcactcaacgatctcgaataatctccgagtagttgtgatgcgtcttgtcggcaactcctgggtagtgtagcgatctctgacaccggacttgaaggtgcgaattacagaagagtcggtaatttcgggaattgtgtttctgcactcgttgaagcgccgaacgtattccctcaatgattcccccgagttctgtgttaacgcgtgtaagtcgtcttcgatcgcgtggtgcttgtatgttccttggaaattggcgacgaattgttgccacaggtctgcccatgaagagattgagtaaggaggaagatgcatcagccatgaacgtgcagaacccttcaacgcggttggtaaatagttcgctaacgcgttgtcgtctgctccggcagcatagagcactgtcgagtagacttgaaggaattcttctgggtcggtgctcccatcatactttttaatggctctgggtcggaatctctcgggccatcggacatcacgtagggaacgaccgaaagccctacacccagcgttgggggcggtgggttgtcggcggtcgcgtgaccttcgtggatgtctgtctgacgatgaagaggatgcggatgatgacgatgacgatgggtcgcttggttccagcgtacggttacgaggatgatgacctggatctcgggaatcctctcgttgtctctcgctgttgtctcggcgccgatctccatcgtcgtcgtcgttgcggcgacggccatgaccagtattgtctggcccccgttgttcgcgatcgttgtaatctcggtcctcgtttgggcggtttcctcgatcatggcgccgtgaagagacatgacgccgagagcgatttgcgtcgtcccgtgtgcgtcgtgcttttcggcgaccgttgatttgatctcgaagatcgccagtgccacgaggtggaggggtagcctgtcgaggtaattccctctgctccggatcttcaccattggcgtcgccgattcgtggctgatcttggtgtgctgcggtagcggcttcttcaaacgcgttgctgaggttggtcatcgattcccgtaatcgttctatccaacacttgaggtcgtcgttcagaacgggatcgtaaggagtttccctcagtatagcttgaacagccctgatgtgctgggctggagtagtcgattgattcgccgcttcagcgttggcttgcgctgacgtgccaacgccatcgatagccaatacctcccgcggcgcacttgttgtcgatgac

SEQ ID NO: 16309 - DNA, 7031 bp, Oryza sativa
gggcgcgcccagcggctgccagatgggcccggccgtcagccgccagcgcccacgggtgcggctgacgcgtgggacccacagcgccggccggcgtcagccgcgtgcacccggtccaccgtggaccgagaggctgacgcgtgggccccactcccgtggacccggtccgcgcgccctctctcccggctgacgcaataaacgagtttttaattaaaatttaaatgaagaaattcgcaaatatccatttaaagagcatataaacttcaaatggccataacttggccatttgaactcggaattggaccgttcaagtctctaatttttccttaagaagtcaagaacccatttttgtgctttgtttctgctgttatgtggagtttattagagtaaaagccttttctttttcgttggtcgtgtagacgctgcagcttcggaagatccgctcttcgtggaagttgaagccgtcggttgggaaagcgagcaaggcaagtcacatcatctttgaacatattgaatcccagtttgtaaaattatgttgatttaaattattgcattatcgctttatttaaattcccgcgttatcactgttttatttagccatgcctatttacctttgttatgaccatattattattgttattgttattattattaccttgttcaccctagattaaacaaaacctcaactagtggacactctactcatggcaccactagtttaaatttaggtagatgcttcgcaatttaattaggtaacattaggcggttttacaactatagactttgggaaatattcatatcacctggatactctggaattgttggattattgtggaattggattcacaccgccccctctattcaaaatccccaaaagtggttttaggctgggctcggggtgcatggttttgatagtagcacctcggccatataaggaccggtcttcgggcctctgttgcaaagcactaccgtacttccacatgtctagtgggtaaggcttagtttgtggctcagtctagtcataaacaatagtacacggattggagatggatgaagtcgggggtcgatggacattctccagggcaaatgaaggctacacgagctgcggcccggtagtcgagatgtcatggcagagggttggtgccctgctgctaggggctcagtcttgcctgcctgtcccgggggttccggccataggcgggattgggtcggtactcttgtctatggctaggatgggttggaaactatgtcacgtctttcgtctgtataccgtggtggtatgtggcacgtggttacacgtgaggaagatgtgtcttgtgggcaaagatgtacacctctgatcagagtataatctattcgaatagccgcgccctcggttatgggcaagccgagcaatgtacccaagttagtgttttaattcttaaaacttgcttaacaactaaaatatggaatggttggcctgggttggcttgggacgagctgggacccagggtcgggttgccagttcggtctgaatcatcataggccttgggttaaggcaggttcgtgtgggttcacggccttgattaataacattgtatagttctaggatcgtgtttacaaaatagctttgagcaactaaatgtctttaaatgctgtttactgcaaccctaaccctttatggtataattcccttgtactcccttgcatttattctgcatttgtgggtgtgtcttgttgagtacggtggttgtactcagtcttgctcaatttttcccaagcccagaagaggagctccttgaagatgaaggctttggtgtctagctcgtgcctgccgtcaagcgcctgtggtcgtcgccctagtcttccgctgtttcccgtttgtctttgtgtgtgctgggccttcgctgcccatgtaataagttaactatttacgcttccgcttgttaaactctgatttgtatcaacttttggtgtaccttgcctcctgggacaaggattaatgcacgcacgtaaggaatgcccgttgggttatttctggtcgtggcaagttggtatcagagccccccttgaccctaggacgagccgtagaccccaagccttagcaatattttcacaaataaaaatcctttgttatttgtgaaaatcctctagtctctctctgtcttgctgcttcatttatcaccaaaatctgacctttgaaaatgttgcttttctttttgtttttgtttgtagatggccggcagcgtcacccgtcgtggtttggacatgactggcttcgtcttggagctgcgaggcatgtgcgtggtcctggggtatccacatggagtggactaccaggccaggccgcttccggatcaggagggtgatgatgcggagccccccgctgcttgggaggtcactgcagtgatcctctctggctctcccgagcggacttcgctggcagtcaccgcgggtggagattccttccccgccgcttgccagaacgccgccctcctcgccatcggcactcttcaccagcgctacccggacgagttgcagcactcgccctaccgctaccaccctcgtcgcggaggagcccgcgactacgccaccttccgggatgctagctcggaggatgacgctaccatcgtgcacctggcgcgcatggtggaggcgtacgacgcggctcgtatcgacttccaccagatggtacgccgcggcatggtcgagaacaacctgaagatcctggagctgcgtcaggagaacctgcagctcaagaaggacctggacgcagtggagacgcagctgcaccagctcaagatcgcccagggagagatctgccgccccaagcgtcgccgtgtctgccgcagccagaagatcaccgcccgcaagagcacctccaggcccgagcttgttcgtcagtccctggcgtggacttgtttcgtcgagacccctcgtgccgagcctgcgcccgtggttccccaggagggggaagcctccggcgttggaagcacggaggatgcgctgttgctcaccttccgccctggcccgtcgcagcagtagacgagcagttagtaggcttgcgcgtgtgttcttcctcgtttgtcttcttgttgagtcgtgtggggcatggttatgccggtgtgtggcataactatgtcggagcctgccttattttattcgcctaagcaacttgaactttaatgaaccaattcaatagcagtaataaattcaagaattatagtagtcgtgggtggttcgtttaattgttagctctttccctgtttgctggttctgtgtggggttttcagatggtgacgaccagaagaaatgctgccaccggtgatggcaaccaacccgaaggcagcaaccacaaccaccagggtaacccacctccacctcctcctccgcctccaccaccaccaccagacaccaacgccattctcacccaaatcctcgcccagcaagccaacatgatgactgctttcctccaccacctccaaaatccaccacaacataatgctccaccacctccccaacactctaaactcgccgagttcctccgcatccgcccacctaccttctctagctccaacaaccccgtggatgcgttggattggttgcatgccgtggggaaaaagctagacacggtgcagtgcagcgatgaggagaaagttatcttcgccgcccaccagctgcagggacccgcatctctatggtgggaccatttccaggctacgcagccagaggggcagcctattacttgggcccgcttcaccgccgctttccgaagaacccatgtgcccgctggagtcgtggcccttaagaaaagggaattccgagagttgaagcaaggcaaccgctccgtgatggagtatttgcattagttcaataacctggcccgttacgctccagaggatgtgcgggaagatgaggagaaacaggagaagttcttggcaggaatggaccccgagctgtccgtccgtctagtctccggggactatccggatttccaacgactggtggacaagagcatccgcttggaagccaagcacaaggaactggagtcgcacaagtgccgcttggcgaatttccgcaatcagcagggtgctaaccagagggtccgctacaccaatccctatccagggggatcctcctcgcagcagcaacaacagcagcagcagcaacctcgctccgcgcctcgacctcaattcgtggtgcgcatcccacagccgcagcagcagcagaatcaacaagggactcgtgcgccccgtcctcctacgccaactgtgcagcctggtcaaggccgcagggacgctcaaggtcagcagcgtctgtgcttcaactgcttcgagcccgggcactttgcggataaatgcccaaagccaaggcgtcagcaaggccaagcgcctccccgctccaacaacggcgggaaggatgtcattcggggtcgtgtgaaccacgtgacggccgaggacgtgctgacaactccagacgtcatcgttggtacgttcctcgttcattccatccctgctacaattttgttcgactctggagcttcccactcgtttatatctgtgccattcgttgggagaaatcagttgggggtagaaaggcttaggaaccctctgctcatcaccacccctggaggggttatgacagcaaagtactatagccctgccgtccctatagaaattcaggggattccttttccctcggatctgattctgctagacaccaagaacttggatgtgatccttgggatgaattggttggctcaattccaaggagtagtggattgcgcgagacgcactgtcactctgtaccgagggccagaacaaccggttgttttctttgcacccccaacctctgtcagaagttcagaactgcatcagattggactgtcagaaatccccattgtcagagagttcggagacgtgtttccggaagaactacctggtatgccgcccaagcgagagattgagttccggatagatcttgctccaggaaccactcctctgcataagcgaccctaccgtatggcagcaaatgaactggccgaagtaaagaaacagttggaagagttgaaagaaaaggggtacatacgcccgagtacttccccatggggtgctcctgtgatttttgtagagaagaaagacaagacgaagaggatgtgcgtcgactacagagctctcaatgaagtcaccatcaaaaacaagtaccctcttccccggatcgatgatctgttcgatcaacttaaaggtgccactgtattctccaagattgatcttcgttccggatatcaccaattacgtattcgtgaagaagatattccgaagaccgcattcaccacgcgatacgggctgtatgaattcacggtgatgtcgttcggtttaaccaatgcacctgccttcttcatgaacttaatgaacaaagtgttcatggaatacttggataagtttgttgtggttttcattgatgacattctgatatactcacaatcagaggaagaccatcagcaccatctccgtctggtgttgggaaagttgcgggaacatcaattgtatgccaagcttagcaagtgtgagttctggttgtccgaagtcaaattcttagggcacgtgatatcagctaaaggagttgctgtggaccccgaaacagtgaccgccgtcaccgattggaaacaacccaagacagttactcaagtccgcagtttcttaggtttggcaggatactaccggagattcatcgagaacttctccaagatcgctcgacccatgacacagttgttgaagaaagaagagaaatttgtgtggagcccgcaatgcgagaaggcgtttcaaactctcaaggaaaagctggtttcctcgccggtgttaatcttgccggatactcgcaaggacttcatggtgtattgtgacgcttcgcgccaaggattggggtgcgtgctcatgcaggacggtcatgtggtagcctatgcctcacgtcagctacgacctcatgaaggcaactaccctacccatgatttggagttagcagcggtggttcatgctctaaaaatctggcggcactatctcattgggaatcgctgtgaaatctatactgatcataagagtttgaaatacatcttcactcagtcggacctgaatcttcggcaaaggagatggttagaacttatcaaagactatgatgtgggaattcactatcatcctggtaaggccaacgtggttgccgacgctctaagtcgaaagagccattgcaacactcttaacgtccgtggcattccacccgagcttaaccaacagatggaagccctgaacctaagcatagttagtcgtggattcttggccgcgttggaagccaagcccaccttgctcgatcaaatccgcgaggctcagaagaacgacccggacatgcatggactcctcaagaatatgaaacagggtaaagccgctggtttcacagaggatgaacacggaaccctatggaacggaaagcgggtatgcgttccagataacagagaacttaaacagctgatacttcaggaagctcacgaaagtccttattccatccaccctggcagtacgaagatgtacttagacttgaaggagaaatactggtgggttagtatgaagcgggagattgcagagtttgtggccctacgtgatgtgtgccagcgtgtcaaggcagagcaccagcgaccggccggacttctccaacctctccaagtacctgaatggaaatgggatgaaattgggatggatttcatcaccggacttccaaagacccaaggtggatatgattctatatgggtagttgtggatcgattaaccaaggtagctcgattcattcctgtgaagaccacctatggagggaacaaactagcggagctctacttcgctaggatcgtgagtctccatggcgttcccaagaaaatcgtatctgataggggaagccaattcacctctcacttttggaagaagctccaagaagagctgggtactcgattgaatttcagcaccgcctatcacccgcagacagatggacagaccgagcgtctaaatcagatccta

SEQ ID NO: 16310 - DNA, 793 bp, Oryza sativa
cacgcacgtccaggaatgcccgttgggttatttccggtcgtgacagatcgatatcgattaccctaacgaatcgatctgaggctggagtcgctccttgttccttgccgttatccctgatggggacgtatgacttaggagacggagttttcatggcgccgaggaggactttgcagctcgagaggtcgtgattctttgtcttgtgaataggacaataaacatcccgagttggagaagtacactgaatttgtcacgcccgaaaattcactagtaatttccgaacttatttgtgcataaaatcctcgtccaggaatcagccgaggtacacaaactgacaatttaatatacagattcatcaaattaactaaaacgataaatacttacttatgaggcacttagtcctcatcatgaagaaaactgcagcggaaaataaaatctagcgaagctccggctccactcccacaggcagctcaactggggtataagccaaacgtcttctccttctggattctttttcttcaactgaggttgattgattattgcaaggtgagcatatgacatactcagcaagccacacagcaaatatgcaagtgcacaaggataccaaaggatggcataatatcggctcatttgcaaaagcagcatttagcaaaacatttaagagaagtaaaacagtggagtaattaatcagaaattttaaccaacactgaacagcacacccatgctgcacaggcccaaccattctgaacaaccatacccggctgaacagatctaactccaaaccaggagctaagca

SEQ ID NO: 16311 - DNA, 1949 bp, Oryza sativa
tttttattaaatacctgcttaattctataattcctagattcttctgggattatttgagctaaggaagtatttttagtaaatggaattgcatttaagaaataatttaaattgaaaaaggttttaaaagtcttcttttggctttgggccgaagtcggcccaaaacctctcttctctccctcctcggcccagccggcccagtccgcagccgcgcgcgcgcgttcggtcgctgacaggtggggcccgcttgtcggatccgtcttcctcgcgtcgccgccgccgcccgaaaccctagcgcaagccgccgccgtctccttccaaattcggccgcgtctttccttatccggccgaatcgtttgagggaaaatgatcctcgggatctcctctaccttttcttctttggaagcttcgcctaaatcggtttggaaatcgatggattcgagttcgaatcggatcggttttcctctctccaagccgagctttccttcgccgtctccgccgccgtgggccttagccgccgcctccttgcacctatttaaggacccccgagctctcctctacccgtcgccaccctcgccttcgcctctcgtcgtcggaagagctctagcgccgtgtgccctagcttcgccgtcgccgccgccgctccagccgtgcgccgccgtcgtttcagccgtcgccgtcgctcgggaagaccgccgtcgggttcgcaaggtcgtcgccgtcctcgtccgccccttcgcagccgccggagaccgccggagcttcatcgccgtcgtcaacccgaaggttcccgccgcttcctcctcgtcgccgtcgccgtccgttgcttctccgtcgctcttttggtcgtcggtgagttcgccgtgccgcccgcttcgtcccggtgccttccgtttgcgttctcgcgccgccgttcgccggcaagcgtgcgccgcccgagccgtctgcctcgccgagccgccgccgccgtcggtgacgtcattgctggcgtcatcaaggccgtccgccgtgaaccgccgtggacccgatcgatctcggccgtccatcttggatcggttagatctcggccgtccgttcgtgtgagccgtcgcccgtgcgcccggtccaccgaaaccctagccgctgacgcaataatccttcttttccttttcaaaaataattcattattgcgtcataattcaattaaaatcagtttaaaggttttaatccgatttaatctttaaaaattcatatctaattcatcttaactcagtttaatgtggttcaagttgcaaaagttgtataaaataaagatctacatattaaaattgtccataaattgaattaaatttatttaattctttttaaatgggctttaattagatttaatcttgtaaaattcataataaattcatatgaagtcagaatgaggccgttcaagtctcataattcatctaaaaatatgatctacatgtttgtttactttttatgtattgtttatttggtttttattagtctttttcctcgttttgcgtgatagcttgtcgtttccgtcgttgcgaaggttcgcgagtgcgccggaagtattcaagaagattaattgaagaccgattattgcaaggcaagtcacacagatcctaaacacaatcctttgagcatgttgatcctatatttaaattctctatttatttcaactgtgcatttattttcgaatgtcattgggtggaattaacctattctttgttatggcccttttgttcttgattactttattccttgataccttgggtgattataattggactagttgagctttatatatattggttcaactagatattagatatgattgcttagccatgcttagaaacattagcacacatttgggataactaatgtttcactatcatttatggttatatttaatggtagctcacgatggtcaatcgtgattggttaattaattacttgcc

SEQ ID NO: 16312 - DNA, 593 bp, Oryza sativa
gggttttcagatggtgatgaccaggagaaatgctgctaccggtgatggcaaccaacccgaaggcagtaaccacaaccaccagggcaacccacctccacctcctcctccgcctccaccaccaccaccagacaccaacgccattctcacccaaatcctcgcccagcaagccaacatgatgactgctttcctccaccacctccaaaatccgccacaacttaatgctccaccaccacccccacaacactctaaactcgccgagttcctccgcatccgtccacccaccttctttagctccaacaaccccgtggatgcgttggattggttgcatgccgtggggaaaaagttagacactgtgcagtgcagcgatgaggagaaagtcatcttcgccgcccaccagctgcagggacccgcatctctatggtgggaccatttccaggctacgcagccagaggggcaacctatcacttgggctcgcttcaccgccgcttttcggagaacccatgtgcccgccggagtcgtggcccttaagaaaagggaattccgagagttgaagcaaggcaaccgctccgtgatggagtatttgcatgagttca

SEQ ID NO: 16313 - DNA, 1296 bp, Oryza sativa
agctcgcacctcggtatgtgggtcctttccgtatcattgctcggcgcggagaagtcgcttatcagttggagctgcccgcctccttgggcaacgtgcatgatgtgttccatgtgtcgcaactcaagaaatgtctccgagtgccatccgagcaggccgactcagggcaaattgaagttcgcgaagatttgacctacgtggagaggccagtgaaaatcctggacaccatggagcgcaggaccaggaaccgagtaatccgtttttgcaaggtccaatggagcaaccatgccgaagaagaagctacctgggagcgtgaagacgagctgaaggcagcccatcccgatctcttcgccagttcttccgaatctcggggtcgagattccgtttaaggggggtaggtttgtcacgtcccaaatcgactctaaaatacatcctcgaaattgtgccgagaataattaaaattcatgtgaaagcctccaacaagtaaaatgtgcaaatttaaaagtcaaataaggcttggaggatttttgtatatttcctaaaagcctaaaatgcgtaaataaattttagtggaattttcagagcacaaataataattgagaagaaataaacaaagttgaaaaggtttataaaaagaaaaaccctaaaagtcttctttccccccctttccctcgtgggccggctcggcccaactctccctccctctctctctcctctcctccgcggcacatcggcctcctccccgcgcgcgcgccgctgacaggcgggcccgcccaccaccctcgctgacgggtggggcccacctgtcatcccccacctcgcgccgcgcccgccgcccgcccgtgccctagcgccgccgccgccgccgaatccgccgcatcccgccgtccccgcgcgcattaaagtgggggggattattccccgcgattccctctcccgtttcccccactttcccctctctctctccctcggattcgctcggattcattcccgaaatcctcgccggcgtcatcaatggagccgagatctccgcgcccgtttcctccctctccggccgctctctctcactcccgacgctatataattgttccccgtgcctctctcctccgtttccgccgctcgccgctcgctctccccgtcggattcgtgctcgcgccgattgtacctctctctccgccgtcgccgccgagctccggttcgccgccgtcgtcgctccggacttcctcccgtctcggcgtcacctccatcggcttcgccgcgtcgtcgtcgacctcgtccgccccttcatttcgcccgccg

SEQ ID NO: 16314 - DNA, 3524 bp, Oryza sativa
ttttatggaatttctagaatttattttaaaagtcttgaaaagaaaatctaagtttaattaataaattccaatataaaaagtggccagataaaatttcattaaatactttgcttaattctataattcctagatttttctgggatttatttgagctaaggaagtatttttaataaatggaattgcatttaagaaataatttaaattgaaaaagttttaaaaagtcttcttttggctttgggccgaaagtcggcccaaaacctctcttctctctcctcggcccagccggcccagtcagccgcgcgcgcgcgccctcgctgtcgctgacaggtgggtcccacctgtcaggcccgtcgtcttcctcgggccgaaaccctagtttcgcgccgccgagctgccgccgccgtcggtgacgtcattgctggcgtcatcagggccgttcgccgtgaaccaccgtggacccgatcgatctcggccgtccgatttggatcggatcaatctcggccgtccgttcgtgtgaaccgccgcccatgcgccggtccaccaaaccctagcccgctgacgcaataaatccccttttccttttcaaaaataattcattattgcgtcataattcaatttaaaccgatttaagtgttttaatccgatttaatctttaaaaattcataactaattcatcttagctccgatttagttggttcaagtctctaaatttttctaaaattgagatctacacattaaaaaaaatccacatgtactgttcatgcttgtttatgtgctgttttggtgattttgctcttttctgcttagattccgtcgtttccggagagtccgttttcgcagaagaagagtttgaagagttccaaggccagcaaggcaagtcacacagatcccaaacaaccctttgagcatgttgatcctatttaaagctattgtttctattcaactattgcatctattttcgaatgtcattgggtggaattgacctattctttgttatggcccttttgtacactgattaccttattccttgataccttgggttatattaatttgactagttgagctttatttatattggttcaactagatattagatataattgcttagccctgcttagaaacattagtacacttatgggataactaatgactcactattatttcatgatggcttattgatagttcacgatggtcaatcgtgattagttaattaattaatgtgccaactaaaacctggtaatggtgggttgtgagcacatggttttgatggtcgtgctcatggcaattaaggaccggttcacgagtttcggttgtgaaacatttatcgtgccaaccacaagccagcatgggcaacagctttatcttttgtatagcatggttcattgcggggcaccagactgagaagtggcggagataagcccacgggggtcgctggggagtccatgccttgtttataagggggtgattatgatccaggaaggtgcgctgtagtgaattgtgttatgcgaggggtattgtcacaactcctttccgagataccgtggtggtattgaggcacatggtgacatgatgtggggttgtgtcttgtgggtacagtggtacacctctgatcagagtaaaactattcgaataaccgtgcccgcggttatgggcgggtctaacaatgtctttcgtgattagtctcacacctctcatcattgtaaaagatgcttaaactggtaataatttgattagctcctggtttggaatggtacattcctggtttggagatagaactgtgcagccggggtggttgttcagaatggttgggcctatacaacagggtatgttgtatagcgttggattaatattgcttaattattacttaactgttttatcaaattctcaaatgtttgctaaatgctgcttttgcaaatggaaccctattatgccatcctttgttatcctgtgcacttgcatatttgctgcgtggcttgctgagtatgtcatatactcaccttgcaatcattcatcagaggaagagttctacaatgaggctgatggtgtggaggattaggtgtagccttggtcaagctgcctgtggagtggagccgtctgcgccgtttatttaatttccgctgctagaactttattgattgagaggaactatctacctctgtaatgacattatattcgcttattaattagagtaatatttgtactctattatcaatttgttattgtgtgcctcggctgattcctggacgagggttcacacacatgtaagcgtttggaattttggatagaaattccgggcgtgacaagttggtatcagagcctctttgaccctaggttatgccaaatggttacccatagaagccctctgaaaaatattggaaaagtagaactgttctcctccctttctcttttaattaaaccaaactaatggcacatgcacttcttaaatctcttttaatggttctcattcgaaaatttattccagtattattagtactgtacatccattactgtactaatggctcatttttcagcaaaagttttacaatattgttttatttaatcctgctgcaataaaataaatttaacaagttgattttataactttcttttgaaacctgttgttaaaaagtacaaaatttgtaactttgttttcaactatttcaaattatcttgcaagtttggtttactttatttacttaccttttactttgatttctaaactttattcaaattaatccaaaaacttgtgctattaattggatagatgtcttaactctctcctttcacttgtctttagatgccgcgctacaagcctgagtacctgtttggtgttgaagggtttgtccaggagttgcgtactatgtcctttgtcattggatttggaactgcccctttttatgcccagattcgtcatgatcgtcatgaagagaggtgccgtgtcaaagtcaccttaaacagtaatagtgaagatattccatcagtgatgttcgaagctggaggaagaaattatatccatgcatgtcaggaagtggcaaggatcgccataggagagctccgtgaccgctacagtgatcagttggccgatactgagtatcgctaccatcctcgccaaccacagggaagtgaccgtggcagttaccttgagactgaaggaattgagaatgatgctaccacaaggcatttggttgagatgctgtgggctatggatgaaagtcgtgcggagactgtgttagcggctcaagatcgtgaagaccggaatcgtggtaagatttgcaagctagaagacaaggtggatcgcttggagaaggaattagccgcattgaagggagaagcaccgccgcagaaggccaggattcgtctcaccgcaaggaagagaactttgtttgtccctcgttatcaattggcgccaaagatccgcgtggtggagaaagaagttgccccagcaaatcctccggtcatcatcataagtagtgatgaagaagaagaatctaagcgcaaccattccaagattgagtgggtagcaa

SEQ ID NO: 16315 - DNA, 2876 bp, Oryza sativa
catttgcatcacatcagttgcatggccctgcctctgaatggtgggatcacttccgccttaacaggactactgctgaacctatcacttggcttgaattcaccgctgctttccgaaagacgcatataccatcgggagtagtgtctctcaagaagaaggagttcaggtcgctttcccagggatctcgctctgttacggagtatctgcacgagttcaatcgtcttgctcgttatgctccggaagatgtgcgcaatgatgaagagcgccaggagaagtttttgggaggacttaatgatgagctttcttacccactcatggttggagattatcctgatttccagaaattagtggataaggctattcgtcaggaggacaagtacaatcgcatggagcagaagaaacgtcggattgctcaattcaagacacaacagggaaataatcagaagccgcgtcttactttaggaccccagcccatgccacagggaggttcttcgtctgttgttcgtccgcaacgtcagttcttcaacaacaatgctggcaacaacatccgtaatctagctccacgtcctgttgcagttccagcacagcaacaacctgccaagagggagcaaggcaacaagcccgtggtgtgtttcaactgtggagatccaggacattatgctgacaaatgtccgaagccccgacgcgtgaaggttgtccctgcccagaataactctgctgtaccaacatccaaggctcgtgtaaatcatgtcgctgctgcagaagctcaagatgctccagatgtgattttgggtatgttccttgttaactcagttcctgcaacagtgcttttcgattctggtgctacacattcattcttatctatgagttttgcgggaaatcatgggatggaagtagaagaccttagatgtcctttgatggttagtaccccaagtaatcaagcactctctttgcaacgtagcccctctgtcagaatagaaattcaaggagtaccatttctggccaatcttatcttgttagaatccaaagaccttgatgtcatcctagggatggactggttagccagacataaaggtgtgatagactgtgccaacagaaaagtaactctcaacagctatgatggtcgagttgtaactgttcatgcattgtcatctgagtctttaaggtcaagactgaaccagataactttggaagagattcctatagtccgggagtatcctgatgtgttcccagatgatttacctggtatgccgcctaaaagggatatagagttcagaatagatttggtacctggaacaactccgatccataagagaccttatcgaatggcagccaatgagttggcagaagttaagaggcaagtagatgatttgctacagaaaggatacatcagaccgagttcatcaccatggggagctccggttatttttgtggaaaagaaagaccatactcagagaatgtgtgtggactatcgtgcactaaacgatgtgactattaagaataagtatccactacccaggattgatgatttgtttgatcaacttaaaggtgccactgttttctccaagatagatcttcgatcagggtatcatcagttgagaatcaaagaggaagatatacctaagacagcttttaccactaggtatgggttgttcgaatgtactgttatgtcttttggacttaccaatgcccctgctttcttcatgaacttgatgaataaggtgtttatggaatacttagacaagttcgtggtggtctttatagatgatattcttatctactctcgaaccaaagaagagcatgaagaacatcttcgccttgcattggagaagctacgagaacatcaactgtatgctaagtttagcaagtgtgaattttggttgtccgaagtgaaattccttggtcacatcatctcagccggaggagttgccgtcgatcctagtaacgtggaatccgtaaccaattggaagcaaccaaagacagtttcagagattcgcagtttcctaggccttgcaggatattatcggaggtttatagagaatttttccaagattgctaagcccatgacacgactgcttcagaaagatgtgaagtacaagtggtcggaagaatgtgagcagagttttcaagagttgaaaagtcgcttaatatcagctcctattttgattttgcctgatccaaagaagggttttcaagtgtattgtgatgcatccaaacttgggttaggttgtgttctgatgcaagatgggaaggtggttgcctatgcctctcgacagttacgtccgcatgagaagaactaccctactcatgatattgagttagctgcagtcgttcatgcattgaagatttggcgtcattatcttttcggtactcgtacagaagtgtacaccgatcacaagagtttaaagtatatctttactcagtcggatctgaacatgagacaacggagatggttggaattaattaaggattatgacatgggaattcattatcatccgggaaaggctaatgttgtagcagacgctcttagcagaaaaggctattgcaatgctacagaaggacgacagttgccattggaattatgcaaggaatttgaaagattaaatttgggaattgtcggtagaggtttcgttgcagccttagaagcgaagcccactctaattgatcaagttagagaagcccaaattaatgatcctgatattcaagagatcaagaagaatatgagaagaggaaaagctattggtttcttggaggatgagcacggaactgtatggttgggtgagagaatctgtgtccccgacaacaaagatttaaaggatgcaattctgaaagaagctcatgatactttatactccattcaccctggtagtactaagatg

SEQ ID NO: 16316 - DNA, 911 bp, Oryza sativa
ttagagacaaagcatagtggaaacaatgttgaaatacctttgtcacaaaacaatttgcttgatgtttcttgtgataaagaagagttgtgcgatgcttcacttatatccatgccacaactagtgaatgaacatgttagttctatagtacagccactgtgtgttgagtttaaacatattattcacattgctagtgagaacgaagagattaaattgctatcttctttaaatacttggggttaaattcaatttgatgatctttgtccactcaactgctaagagaagaaattatttgctagatttgaattgccatgcccatctgatgtgatttttcatattattggcaattacgataataaagaagaatataatgtgcatcgagtatatatatgttcgaatttgactatacctccttttcataatgaaatgcattgtctagaggacctcatgcgtataagtaattctctatctatttcctctagttgttcaaatgagttacaggttggtttgcaagaaggggagtgttgtggtgtttcgactacaaagattttaggatccaaccatatgtccatcaagaaatggtcctcaccagatgttgtgatagataaatataagtacaatacgctccatgataaggtgaaaccgaggacggtttccaatcaagaaggggaggatggtaaggacataactagcttggatatgaccatgactactttatatattcatcaaccaaaggttcatatgttctatgttagatttacttattatatatttgaacaaacgttgctacacaatgagtttcgtgtgttttcgtttgcagaggtccttgcttgggtgaaggaaaagaaatcgagcgtaaggaatacttggacgatcaaagaagttgattggggaccaaaccaagaccttttcca

SEQ ID NO: 16317 - DNA, 3006 bp, Oryza sativa
tatggaggttgacagcaggccgcacctcccccctcctgccaaaaggagcaagagggcgaaatcttctccacccaagcttgacacacgcagaaaagctgctggaatggggagaggaaaaataaaggtgccattagtcccaaagaagcttgatcttggcaaggcgccagtagctcctccaaagcctccagccgaattcacattgggcatgccattggtcggagacgatgccttattcaagatgggccctgcatgcaaggagttgcacgggtactacatggagaagtccaacgcaaggaggaagaatagagagacctccatgttgggccagcacgatggtcagccgttcctcgggcctactgccttcatcgccgtagacttcaaagatctctgggatctctacagggtgcgagcgatcgacaccaacctccttaaatgctactccttgtaagtatttcttggtacgcgatatagtactgactgtccataaattacgcttaccctgactcttgtcttgctcgtaggttaacctggaagcatgtccatcgtaaagcaccccatgttgccttactcgatccagctgtcgacaacgagacaacactgaaaaacgatcgagcaaacatggtggcctatatcaaggactgcttatttgcccgtcaagacaaggacttcattatgtgcgcctacaatcaacagtaagcgtgtaccgtacttatactcaaatactaaacacgtacaactgtagtatgtaactggcaatttaataatttcgcaggcgacattggattcttctggtaataacgccgaagtggagtttggtacactaccttaactccaatatcaagccagaaatatacgattggtcggccatcgaatctgccttgaacgaggcttgggaccaatatgtggcaagaggcgggaggcataaggatgggcatcccaaactcggtcacaggaaagacttcccaatacgtcaacaagttggcgaccagtgtgggttccatgtctgccataacatgaggagcttcgcagaaaaggtgacattgctcgaccctgaggtgtgtaattcaattgtttatacacacataggaagacaaatttacaagtatgtagactaatttggcaccgaacatgcaggaatttatttcaaggattccggaaatcaacttcgaaatcattagagaggagctagcacaattcatactagatgatatcttgtcaccgaaagggatgtttagagtgaagtcctaggtagctcgtctcgtaatggcagaacattcgcaatgcatatgcgacaaacatttgatttttgtaaatattctttgtaatacaattatattctttagagtaaagtcctaggtagctcgtctctgtatatacttgcatttctagttacatataaaattgttccaatttataacttatttttgtaggttttgatgcatgtcggcggtttggagagaaaaatggatgtgaatgacatatatgtgaatgggttgtggatgtgaatgtatatgtgtttgattttgtgaattcgctgtgctgtgatggaatatgaatgtgaattggctgatgtgatgctgggaatgattctatatgaaatggctgtgatggaatatgtgaattgatgctgggaatggggttgctgggaatgggactatgtatatgcttctgtcatttttgcagcgggcatggctagcaaaggcctgaggctagccaaaaagccaaattttattttttttggttccaaactcatccctgacgggcatttagctaatgcccgaaagagataacttatccgtgacaggctatactgtcctgcccgttagagattagtcatccgtgacgggcttttagaatacacccgatagagataagtcgtccgaaccgggactagtttgactcaacacgtggggtcaaacctatcggtgatgggctctagctaaatgcctgatggagatgactactcatccatgacgggcttagtggtgtgcccgattgagattagtcatccgtgacgggctccttactacgctggtttgactggtcagactcatctgtgaagggctttgttttcggcccgattgagataacatccatccgtgacgggcttttgcccgattgagatttttcctcacatcagtgacctttgcccactgacgggggccttacccgatagtgatgatgctttcagcccgtcacagataagcgatcccgttctagtgtaagctttattttcttcctttgaatcgtgcgtagtacagacagttatatatttcttgtgtgggaggaatgtattattttttttaataatagatctaatataatggtaaaaatttaggggccaccaatttaaatgaaaatcgacggtgagattagatactgctacgtggcgatctaagagcgtttgcagtggtgccacatggcgacttaagagcatttataggaggtttaatggacttttagtatataatagatagctaatagatagatagatagatagacggtaggagccacatgtcataccggccttctcttccccacttcctctttctctctctcctctctctctccctctctctcgggcgccaccgcgcatggcgtgcacggcgaaggcggacgggccggtggcggagctggagggcggagctcgcttgggcggccgacggcggagactgggctctcccaggcggctggaggccagtggcggagcgggcggtcgaaggcagcagctgaggcggagctcgcataggcggccacggcggggcgttgtggagacagagctcacccgagcagccatggcgcggcgtccccatggtagccacggcggcgctgagacggagctttgcccgagcaatcacggtgcggcgtccccatggcagccacaatggcgttgaggagacggagcttgctcaggcgacggcggcggctgaggcaaagctcgcctgggcggctggcaacggaggcggagcatgccccggtgaccggtggctgaggcggaccaggcgg

SEQ ID NO: 16318 - DNA, 711 bp, Oryza sativa
gaccatctcgtacaactctggatacttatgcttgtttggaagttcagcggaaatgatacaatcatattgctcgggagaagtgagcttgtattttccgtccatgatcaaaaggaaatgtgcatgtggaagacccctcttttggaactcaaccacatacgcataagcaatcactttgccaaggatatgcttctcaagtaattgtttcttgaggtcctctagtttcgctcgaaacacgcgcactatgagatcaggcctatcttggggtgtctgcccaggctcaaggttacctattatctcttcccagttagggttgcatgtcattgtcaaaaaaatgtccggcttcccatatttttgcactaatgccatagcgtccatataccgacgcttcatgtcccgattgcccccaatgaatgatgctgggagcacagtacgtttgcctacctggcttgcacggctctctccagcatgaatgctatcaaccacacctttgtataggtcagcccttatctctacctggtgacgccttatgaagtctagtcgagtgctttctactttgatgtacatatcaactgcaaattgttggaacaagcgcttcccatacaatagtggattgaatataccacgacgcatttggaatttgtagcaatagtagtctctaacggagacacatagtctgctattttgaatctgcacaaagaatgagagcaaaaa

SEQ ID NO: 16319 - DNA, 528 bp, Oryza sativa
taattaagcaactaataagttatgttttgcaatcctagggtgctatggactcaaatatgtctctatgaaagtaaattgcaactaagtgatgttttgcaatcctaaggtgatatgggctcaaatatgtctatatgaaagtaaattgcacaaatgaaaatgcaataagtaaatgagacaagacaaggaatttttcacccgaggttcggaaactcgccggtttcctaatccccgttaaggcaagccctagttcaactctcaaaaccacgaagccaccgcaagcccccttcatcaaggggtgggaaaggtgggagccggccacgaagtggactacccaagccttgatcactaggggtagttcttccttcactccaaaggtggtgaactctaaaccactcacaaccggcgccgggccttctccataatctccttggagaggtcaccggcaacacctccacaaattgtctaggagacagcaacctccaagagtaacaagtgatgacctggctcggagatgatcaagtgccacac

SEQ ID NO: 16320 - DNA, 2277 bp, Oryza sativa
gaactgttggaattaatgtgtatgctaaggttcatgtcaatattaatttctaagtaaattacaaggtcccatctcatggaagggaggcatgtgaatatttgttttatggcaataattgcatttagcggcgaatctgattgccattgcgtgatttaaagagttcttcaaagttggcccatacctcagatttggaccgcttgttgctagcacttgagccggacagcgcgtcgttgccattgtcaccggcaccggtatctaggtagaaggttacctttgtttgttggtgtttcacgggttgtagaagcaggcggcaggtggtgccagcctagagctatagggcagagtttccttcgcagaccaggggtacgccagtgtcgaagaaattgatagagttttaccataacttcattaagataactaacccatgggagtcctctctatcctatacctaccatttagttgttttccttggaagaatcttgttcttagattatacacacacgttccatgtgaatacgataccttggaatacccttgggtgaaggttacaacggtatctgtgcgtttgcagactattatgtggtcagaataaataccaacaacaacccatagggggccactctcggagggtaggtgacaaatgtgccctgagcatagcccttgggggttgcaccctgctgatgtgaaattcttcgtgacacacgaaggccttggaaatatgcttatctccagtgtagggcataacaattaatttgatcctgcaactagcaagatagatagatagatagatagatagatcgtataagatcaaggagtcaatcgaccaataaactgatatgatgttgcgaggccaaccaatgtcaatagggttttgaataatcggctataggtctaatgtaaattcagataatcagataagcaatgagatttgtgttatcaccagctggaactaaactatgttatcatcggctggaactaaacaaccgttctttatcaaaagcaatcttgatagatcagaccaaactgagacaatataagatagaagttgataaatatagatttaactaaagattatacaagtttgagtgtaagccgatgtaactcagaagatgcaatgagataatataatgtgaacaaatcgtctaaaactaatataatgtggtagatgtacatctgatggttaaaacatacattggctggagatctaatgtaagtaaattaaagtgtatatcggctaactaactgatacatctgatagttgaagcccaaaataatgataacatcgggtagcgctccaatgaacgctgcataaaaaccttaccggcttacaagaattagacaaaatagcaaagatctaagagattgggcctgacagagaccagtataagagctaaagataagtgaagaaaaacctacttagccgatagatctatacaaacgtgatggatataatagagatgctatctagaagtaatagtacaattagagaactaccaacttagctagaatatgcagacccaactaagaaagtcctaactaagattatacaagctctaaacagtaatgcaattgaagatagaatcaatatatcaaataggcaatgcttgcatcaacctagatagaatattagacttaatcgagaaagttctcgccaggctgatacaagcaaagttgatggaacttccttgccggagatcgaacttaaccaatgcagccatgctcgaaactaataactcgctgggataaaagggtggcgatgcgtcgaaagtaattgcatcggtctatggagatagattacgaagaccctgggtgtacatatttataatctcgggctgatatgagtcccaatcggacatgactcacaattcctaaagataatacacaagtcttaatcagacactaatcaaactttcctaaagataaaaaggaaaaatactaaaccatgtataattaatagataaattaagctaccatgtcgtggtcttgacgattctttcttgaactcggtttcttctagataagctttccatcggttgattatgttctttccctaaccaaatccaataaagaattttatcaaattttggcattaacacactgtgggcggatatgccccgagcatagccggggaaccacattcgtgagcaggcggcaggtacgcccaagtatctgatatggagaccctggttcccatttatctgacaccataaaatatgatttgagattatttggaaattttttataacacatgttagctccatgtgtcgtgtatttagc

SEQ ID NO: 16321 - DNA, 1161 bp, Oryza sativa
tggggcttcactatactgggtatcatgcggtactggagggttatagtgattctaactggatctctgatgtggatgagatcaaagccactagtggatatgtcttcacactaggtggtggtgctgtttcgtggaggtcttccaaacagaccattttgacgaggtcaaccatggaagcagagctgacggcattggatactgctactgttgaggcagaatggatgcgtgatctattaatggatctgcctattgttgaaaaaccagtgccggctatccttatgaactgtgataatcaaacggtaattgtcaaagtgaatagttataaggataatatgaaatcgtctagacatgtgaaaagacgattgaagtctgtcaggaaattgagaaacttcggagttataacgttggattacatccaaacagctaaaaacctggcagatcccttcacgaagggactatcacgaaatgtgatagacaatgcatcgaaggagatgggtttgagacccatgtgaattatactatggttgtaacccaatctatgtgatcgaagatctcgtgaattagaatatgggaagaacaaaccattagtaaactagaggagagtactaatctatactctctctaagtgaagatgcatgtactctcatgagctgcaaggcagcttggctatgacttaatgagttctattggctttaattagcgaagatgatgtcttgcagagcattcttgaaagaactcacctttgtgagcttgactgttggtcgcagtctatggagattttgggtgaatcttctaggaagcttactaaagacctaggagtatgacttatacgctacacccgaggggtagtttatagacggtctagtaccagataagactctgagtgaaacttgcttgcacaagacttgcaattcaaggtgtagtccattgttcaagtgttgagtaagtgtagcttggagttctagatggatgttcaaccttaatcggtctccatcgaaccgctggtatataaacagtacattggaaaaggcaaatctcagtgggattttgagatttggtgggggattgttggaattaatggatgggctaaaccccactcaaagattaattcttttaaaaatcacaaaagcccacctcatgggatggcatgcatgtggagtttag

SEQ ID NO: 16322 - DNA, 830 bp, Oryza sativa
accctatgagtgtaaacctatggggtgcaagtgggtgttcaagaagaagcttaggcctgacggtactatagaaaagtacaaggctcggcttgttgctaagggctacactcataaagaaggcgaagatttctttgacacttactcatttgttgctagattgaccacaattcgtgtgctactttccctgcagcctcacatggtcttctcgttcatcaaatggacgttaagacaacttttcttaatggagagctggatgaggagacctatatggatcaacctaatgggtttgtagttgaaggtcaagaaggcaaggtgtgcaaattgttgaagtctttgtatggtctgaaacaagctcctaagcaatggcatgagaaatttgacaaaacattgacatctgcaggcttcgcagtcaatgaggcagataaatgtgtgtactattgtcatggtgggggtaaggaagttattctgtgtttgtatgttgatgacatactgatatttgggacaaaccttgaggtgataaatgaggttaaatcattcttgtctcaaaattttgatacgaaggatttgggagtagctgatgttatcttaaacattgagctaattagaggtgagaatgggattacactcttgcagtcccattatgtggagaagatcttgaatcactttggttacattgatagtaagccttctccaacaccttatgatcctagcttgttgcttcgcaagaacaagagaattgctaggaatcaactggaatactcccaaatcattggctcgctgatgtacctggctagtgcaactaggcctgatatctcctttgctgtgagcaa

SEQ ID NO: 16323 - DNA, 1002 bp, Oryza sativa
ggatcccgctttttactgtgctgccacagatgaaatgggtgtttaaaagaatgatcgttacaggagagcttttctttggaaaggtgacgacccggagaaggttagtgcaggcagcagccttgtcaactagcaacaagtttgcaaacctaaagacttgggcggtcttggcattctaaatttggaaaagtttgctagggccctgaggttacgttggctctagttcaattggaaggaggaccaaaagccatgggcaaatatggatcttccatgcgatgagatggataggtgccttttcaaagctggaacgaagataactgttggaaatggaatcaaaacatctttctggaatgataactggatggatggacaatcgccaaaggatatagcaccagcaatctatcgattagcaaaaagaaagtcaaacagtttaaagaaggaattagaggataatcactggcttgaaatgctccacccgatcacttctttagtggaaattgaagaattaatccaactaggaggtttgttacaacacattaatctagttgctggacaaactgatgacatttcctggagatggacagcgaatggacaatattcagcaaaaagtgcataccttgcacagttccaaggatccaatgctttaactgaatttacacctttgtggagcgcgtttgcggaaccaaaacatcgtttctttggatggcttatccttcatcaacgaactcttactgctgaaaatttgcttcgacgtcactggccatgtgattggatacgtagtttgtgcaatagtgcctttgaagatgcagcccaccttgcaaaagaatgccctttcacagtgaccgtgtggacgcagatttgtatttggatgaattttcagctgcctcaacatcatttgcaaggaaatctatcggactggtggagcagtttctgcactatttcgccaagacaaaacaggaacaaggttctgagagctctcatcacaacatggtggaacgtttggct

SEQ ID NO: 16324 - DNA, 1384 bp, Oryza sativa
ttaggaccaccaattgacttgcttgctgttatgagccatttcttttagtagtctctattgacaatactctactactattattatcaccaatagaagttatcttaattgttgatttatgagttctaattaatatcagtagaataaatgattctattactgtacttgtgaggtgacagtataaattgatatgatctattggattagaaaaaatgaacgacctagattgattctactacgagcacagaccagtataaagaaaacttttaattatgtgctattgcttcttgtaatgttggggaaaaagaccagctgggcttgatagtgatagttactcctaatttatcagcttctccaacttgctgtaatttgtaagcatgcatgcatcgacaatgatgaaatttggaaatatgataatactaatataatatgaattgccttcttgttttggacatgtgcttggttggtgactagggtaattggcttgaacgtaaagaccagactgaaaacttttgaaaagagttgaatttggttcaacctgccgattatatattctggaatttacatcctgattattgatacaattaggcagcagcacatggacatgatatatatacacatctactacttagaagaagcaggcaaaaacacaagatcggtggaggaactatgattgaaatattgaattaaccaaagtaaacgcaatagaagcttcattattgatggtccaggagagatgctctttccagtggccaagggggtaccttacttagctagatgtgttaaatcagcaaccaaacttgacttgcagcgtctttgccgtgtcttccccgtaagtgtcgtgcatatgccatcggcgttttcattgatagatacagctctgcatctactctcaacctcaatctttggacactgctgtatattacatggggtatatatatatcctctctgccttccttctcccagttgcagaccaaaggagccagagcagcacaaatattgagaaaataaggagaccggccactgaagagcatgccttctctctacatattccttgggcttcttctcttctccctgcaggctcctccatgtcctgctgcaactgatactctgaaggcaggacaagtgctctctgccggtgacaagctcgtctcgaggaatggcaagttcgcgctcggcttcttcaacccaagcgcaaacatcagtaagtcatctgacaacatctcctccagttggtacattggcatatggttcaacaagatcccagtttttactgtcgtgtgggtcgctaatagggagaggtcaatcgctgagcccgacttcaagctaacacagctcaaaatatcacaagatggcaatcttgccatcgtaaaccatgccaatgaat

SEQ ID NO: 16325 - DNA, 695 bp, Oryza sativa
agtgcttgaattagagatatagcatttgtaaattgcctattgaaatatgccaccacgtagttatccaataaagtgccagactaatgtagtactacaatatttccgaacttcccttaggatgatgccatgtactattaacattttgtatgcacagtgtaattccgttcgcatcctgggtgatctcgatgcccagatatatatagtaagataagaggccaacaaggtcactcatgaggaatacctgcttcatttgagccttgaacatgtcgattttttttttttttgctgctgcagccggtgctgatgagattgtcaacgtacacgccgacgatcaaccgcgaagctcggcacacgtgtagatgctgtgttctgagtcgctcctcctgaaaccaagtgacaccatcgaggagtctaacttagcttggtataaaaggtccttactattttttttaagtaaattgcactagcggtccttagacttgtaagcaaattttatctagatccatgaacttgcaaagtgtgtatcgaagaccctaaacttggtttattgtatcatcccaatgaaagtctcatttgaccgtggtcttacttacgtggcatgacatgtagatgacggcatggcacatcatcatcatcacatgtagatgacggcatggcatcatcattattattattattattattattattattat

SEQ ID NO: 16326 - DNA, 675 bp, Oryza sativa
gtattaatagtatagcaagcaactattgtatgaattgactattacattggctatacttggctatactattaaacttgctctcgcaccatctttcttccagcaatacagaaaaactgatgtcagagggctaatagtaaatagatttttcatagagtattactactactgctagtaggagaggagcgaagcagcagctccagatctgtgggtgtctttgggtgagtgggcaaataaacaaacaaaagtggcaagccaagtagccaatccgaacgcatccccgtctttctttctttctttctttctttctttgtgcccaactctgacacgactcacagtttttttggcacgagctgaaagcctcaaagtagtaatggtccagctgctccagcactcgcatctgcacactgtattcgccgccgcgaccaccaccatcggagtcggacagtttccccgccgccgtgccaaattccccacctcccttgttcttcttcctcgctgcacctcctcctcctcctcctcctcctcaggtacctcatatatagcttccacctacttatccttgccccgcctgattcattcatacgaccacttctttctccggatcccctctcctctcctagcttcttcctctatctgtacattcgcaatatcccatcccatcggatcggattggat

SEQ ID NO: 16327 - DNA, 701 bp, Oryza sativa
gcttcccatatccatcaaagggttagttaacagactgaaggggcctggcaatttggttgctgtatctgagaagcgtattccaacttataccttttttttaaaaaaaatacaggtgctactacatttttcgacaaaattcgctctgtggagaaagacgcagtttgtgttgctcgtttgcggaaatgtggagtgttattcattgggaaagctaatatgcatgagctaggccttggagtaactggaaacaatccaaactatgggtatgcattatcatcatgtgactgcttattttgttcagatcccttagctagtatctagggagcacctgacggtttgtgtggtcacaaatgagaaatatcaacaacattttcaaggccaaacagactgtattattttattagctgtttcctagaatcaaattaaattgagcattagtaaatctagttgactaaccaaagtactgggatgaaaataaatattttgagctatatcagtcacatccaaatctaacacatttttttaaaagattaggaattcaaaattttgatccaatcttaagtgatagtccaatttactgttttctgatgcctagtgtagtgcttaaccatcttgtttcttaacctttccatttgcagaacagcaagaaatccacattcaattgatagatatactggtggttcttcatcaggtccagctgcact

SEQ ID NO: 16328 - DNA, 1952 bp, Oryza sativa
cctaatgccaagattggctggaacaaggtaaccggtctgaaccgtgttggtgtttcgaagaagagcctcattgatatgggcactggctcttatagtgtacaactatacaccaatggcaccagaagggtgaccctcgagcaccgaaacccttcaatagagtactggtattggtcgccagatgaatcgggaatgaagataccagcactcaagcaactactgtacatgaatccacagaccagaggtttagtcaccccggcatatgttaacagcagtgaagaggagtactacagctacaattcatcagatgaatcatcttccacattcctcttgctagacattaatggccagatcaaattcaatgtttggtctcaagacaagcactcatggcaaagcctatatacccaacccgttgatccgtgcaggtcatatgatacttgtggaccattcaccatctgcaacggcaattcacaaccattttgtgactgtatggagaatttcactcgaaagtcacctcgggattgggaccttggtgatcgaacaggagggtgttctaggaatagtccattagattgcaccagaaacacaagttcaacagacatcttccacccattaattcatgttacattgccccgtaacccccaaaccatacaagaagctaccactcagagcgaatgtgcacaagcttgcctcagctcctgctcctgcactgcttattcctaccaaaatactagcacttgctctatctggcatgacgaattgtttagtgtaaaccaagatgatggcattgaaattcattctcaagatgttctttacctccgccttgccgccaaagatttgcagagtttgagaaaaaacaaaaggaaaccaattgttgcagttgttacaaccataagcattattattcttgtgttaataataatgctcatggtgttggtaatggtttggaggaatagattcaagtggtgtggtgtgccattacacagaagccaaggtggtagtggaattatagccttcagatatagtgatttagaccatgctactaaaaatttctcagagaagttgggagaaggaggtttcggctccgtgtttaagggagtgttgagggacttgactgttgtagcagtgaaaaggcttgatggtgcccgtcaaggcgagaagcagttcagggctgaggtgagctcaatcggattgatccaacatatcaacctagtcaagttgattggtttctgctgccaaggtgacaagaggctacttgtttatgaacacatgttaaacggttctcttgatacccatctgtttcagagcaatgctactatactgacgtggagcacgaggtatcaaatagccataggagttgctagaggactttcctacttgcatcagagttgccacgaatgcatcatacactgtgatattaagccacaaaacatacttctcgacgaatcatttactcctaaaattgcagattttgggatggcagtatttgtaggaagggattttagcagagttctgactacatttagaggaacagttggatatcttgccccggagtggattagtggtgtcgcaattacaccaaaagttgatgtttacagctatggtatggtgttgctagagatcatatcaggaatgagaagtttacctaatgtacacagtagcaacagtcatcatgctgcttacttccctgtgcaagccatcagcaagcttcatgagggagatgtgcagagtttggtggatccacgtttgagtggcgacttcaatttagaagaggctgaaagggtttgcaaagttgcttgttggtgcattcaagataatgagttcgatcggccgacaatgggtgaagtggtcctggttcttgaaggtctacaggagtttgatatgccccctatgccaagactacttgcagctataacgagatcttctaatgtagctgagatgtaaaaacaattcaa

SEQ ID NO: 16329 - DNA, 575 bp, Oryza sativa
taaacatgagtgccaaacattagcctcatcatccacactgccacaaatatggttcacagacttattttagaaatcagaaagggaaaagcggaataggcctccgcactcataacctttaccaataaaatatccatgtttagacacgactactttattagactcaaaaaccaacttaaatccgtctctagtcagacgggagccactaacaagattcttgttgatagaagggacatgctgcacgatctttcccgaagtaaacttcagatctactgtgccaacaccatgaacagaagcatgtgacccattccccattaggatggtggaaccccgtgcgacctgataagaagaaaacaatgagatgtcagcacaaacatgtacattagccccagtatcaacccaccaattagtagactgattaactgaaaaaacagtaggtaaattaccatacccgctttcatctccagtgttgccaatggttacattagtagacttagaagtctgccctgcaggtgccttcatccccttgcgttgtggacacgtcctagccagatgactaggttggccacacagaaagc

SEQ ID NO: 16330 - DNA, 1056 bp, Oryza sativa
ttattggcattagatcggcaatgaagaataaagcaagataaagctaaatctactcaatcggctgtagatatcaatgatatataatctacctctagaaacatatttaaaccaagtgattgggatagattgatagtgagtcgagacagtataaatcacttatgcataaaagtactttaagacaaagattatatatattcatatcatagccgatgaagtagatctaacatatatcggcttgtactccgataccactctatgttaagatattaaaacaagaaaaatataccaaacagtaagcctaatatatcttagtgcaataagatcttagtataaaggtcagatttagtacgtcaagtaaacgtgtacagaacaagacaactgaatcaggtaagatcggctgaaaccccgatactatctctattgatgatcataagacaagctagatattataattctagatattgcttaatagatcgaactcgaccgatgcagcattaagcataaagaaaaacacaagatctaaacaagttgatgaaaacctctatgagatggtggatatactatataatctagatcaatatcgatatctaactctattgtctgccttccaatgatagatgttggctgatttagggttagatggtaatactgatagagattatacagcacatatgataactcgacgatttacataatcaagattagagtgtcataaagatgtatgcactaatcccgagaatacaagccgccatgacaagttttacctcttgttgaagatcgaaaccgatgtagctcaacccaaaagcaagaactcgtcgaaataatgaaaataaaaaatgtggcgatacgccgaaagtgttattgaattgtcgttatcaatatacatggtcttgggccatatttatacccaaaatacataatgtgtccttcccgggcacgactctaaatctgctacaaccgttaagatacgaacaagtctttcaggcaaactcttgccgataaatatctctaaggaaactattcaaaatatcataattaatagatacaattgcctat

SEQ ID NO: 16331 - DNA, 1846 bp, Oryza sativa
ttttccttcctttttctcttgagtcttgatgggccgtcagcctatctctctctctctcgcgccacctccctcttgctgggccggcccaagccgcctccctcctcttcccgggtcactgacaggtggggcccacctgttggccccgtcttcctcctccagccggcggcaaccgccgctgccgccccacctcttccgctcctcccgcgcccacgccgcgccgctcccatgtcctccccacgtcgccgccctctccccgcgtctcccgccccgcgcgcgcgcacgaaatgggcgggatttgatttcgaatcccaccccactctctctatctctccaccccacgtcgccggcggcttcggccaccctcccggccacgtcctcccctccctcgcccataaaaaccctccctcgagctccctctcttgtttccccattcgccgttgtcagggttatggataccacatacctaatagtagttgactaaatctcggcaggatccaccacataccatatcttatacggaaactgacctcgagggagttccggttaaggaaagacaaaccatagttctacatggaaacgacaatgactactcagattgtatccatattggtttccctagttctacttagacaaggggacacctatgggtataaatacaagaccccctaggaggagacgggagatgaccacctcaatcaacatacacggaacaacagaagccacaacatacaagccaacatacgccaagacaagacgccggatatcaacttcagggataggcacggttagtcccctacggtgtctccagatactgtcaagagagacgaaagcactatctctaatctcgccgggcacggattcgaggaggaagactaccctgttgtcgactacgagtcagaccttcagactgccatgtcgacaacagttagataggctaccccaaatattgtactggtgtgattatggtgaataagagcaacgaccggcttcggccaacatgatgtagggttattacctgacaattcaggggcccgaacctgtataaaaatcctcgtctccgtctcttttacctcagtctcgtgtatatcctagtaccaatgatccccataccatgcaaataccagaattgcgacatcaaacgtcgacagtggcgcgccaggtagggggattttggtgcttcaggatttagacgagatgggtttaagagatggattctccaacaacaagctactcgacgacttcggctgtggggagatccaacaggctgtggggagatccaacatgtccaagtacatctttcgactagatcggaaccatcatcgtcatcgacaacttggtctatcgagatcaaccaagcctcaagcctcgtggcgtaccaaaagatgttagaccgtatgatgttgaacaagtacgcaacaaggtaattagtagattggttttttaaattgatctactaatttcgtagatacatccgacatgtatctaccaaggtacgcaatattttatctgcaatttatcgtacctatttagatcatacagcattgtcagatccatgatttattatgtttacctagagcatgttctttatacaatatttattgcgcgagtgtccccgatgttaaatcgactacggtctaacgctgggggctcgctctattttcttctgtataaatcatgcttgtttacggtttacataatgcctgatatttacatctgctcgttatatcctgataatgctagaagatccatgcagttttttaagtacatactcgatattatctgctatatgtcttgccttctagaaactatttttcaggaacaattgagcactcgagtaggttgtggt

SEQ ID NO: 16332 - DNA, 2493 bp, Oryza sativa
gagagacagacgaatgtacgtgattcggtcatacgaagtatttgttaattggtgtgttacggtatatgtacacgaagcttatgtggaaacagcttttgttaatcatcatagtacgaaacaaccatcccaagctaagaaaaggaacatgcaactatatattattaaccagaagaacagaagcaggttaatccggtcttgagaaatttattatcctaacaaggcacggagaaatcccataattacactgctccacgtcccagtcgtttcccgggtctagcattcggggtattgactacacgctgaatttagtgagcaggtcatcccgtcaagagagccttgcggatgacaaatagcaaaagaacatagattatttcatccataatggtgccccagcagacatcatagctgattcagtgatagagcttgcccagatcatctttgaatttggtctttatctgctccctcttcagtttaagtgcagctgtcaccagcccagactctggagtccatggttcaggcagcaacacaatctttgctggtatttcaaacttctcaagcctcgctgcttttgcagcctgcaccgttaaaacacattgcgttagatatcatggagaatgatggtatgtaattaacatgagtataaaaatcatactagtattatcatttgcaggttaagatcgccttagattacaagtacattaatcagcaatctgaatgacatcaaagacgatggattgcttataggaatcatctgtcatctccatcgcgatgcttttttaagtactttgtcatgcaaacataaactgtattgcactcatgtgatagcaaaatcctctgaaatccacagtaggtcggtctccttacattagtcacaggtcatctaatcgccaggttagtaaagacatacccatttcgtgtcataaatctgtgatgagctttggctataatcaggataacacagcagaaagatcaatgtgctactagttgttttcagttatgaagatactacaggctccaaataatttgaagaatacaatatgttcttcagcataattatatcctagtagttctataaacaagtctactgcatccatcttatctgttgttgtactcactgatgagcttgtaaaatccatcagcttttgcacttcacctatgttctttcataatttatatctttcaaatgtaatccagaaaatggcattgtctaatccatgaaatgaacccatttcaaattaaagatgataaaagaatttttaagtgctcctttggatattgggaaatattcctgcttcttctgggaaatgaactactacaataaaattcctgcattttaaaggagccttgaaattttaaattactttaaaaatagaaatgaaaacagtggggatttattgaatttctatgacatataaaacggacgattgattagagttctagtgcaagagttactgataatttgaatttcattttgatttctgaaataaagatggacactcagtttcaatagatgctcagataatgaaaacaaaagaacgttaaattctagcaatagacagctgatagatcaagcagacaactctccaggagaaatgcaagatcatactgatgtaatggtacatagaagtgatcaactcaagtctaacctttgatagagattgctggacctccttaatggcttgatcattgtggcacagctcatcaaagtttttgtagttaatcccagaattttgagcccactgctctaaggcctggtgcgccggcactaccaacgccacacaataattatgaaatggatcagcataaaccattatgctgtccacataattgctagtagttagagctgattcaacctgtaaaggccagagagaacgagagagagagggggtttaatataattataatacaaaaagaatacccataatggttgaggcactattgtaaccaaaccttgccaagagacacatattctccatgctgaagttttactatatccttttttctatcaatgatctcgaggcacccatcaggatggaactggccaatatctccagtgtaaaaccagcgcattcccctctcatctacctggagtaatcagaaacaaaaattgaagtgaaaaatattgtatttgaccaccaaggatgattggcaaagatcctttaccttgtagacctcatttgtttttgcttcattgttgaaataaccttttgttatgctgtatccaccaactacaacctctcctcggggcattggagaatcagaaattttatagccaccttcttcccatgaaacgagctgaattcatttgatcagaaaaaagagaattagagatacatatacaacatgataagagaacagaaatatctcacaacagaatgaaatgcttgctaataaaccaaccaaaactattgtggtattgtaaaataattttacagacttctgtgtgccactttaagttttagaatggggatgttggtcattcttaaggtaaca

SEQ ID NO: 16333 - DNA, 4589 bp, Oryza sativa
ggggccgtgagacagtaatttctctctaggcatagtataaacagatttttaccattttatgtatcttaacgctattatgttcatttaattataaatttgcatacataaatatcacttatatctgttaattatatgcatatacatcagataagttgactgtccctagtaagtataagcaaataaatcagataagctgactctccctagtaaggcacagaccttgacatagcaacaaggaaggggtggaccaacacggcccacacttgtgtcatcccattcagaaaaggctgctccagcacaagtctctgtcaatccatagccttgacctactggtacactgcagcacaggtaattcaaaactgcataagaaccaaaaacaaatgcagcgacatacaataaaaggaagctcatcacattatagcatagtgcatgtactctagaaaggtcctctgtttaatatttcaactttcagcatttgattcactaaacgtgcaaatacaaatttcactataaagtgatttttgacaaactgtttgaattaaaaaaacatataagtagcacgcccaaattttatgagcttatccaacaaatgttttgttttctgtaaataaataaatccaaaggtttgatgagcgcactacctgcaaacgtacactctaacaatgtctaggacttgagtatggcattgaacttgaattttccatgaggtaagttcattaaaatcagtattttttttagtaacgtcttaaacaaacttaagatgtacaataagacaaaaaaaaaagttgactccttgtatgtttttggaattcatgtaattctagcctcatttttcgaagaaaaaaaagataattcaagtatccgagaaatgacactatgctctacgactggcacacaatcttcaacaaataaactcagtggaaatttttggaagaatacttcttcagttgacatctcactgattgcaaatggttaaatttaagataatccaaataggacaaaagaaattacccaagacatatattcataaatctttgtgtgtcactcgatagaggtgcaccaccacaaagaacaaatctaatgcgcccaccaagcatgaacgtattggtttaaaaatgaggttatcccatatcatcctctctggtgcccaggatccaaaccaacttccttcaatagctccaagatttcgtttataggcaatgtcaaacagctttttggtcagaccacccttctcaccaacctggaaacataatttaaatattaagttttgagatgagaagtatgtttaaaccatattttggtgcatgatcataaaatttgaccgttcaattctgcctgcatgatacatgccatttgatgcaatgcatttaaaatattaagtctacagaaactcattgtttcaaacatgtttccagccttcggtttcatcatctgcttgttggcttatcagccacaaccaatttgaatttgaaacttaattttagagttgaatttggggttttctcatcatagtctattctccagccttgtacctcccatttttaatatatgatgccgttaactttttgataaacgtttgatcattcgtcctattcaaaattttagagcgaatataaaaaaatttaagccatgcttaaagaacatttgacaataaatcaaatcataataaaataaatgataattacatattttttaataagaagaatggtcaaatgtatctcaaaatgtcaacagcgccatatgttaaaaaacggagggagtataacagtttaacccaaaaattattttcggttgcttcattttctatggcttatcagcctcagccgaagctcagacttgtatgctagacaagacatgaagcgtgctacggtatggtaggcattataatggctagggttgggaaataagagatgcagaccagagcagtgcaccaaaactgaaggttgtagtgttgtatgataccaaaaacatgcatgttatactatgctagaaatggctggggcctgcacttgactttgcccattgagctagccagaacatcaatttttttttttaagatatgcctggtgtaaggtacagaaaaatctacaagttgctaggctgctagatgtgcaaacgacaaccaaacagtgcatctatatcctaatcttaattccttaaaaatactgaattgggggtgatagtgtgctcttctataccccaccaagttgtgtggtcaggtataagtggtgacatataaactgtttgcagtatttaggttttagctgatcccatatggcatgtacatccattgaaatacgtgggcacattgctagcagtagcactcctttaaaaataaggttgtggtggttgtgaatccaccactcaccaactctgcactgcaatttttatgaattgctgccttcatttccttacattacaatacctcaatatcccatatgttgtttgttcttatttggccttctaaaaattagaagttgacatgaaaatgtccaagatggaccaatgtatatgtggcatgtgcgaatacagtcaaacattactaaaacgaaaaggaaattaagtacatggccatacagataacgcttaacataaaacaatattaggacctgtatggttcaaaacttttttctttagtttattcacaggcagatatttaaacatataaatgattaatgcatcaaaggcactctaaagacatgttgcagctgaatgcaaatggcatataaaagattgcagaactagtcaaagatggaaagataatggtgtaaactactgagatagatggtatgagaggagaatcttgaacctttttaacacggcatctctgatgcggtctaaaattgcagggactgaaatcataagagtaggcttcagtgcagaaacatctccttttgtccccttctttattttatttgatgtatctgtcatagtcagagctgagccatatccaatggcagcaccagaagctaacatgacagtctggccaaacaaaacaacaatatgtcatagaaatattcacagttcttaataatggcatctctctcaattgcaaaagatgtcacctctgctgctagttcaaagacatgagccagcggaaggtatgccagataaacatcccctgtgccaagttttggtatgattgtcatgacagctgcagttgtggccaccatatttccatgtgtaatcattacaccctatgtcaaaggaaaccataaaactggattaaaagaggacacaagaactgcaaactcaaaagtggttgacattgtgataaatgaaagtacatagctgtggatcccaatggattgtaattcaagtttgcacaaaaaaatatgcattatgctgatcattttgtcaaaaagacgaacgttgtcacactcatgaacagttaattcatatattttatctatacctgtttttcctaatccgaggaattttgagttgtttgccaaaatgatgttctcgttatgaatttcaaatttgagcctttttcgcgtatcaaaatgcatatggtttctgaatttatttttttttttctctgaatactagagtcaacctagagatccagtggttatagagggtcttaattgtacattggaacagtccatggatctctacatgatggtgaggagtggatgaagcagtgatggatcagtttggttcatcctgttcccatccctgctatccttccacaataagcaaagtgggtaattgcacttgcaaaaataccaaggaaaaaccaactttcctttggggaagagaggaaaagagagtatatatcaggaaagtgaatttaatttgtagaaaggatttaatgtcctgctttatttctcatttgtaaattaaatgggcataactgcatattatcataactctcaatgttgcccttaattatggagagcatcagttcaaaaggaagttatgtgagtacgttgagaataggcccaagagattatcataatatctgtcaagctaatgggctaataggatcgtaattctctatatcatacatcacttaagctcttgttcagtgaaagtaacaggatggtaggctcatcatgtgtgtacaccttcagatgaagcaaaaagaaaaggaggaacaagaaagaatgacccctgcttttgtccttatttattttcatgaataaaaatagataacagcatatgacagaaaaaatcagaatatctttgagcacaagtgtaccttgggaagacccgtacttccacttgtatacataataactgcagtatcagtgcttgaaggtaatcttgcatctgtatgtgatgttttacccaattcttcaacttcaccaaaagaaaatgttgtccagtgcttcatttgattgagtacctcagcctcaacaggttcatcctcaatatagataacatgcttaacactctgcaacttggaactgattgcaggtagcttcttaagttgctttgaatcacatatcagagttgaaacctgtgtctgaaatttataacacacaaaaaaaatgagtttcccatctactaatggttgctgtcatttaactcttctaaagtgtaaccatctactaacggcaattcagcatggacatgtgtca

SEQ ID NO: 16334 - DNA, 7818 bp, Oryza sativa
caacagctgacgatctctcagttatcacacaggttcttgatatttttggtcatgcttcaggacttgtgactaacatgcagaaaagctcgataactcccattaggtgcaatgaggatgagttgaaagtgatttctaacatgctgccatgtgaggtcaaggattttccttgttcatatttgggcttgccgctgaacattaagaagccttctaaagccaagttgcaagctcctgttgataaggtagcagattacctcccaatgtggaaggcctccctcatgaacaaggccggtcgactcatcttggtgcgggtggtcctctccgcctgagttgggcactacgtatccgttggttatggctccagaagacagatagtgaccgtgcgtggcaaggcctacccatccaggttcctcgcatgtctcataatctcttcagtgtggctgttgaatcacgagttgggaatgggcagtctactttgttttggactgataggtggttactaggaaggaatatcttaaaaatggcccctaatctgtgtatgttggtcgctaagagggtggttaaacgttgtacagtggctcacgctctcaataacgggaaatggatcacggacataaaagggcccttgactgtgcaagtgattaatgagtatctccagatatgggactcagtttttggtatagggctgcaagaaggcgtcccggatcagcatgtttggaaactaacagactcagggtcctacacttccaagtctgcctacagggccttctttgttgggactgtccgttttgctccttggaaaaggatttggaatagttgggctcctcttaagtgtaagttttttgtgtggttggccatttacaacagatgttggacggcggatcgacttgcaaagcgaggcttgcctcaccgggacgcttgtccgctttatgatcaggccgacgagacgatacagcacatcttggtttcctgtgtgttcagtcgacaagtttggtccttggtcctgcaaaggcttggtttctcctccacacttccgaatcaggatacacgtaagttttcgagttggtggtcaaggacagtgaaaggcttacagaagaatgagaagaaggggctcaattcgctagtcatcttagccatctgggaaatttggaaacatataaatgattgtgttttcaatagagctacgcatagtgtgcctgtggcaatccaagccatagctaatgagggtgcactttggtgttttgtgggagcatcaaaactccaagagctatttgcgaaagcaatagctcctgtaccataggaggtcgaagcgcgtgcttgatgttttgtgtgtttttgtgaggtgttattgttttgtataaccttggtaggtgggtgctgaggtttgctaaatccttcaccgcttgcctctttattcttgcttaatgaaatgatacgcagatcccatgcgtattcggaaaaaaaaaatcttctcatagagttttttaagccttgggaaacaatttgcatggttattgcttgaatgttcatactggtaaagatttctctcaagaacaaccaactaatgaagatagtttaggcaagacaggtaataaactgattaaacaatgtaaaccaaacagacaaaaatagtatcatatcaacaacatgaactaccatacaagcttcggtattacatttcatccaccaaacagttcgcccaaaatcttaaaagttgctgacatataaggatgacccatacttcaataaaatgtgtaaaattacccatatataaagaaaaaaaagaaacggtaggaatgtactagtttcccaagtggataattataagaatgaacataaatactgcacaaaaaagccacatatgggttgtacctcattcagtgaatgcaccagtgcatcctcgccaagagatgcatagatagttacaactgttagattttgtcgaaagcatccctgacaaaataaaacaattattgtcatacaggttcataggttctcacaaatgtatacagaaagccacactatttattataatcacctgagcagcaatgatccactcagttcttgtatcagcaaatattgcagcacgactatctcgttggtgacccaacttgatgagaccagaagaaaaattacatgcacgactaaatgcttctgcgtaggtatcccattcatattcacctaaatgcaatttctcgaacttcctgccatcaggtgactccacaaattctctattgattagcttccttgtgccaagacacctgtgtcgagggtattttttgctagccatctcaaataaagctgccattgtggtggcaccctcccatggaacttcaactaacatggaaaatctactgtttcgcatggcaagtcctgcctcaccacccacatcagcttgtactgctcttttctttccctttttgttgaatatggaagaaagcatgataggaataactacagcaagtagaatggcaccaataattccaggcagaccatactctttcaccagtggaacatcacttgtggcaattctttgaagaattgacatgtttggattatcgccagtattttctcccatgattttaagatttcatcaactgaaagatttcacaaatttcgctacaagaaagtataaagtgttaataaccgtcatgttagtatgttgcaaataagtaataactaatttcttctcaattttataaataattgccttgaacagaagaaatgagtataactagattagtgcagcatggagaatgctttcgcactacagtagcattctatttaacattatgaatcatggaaaaatgaaaaatactagcaatgaacaatatttagaagcactggtactcttcttccaactaacaaaattaaaaatgatcgtatggtataaacagattcagcagctattagacagccttgttatgcagagcaaaaaactgtaaagtgcagtaaaacagtaaatacttggtagttttaatctctttgagtaaataacatatccgcatctccagtgaatgttaaatggtattgctcagagcaccgcacaaattattttatgatgacaacaaaattcccaaaggtcaacttaagttgctaaaaagtacaataatgaaattgcttgtgaatcctgcagttgcctacttctacagtgagaacgactcaacattacaagctgactcgtggaagcaacagcactatcacaacaggttagcagtcaagatgatatgtaagattcagcacgaagcaacgaagttgacagaaatattttgtaagtggagtaagtagattagcaggaatcttatgacaagttgaagacttgtagagaagataattcaataaaatatagcatccatctctggtttgctcaaagggccaatatcttatggcaaggtccttcgaagttgcaagcaattacaaagggacacggatttacatttgaagaaaaaaaaaagataacatgatctcacctaagaaacaaggagtaaagtaaacaaccactttgtgcaaattagcagcggtaggagaggaataattgaggcttgaggaagaaccattgaatagggacattaattaaacggttaaagttataattattccttactctgtacagcagcatagtctgtgcgtgggatcaaaggaaatcaggggcggatcaaacttgggacatgggggctcaaacttttgggggagcaaacaaattaagaaagatctagaatagaagctagggttaacgcgagcaaattccaggcaaaagtactcccggtgggagagagagatgaatcagaaagaggatgtggatgctcaccccgatcccctcccctcccctcccctgctctgctcgccagatggagatcggcgcacctcccctccgttgctctgctcgccagatggagatcggcgtccggcgtcccctcccctgttcacccgcgactcgtcttggcgcaaggagcggagacgacgagacgagagatttctgtttcttttacgccaagggaaggaagtggaagatgctcgagtgctccaccttttgtataaaaagctttcaggccgcgttcggcagttagctttcccatcttataatacgcatttcaaattgctagatggggttgtttttataattttatataaaaatattgttttaaaaaataatattaatatatttcttgagttagttttttaatacttaattaatcatacgctaatgagctgctccgtttttccaaagagaaaggtttccaactcagggcaccgaacgcaggctgcgaacatggaaaacggtattgcccatgagtgtttgattaattaagtattagcttaaaatatttaaataatagattaatatgatttttctaaagcaacttttctataaaaattttttttcaaaaaaacacatcgtttagcagtttcaggagcacaacgcgtgaaaaacgagaggtaaagttggaaaagaacacagcctgttgggcacccacccttgctagcatttggtgcggataagtccactttgactccctcaactatagctctactatgattcatatccctgaatcgtaataccaggtatctcaccccccctcaactataaaaactggtgcaatttaacttcctcgttttagtgggtgttttcgctgacgttgcactttgacttgttccaatccgctgagtcacctagtgggacccgtatgtcagtgccacatactctcttctcttccttccctttccctcctcactttcctctctcatggaaataacaacatacgatggtgattaggggaggtcatcgttgtgtcgccaacccctctttccccttcctctcgtctccgtcggggaggacgaagcacgagcgagaatgacagcggcagtgagaggggaggctgtcgtcgtgccgccgtctctcccgtcaccatctccgcctcccctctgctgccctttccactcgccgtcgtcgaggagcggaaagcacgagcgaggatgacaacgatggtgagaggggaggtcatcattgcatcgttgtccctcctgccaccgcctccgctgctccctttcgttcaccgccatcggggaggaggaagcacgagcgaggatggtggcggtggtgagaggggaggtcatcatcacgtcgccgtccctcccacccataaccttgcatggggaaagccgccgcacttactctgccaacaacgcgtcatcatcgctctgacggccaccacgctctgtctcatctagccgattccgctgagggaagagaagaccggagtggcacgacacgccgtcgtcacctcgatggccaccccggtatgtctcgtcctacaccgctcatcccttccgccaccgcctcttcctcacctttgttgtcgccaacatgtctgatttcgccgagagaagagaagactggagtggtgtggcgcctctgccctgccttcctgccagcaatgatgagagggaaaagataaacgtcattgataggtgggtcccacaaggtgacatagcaggttagaccaaatcaaagtgccacatcagcaaaacagtccttcaaaaccgtctgagggagttaatagtcgagatatccgatattgcagttcatggatatgaattagatttaaccactaaggagtcaaagtggacttattcccattggtgctcgactcactaaggcctgcgtgactgcacaattaagaatgtagcccagttactcctcccccactgctccatccatttcaaattacttaggtcccgttcgtgtccactagaaatagttgataaaattttgaatatttgtggcacgcttttcaaacggctaaacggtatgtttcgtgcggaaactttttctatatgaaagttgctctaaatatcaaattaatctatttttcaagtttgtaataattaaaactcaattaatcatacgttaatatcaccttgttttacgtaaaacacttaatcttaatcttaatcttaatctttatctttaggaaaaaagaattattctaatcaaacattttaatctttaaccgttaatttctatatataaaaattttaacatcataagaattacacttttgacactatgagaaatatttttataattaacaattcatatgtggttaaactgaacataattctaaaaactaatgttaaacatagggatgtttcacttaggacaaagcctataactttaagtaatttgaaattgggaaagtagttattagtagtatcaatagtaaaccaacatgcatattagcgatcaccagacccgttccttttacacccgcaacagtagaggcgtgagaagatataaaacacatgtgtccttccttttacaaaaacatagacaatgtacttcctccgtcccaatatataacaacttaggatgggattagaccaatcctagaactacggatctcactactacaaaagtgatttttctgtacgagagcccatgaattttgcaaacggaccattactagtggcgtctgcaaaaatcgagggtcattgtcccatacggctccttaagtggcccgtatggaaaaatcgattttcccctacgggcctcttaagatggccgtatgcaaaaatgagtttatttttgcatgtggctgtttgacgaccaaatttggtaaattatgaaccacgttcgacattgagatcgaggcggattcaacaaagaggttgattcgaagaacagagtatgcatcggctagaatctgcattggctgagatggatcggacagaggacagccgatacagccgatagaggtgatgcagccgatttcgatgatgacagtttcgaagatgtttctagaatcaatcaaggtgcttcatgaagattgctgtgatggagatagggctcttggataggcaattgtatctattaattaggatattttatgtaatttctttagagatatgtttgggcaaaagtctgctgcaaagacttatggtatcttaaagtttattagaggtaaatgtcgtgtccggcaaggacatatcttgtatctcgggtataaatagaacccgaacccatgtaatcaattaacaattgttcaatataatctcggcgcattgccattgtcagggttacgggttaggtataccctttacccttcgatatacgtcgcatatcggtatggcatacccacgcgcatacagataccctccgcatgcattaaggaaatccttcacggagtttacggatggaaagagtcctactcgaaccagactgggtcgtcaacgtatcgtgtgaggtttgatgtctctgagttctacttggaaaccgcctgacctgcgatataaaagggaccccccggggaggacctaaggcatcgaatctcagagccaacacaacccccacagcctacgaagtcggagcctgcaggagccaaatcgctggggatctagtcgaaccaacttgactacgatctcgccagatccatcgagttccattgttccctttgtaacctgtgttttccatcatataatcccacatcaactggattagggctattacctatcaaggggcctgaaccagtataatcttcgtcttttgtctgcttgatgtcgtactacatagacccttgtaccaacgtaccccaataccttctatatccggtctacgggtatcacccgtcgacagtggcgcgccaggcaggaggacttggtgctcaaggttctactactatgtcatccagcttcgtcgacaacagcgtcaacaccaactcaaccaagtatttcctgcttcaacaatgctggtgtggactcaagtcggcgaaatcgtcttcccggtttacaccacgatgccgatctcagccggtccatcaatga

SEQ ID NO: 16335 - DNA, 11688 bp, Oryza sativa
ttcagcgtatttctccaactcgtgatgtctattgtcctattcacaagacaaagaatcatgacctctcaagctgcaaggtctttctcagcgccatgaaggcgccatctcctaaggtccaacagtcacacgtccccatcagggataaagacaaggaacgaggagcgacgccaacttcagatcaatttgttggggtaatcgacatcgatccccacgaaccgtcagtcttgcacctcctcgaagactatggatcatcgacaacgagcgcgccgcgggaggtattggctatcgatgatgtcggcacgtcagcgcgcaccaatgcagaagcagagaatcaaatcgccactccggcccagcacatcagagccgtcaacgctatactgagggaaaccccctacgatcccgttctgaacgacgatctcacgcattggacagaacgactatgggaataagtgaccaaccatagtaacgcgttcgaagaggccgctgccgcagcgcacccggagcagccaccaactagcgatgccaatggtgaaaaccctgaacagagggaatcgcctcatcgagccacccctccacctcgcggcactggcgatctccgagatcacctcaacggccgccgagaggcacgacgcacacgagacaacgagaaccgttcccggcgtcatgtctcttcacggcgccatgataacgaagatcgaggagaccgttcaaacgaagaccaagaccgtgataaccgccacgatcacaacgatcgcgaacggcgggtgccaagcgatactggtcgaggacgttgccataatgacgacgatgatggagaccggcgccgagacaacagcgggagacgacgacaggattctcgagagccaggccaacatcctcgtaatcatacgccggaaccaagcgacccatcgtcatcgtcatcatcctcgtcttcctcatcatcagatagacatccacgaaggacacacgatcgccgacaacccagcgctgggtgtagagctttcagtcgttccctgcgtgatgtccgatggcctgagagattccgacccggagcaatagaaaagtacgatgggagcaccgacccagaagagttccttcaagtctactccacagtactctacgctgccggagcagacgacaacgcattggcgaattatttgccaactgcgttaaaaggctctgcacgttcatggctgatgcatctcctgccttactcaatctcttcggggccagacctgtggcagcagttcgtcgccaacttccaaggaacctacaagcgccacgcgatcgaagacgacctacacgcgttaacacagaactcgggtgaatccttgagggaatatgttcggcgcttcaacgagtgcagaaatacaatccccgaaatcactgatgcttctgtaattcgcgccttcaagtccggtgtcagagatcgctatactacccaggagttggcaacaagaagcatcacaactactcggagattgttcgagattgttgagcgatgcgcccacgcagatgatgcgctaagacgcaagaatgataagccgaagaccgggggagagaagaaaccagccacggacgcacctgagtcaagcaagaagaaaaatcgcaaaaatgggaaaaggaaagctcaagcggaagtcctcgcaatagaatacgcgaaccctcccaaacgcccagacccacaaagtagcgacacaaagaaagcatggtgcctcatacacaagacggacagacattctttggaagattgccttgttttgaaaaaatcgctcgagaaacacattgcatttgaaaaaggcaagcgagtacgcgtggtcgaaaaggatgtggaggcggctccccaagaatcggattcagcatatccagtctctgacctccacgtttcacacatcttcagaggttccacaacgtactcctcaaagcgagaatacaagaaagtggaacgcgaaatctgttcgacatggcagggggctgcacccaagatgaagtggtctgaacagaagatagaattctcggaagaagaccaccccaagaccgccgtcatcccaggacgatatccgatcgtggtcgaaccctctattcggaacatcaaggtcgcacgggttctcatcgatggtggcagctcaatcaaccttcttttcgccagcactttggacgcaatgggaattccgcaaagcgagttgacaccaaccgatcaaccctttcatggaattactccccaatcctcgtccaggccattggacaagattacgttgcctgtgactttcggccaagctaacaacttccgaacagagcatatcacctttgatgtcgttgaattcgatatagcttacaacgccatcaacgggagaactgcacttgcgaagtttatggctgcatctcactacgcgtatcaagtgctcaagatgctgggaccgaagggaacaattactattcaagggaacgcaaagctggcgatgcaatgcgacaaacggagtttcgacatggtcgagcaaacacccagcccacctgccacgactgagccacccaagaaagtgagcaagacaaacaagaagccgaaaccggacggcgcaatcaagatcgttccactctccagtgccaaccccgacaagaccgtcaagatcggggcgacactaagcgagaaataggaactcgcgctcatcaccttcctccgtgacaatgctgacgtgttcgcttggcagccgtccgacatgccgggggtccccagggaggtgattgagcacaaactcatggtgcgacccgatgccaagccagtaaagcaaagactgcggagatttgcaccagaccgaaaataagtcatacgagaagagcttgacaaacttctcaaagctggcttcatcagagaagtacttcatccagagtggctagccaatccagtcatggtgcggaaggccaacggaaaatggagaatgtgcgtcgacttcaccgacctcaacaacgcgtgtcccaagaatcacttccctcttcctcgaatagatcaactggtggactcaacagccggctgtgagctgttgagctttctcgacgcttactctggctaccaccaaatcagcatggcaaaagaggacgaagagaagacagcattcatcacgccgttcggggtattttgctatgttaagatgccgtcggactgataaccgcagggaatactttccagcgtacggtccagggcgcacttagcgaccagctcggcaacaatgtcgaggcatacgtcgacgacatcgttgtcaggacaaagacaggcgactcattgattgacgatctgcgggaaaccttcgacaacctccgacgatatcgcctcatgctcaatccagagaagtgcacgttcggagtaccgtcgggcaagctgttcggtttccttgtctctagcagaggaatagaagcaaatcccgagaagatcaaggcaatcgagaacatgaagtcgcccacaagactcaaggaagtacaaaagctaaccggatgcatggcaacactgagcaggttcgtcgctaggatgggagaacgagggcaacctttcttcgctctgctgaagaaacaagacaaatttgtatggacacaggaagccgaagaggcattcgttgcactcaagcgctacctatcaaacccccctgtacttgttgctccccaacctaatgaagaattattcctctatattgccgccacgccatattccattagcaccgtcattgttgtcgagagagagaaagtacaacgaccagtctattacgtcagcgaagctctccacgacgcaaagacaagatatccacagatccaaaagctgctttacgcggtcatcatgacatcaaggaagctacgccactactttcaagcccacagagtcacagttgtctcctctttccccctcggtgaagttgtgagaaacaaagacgttgttggccgcattgcaaaatgggtagtcgagctgagccagtttgatgtccactttgtgccacgaacagccatcatgtcccaggtactcgccgacttcgtagccgattggactatgcctgataacaaatcagacaaccaagtcgacaacgaaacatggacaatggcgttcgatggtgcactcaacagccaaggagcaggggcaggatttatcttgacgtctccttccagagatcaattcaagcacgcaatccatctcaacttcagggcgaccaataacacagctgaatacgagggattactcgccgggataagagccacagccgcacttggggtcaagcgactaatcgtgaaaggggactccgagctagtcgcgaaccaggtgcacaaagattataaatgctctaaccccgagttatccaagtatatcgcagaagtcaggaagctagagaaaaggttcgatgggatcgaggtccgacacgtctaccgcaaggacaacatcgagccaaatgacctagcacgacgcgcgtccagacaagaaccgctcgagcccggcacttttctggacatcctgacgaagccattagtaaaagaggttagcggcgaagttagcccggccgcccccgacattagctcggaggccacaaaggcagaacgcgccgttgccgatattgagaccacagatgactggcgcatcccactaatcaaattcatcaacagcgaggatttgcccaaggacgatacagaggccgagaaaataacccgtaaagcaaaaatctactgtatggtcggcagcgatctatacaagaaagcgccaaacggggtacttctcaaatgcgtctcgtccgacgacggcagacacctcctccttgatatacatgaaggcatctgtgggtcacacgccgccggtcggacattggtcgggaaagcttttcgacaagggtttttctggccaaccgccctcaaagacgcatgcgacatggtccagtgatgtgaagcctatcaattccacagtaaacacacaaagctacctgcgcaagcgctccagactatccctcttacttggccgttctcgtgctggggctagatatactcgagccattcccatgaggacagggcggctacaggttcctattcgtggcgatcgacaaattcactaagtggatcgaagcagtacctacgggggaaatcaaggccaacaacgccatcaaattcatcaaggagatattttgcagatacgtactaccgcaccgcatcataaccgacaacggctcccagttcatcagcgccgatttccaggattactgcatcgggctgggagtcaagatatgcttcgcctcggtctctcaccctcaaagcaacggacaagtcgagaaggcaaacggcatagtactacaagggatcaaaacccgcatctacgacaggctcatgtcacatgacaaaaaatgggccgtacacaccacaccgacaacgtctaacaaggaaacacccttcttcctcgtgtacagctccggggccatgctcccagcaagctacgacatcagagtacacgagtacagaagcattccgacgaggaccaggaggagcagcgaaacgtcgacgtgaatctactcaaggaacatcgcgaacgagttgtcgtccgagcaggcagctatcaacaggccctccgccattaccacgagaagcgcatccgagcacgcatactttcgatcggtgactacgtcctccgacgggttcaaagccaagcagggcgaaacaagctctcacccaaatgggaaggaccttacacgatcacacaagtcttgcggccaggcgcattcaaaattgcaaatggtgatggtcgcgagttggcaaattcttggaacattgaccaactacgtaaattctatgtatgagtcaatatcatccataccagtaagacaccttacagtatcaataaagcctattcttaggcccatattataatcaaagtgttcctgcccgatgatcccttatcctgatgacacctagcgttgaaacctatcctcatgtccctttacgccgtcttgacaaggcctccgaggaacctaagggatcttcggctagggacgcctagagccgataaagacgaaagaccatgtaagatctggtcgtgtaagagttctcgtcgtgcgtattaaccaagccgcgaaatcggaaattaactttccaacttcacggctgggggctaggatctgagcttattcaaccaaggcaagtcaaagtccaagagccttatcctccgagaaaattcctccgacgacaaggctaggggctagggagagtgtacgactcaaacgacggactaaagtcgtgaactgagaacacactcttacacacgacatccggagtaagaaagatttgttaagatagatttcttttctatttcacaaaatactccttacaattttttacacaagtctaaaactatattacacttcttcctaagatatctatcacagggtacgaagactaccaagaaggccaacgccagtccatagactggaagaccttctccgccaacggcgccatcgacttcgccaggtggtctatctccgtctgagtcctccgagaacgagaaaaaccttcacggagaaaatcgaggtccaggcgcgggcgatgatctcgtaggcaagccaacacgtgccctccagcatattagctcgatcgacgacactcctgcttcaaggcctcgtcgatgcgtttgccgacgccatcgaactgagcacaggccccgttcagccacgagatgtatccggccgccgactccttgggatccccacggggtactcggagctctctacaaaccttggccatggatgtgcagcaactcttcaagtacgagttgaaccacacctcacgacctcggagcgtttccacagcctgctctttcttcactgcaagcatggttctctcgagttccactacttcaaactttgtcttccaatattggatacgacgatcttgaccagcaagagcaatctcgagatctgttcaatgtgggaacaactaagtcaagctgtactcctctttcgagaacatagctgatctagtcggaggagcaaaagggatgaatggaccactaacctaaggaagtcgtcgccatccccgtccccgtagctaggatctggtctacattgtctggcgacgcatgtggttcaaacgcgagagccagaatgatcgccggtgactcaggttgcccacgctgctggacattctcgtcatcaacatctctacaagggacaaaaagtactcaaaatcaacatgcaagagtaagctaggataataactgcacgcacaaaggcggttgagatccatcaaagttttacacaacatgtctaaggagtacaagagatcctactcttcaaaaagagggagaacagattcccccagatcgccgacttcttccagcacccccttacgcgtgtcgctagccgccccctgatccaagatctcgcgcagatcgagttcaggatgcgccagcctcacacatgcaaggacgtggcacgccccggtgtagatcccgttggacgtctcctccccgatcctagccgcatgcttggaggggatctcctccatcgccgccgccagctccgcaaaagaagatgtcagcgagaactcatcgggattcgccgggatggtggaattaatgccgcactccccggaagctggtgcagaccagtataggtgacccgcaacgagccacggatttccgacagattgttcccgagcttcgacatgcggtgctcgagcccctgtcgttgtcgctcgttgccggccaccaactccctcatcttcttgaggtcttcacgagcctccgccaactcgtgtgccagccggtcagcgcgctcggtcgccgatgccgccgccaaccttgcctcagcaatcttgcaaccaatgccgcgagcaccagcttcgaggagacgccccatctcgacctggagctcctcccaggtgaggacagcagccgatggaccacgaccagccgcgagatcgctggctgggccacttggtgtcgcctcgcggctcccggggcaagcacgacatccgtcgaggtcacagcgggagatgcgccgaaagtccctccggactcatcttgcaccgccttcgcccgcgccgccctatgagatagccatggttcagacaacgctcgaacaaaagcacgaacacttagattcatccacttacttctcgccatgtgtcacaagttgttgtcgtcgtggaggcgggggagacgcgtccgaggcctggagaacggttgatgcgaagtaaggcgaaattgttctggctgtaagatcagacaacaggatagcttactgagggggtagatgccttgcgacgatgtccgcttacagaggagaacttcctcccctttgtcggaacattgccaccacttgtagtagcagcagtagcagcagcagcatcggatgcctccttggcgactttctctttcaatgacgccgccacctgatggtccacgagcggcccgacgatgtcagtcagaggaagagcctacgcttcataaagtcacaaagtgatctcagaagaaaaacgcagaatgtctattgagtacacttacattgatggcagcgtcgtgttcggccgcccccttctcacaaaggggaacggggatgttactcgccgttgtcgggccactgatcatcacctggccgacacgacgtcccacggtttcattgttcagacctgtaaatcgagaaccaaatttcgataaatcaggaggaacgtgcacacgagcatgtcaagataaatgcaagaaagataccccgaggagaaacccgggtcgcgtcctccggtccggaatagtcaaaggctagatggactcgagcctggagcggctggatccgtctaccaacgaagtcagcagcgatttcatacctcgacaaacctcgtactcggagatcgtcgacaatatcgatgaacgattgaagagaaggggtcaaagggggctttgcggtccaagacaaaatcttgtccggttgttccttagaacgatgaagacaggatccaaatcttcgatctgaagatagaaccacctcgtctaccatttgctgcaagaggaagggcactggaaggggatataacgcgacttcaggccatcccgaagtcggaacccgacgcatccagataccctgttggactccatccaacgcagctcatagtagaagcgaaagagatcaagaaagggctctaccccaatgtaggccgtcacaaagatgtgaaaaaatactaaggaaggcgatagaattggggttcagatagagcaaagaaagaccatagaagttcaaaaccaagagaagaaattcggaaggcggagggagaaaaccgcagagaatgtagtcctcgatcgcaaccatgcgacctaagacgggctggggttcagtacctcctgcttccctttccatggttccacgactgggaagggcgccgtcctcctgaagcttctttagcgacgcgttggtggaggatgatttgccaagatccatcgccgatcggagatcgccggagaaagggctaaggtcgacgagctagggtttcttgtgggagcggagaagacgaagaacgcttgcaggcgggatgttttcttcacagtaggcggacttcaaaatggatccccaaaattcctttaaatagacgcactactgacggtgcgaattccaaggaaaggagagagatggccgccggaaatttctgggtccgttacgcgtggtagtttcttggacttcagtttaaattcactcgtgaccgttgggcttcacatggtgttctcgactacgtcctatctctacggtcctcacaccgggaacaacaacaatctcgacacaagaagtcgcaaatggttacacgagttcatttaagcagaagtcgggggctactatcagggttacgagttaggtataccctttaccctttgatatacgtcgcatatcggtatggcatacccacgcgcatacggataccctccgcatgcattaaggaaatccttcacggaatttacggatggaaagagtcctactcggaccagactgggtcgtcaacgtatcatgtgaggtttgatgtctccgagttctacttggaaaccgcctgacctgcgatataaaagggaccccccaaggaggacctaaggcatcgaatctcagagccaacacaacccccacagcctacaaagtcggagcctgcaggagccaaatcgccggggatttagtcgaaccaactcgactacgatctcgccagatccatcgagttccattgttccctttgtaacctgtgttttccatcatataatcccacatcaactggattagggctattacctatcaaggggcctgaaccagtataatcttcgtcttttgtctgcttgatgtcgtactacgtagacccttgtaccaacgtaccccaataccctctatatccggtctacgggtatcacccgtcgacagccacccttttactttcgtttatttctacgagttcttgctttcgggttgagctgcatcgattcgatcttcaactagaagtaaaacttgttatggcggcttgcgttatcgaggttaatgcttccatctctatgatactttaaccctgtttatgtaatccatcgagttatcatatacatgttgcaatctatgctagtggcgctatataacttgttatcggctggttcttatcgttaggaaacaatcggtagagttatgttttattattaatttagattgtatcatatatctaccatctcttgtagattttcatcatcctgcttagatctcatacttgtctttatgtttaatgctgcatcggttgagttcgatctattaagtagaattcataattgtgatatctagcttgttttatgatcatcgagagagatagtatcggggtttcagccgatcttacctgacttagctttatgttttatatgcttaactaatatgctaagtctgccctttatattaagattttatcgcaataaagtatatcagacttctgtttgatatattctatctgttttaatatctgtaacgtagagtagtatcggagtactagccgatacatgctagatctatctgatcggctatgctataagcgtttataatcttcatgttaatgtgtattttgatctaagtgatttatactatctcggcatggcgaccgatctatcccaatcacttgatttaaatatacatcgacagaaagattatgtagcgttaatatctatagccgattgagtagatttagtcttactttgcttatttacaattgccgattgattcacatgtgacacatcggctcgagaataataatatgtcggcggcggctggccaatcagctatcatttatggattcaaccacggtttttcttgtctctctttctggttgattgcaggatcaaatcaactggcacgctcacgatcctaaaggcaagattttggacctgcactgaagttaagcaaatcttctaggccaatgtatgtttttcgcatcaacagcggctcacttaagcgcccgtaggccacttaaggagccgtatgcgaaaaaaaatttgaaaaaattgaaactagtttatctcactcatatgaaatccaaattagatggtttttttcctaaatgtttctaaaatcatgctctatcatgttattgtgttcttacttctattatttgggtcatttttcttgtgactttatttaattatcaattaaaaatttgaatttcaaaacttcaaataatattttgaagcagtaa

SEQ ID NO: 16336 - DNA, 3730 bp, Oryza sativa
attcctgcagccccaagagagagtgcacctcgtctcactgttaaggggactcccaccatcgccatcagcgactgcaaagctcgccgactgcgccggagtggggataggagaggtgggggcgtcaccatccaccagatgcgcggcgaacacctgggatcccatcacggtgaccaaggagggaaccttaatccgcgccaataacagtgaccgaaggagaggcggcagggagggagctcgatcgtcgtggcggcggagagggagctcgatcgtcacggaggcggggagggagcttgttgtcctcaacaagcagaggccggatccgacgaccttgcgtctagatccagtggtgaaggggagcttgccatcgtgctcccaccatgtcccttctcccccagtggcagacgatgctgcggttgatgggaaaggtagagatgcggagatggatgacgaaggcgtgggcatcggcggaggcagcaaacatcatcaaaggtgagggcaagaaaaggggataggtgtaggaaggagataagagagagattgtggggagggataaaaaatatatgatgggagaagatgacagtgggaccgtgtaaaggctaagggtacctacgtactctttttgttattagaagatccaaaatacaaatgttgataataaaatatattagaagtactgacacgtaaataagtagggactgaaacacaaatatactttacagtgctttccatagtgagtgttgtgatatttgtgtagttctatcctatatgacttgttgagactgctgataacagtggtcttcgttgtatgaatacataggagtacattacttttaatcttttttagttatacatatgtttttttgaaagatacgaaaatatacgtgtaccgtgatgtggaggcgcgcaaccggttcactggtgctgcgtggacgtgcgggaccgatggtcctgcggcttggccgcatggcaccgcgcggtggcgcggtccggtcgcgcgccaccgggtacacgaaggcagcgcacgcaggcatgcatacatgcatgcacgttagtcacatactcacattagtcggctgcactcggtggggcacggccaggccgcggtgttttcctagccgttggtcccacgcgtccacgctgcgccacataatttcgtaaatcttttaaaaagacatgtataaatgcaaaaaattaaaaatagtgtatatttttttcctttgtcgtacatacccatggggtgggggttatttagttggtgaagatgtagtcgcccgcggccggtgccagggatcaccccgccgcagggcagcactatcatgttttagtggggaaagcgacggtgtcgattgtaatttttgtacccgcatatatatatagaacaactcggcaagattagttcttttagaaataatatttttttaataaataaattgtaaaaatagatgttgattggctaaaatcgtaaatttaataccctgtcgagcaaccgcagtttgacatctatattaaaatctccacgtaaatcatttttttacctcctattagctctcacttagattcaagtatccaaataatagtatggcataactgtgtaaggacaaattaatgacttataactgatgatatgcaaatatgctatattatatattcaaattagttcatttaagattccaaaatatataaaatcaccatttaaaacaatattaaggataatatggatagtattgtaaagtttagggactggatgtccggtttgaaagtcttggatgctagacggatttccattcaaagtttagggagggggtacttggacttttttataaggccccatttagttcccaaaaagtttttcccaaaaacatcacatcgaagttttagatatatacatggaacattaaatatagatgaaaaaaactaattacacagttatgatggaaatcgcgagacgaatcttttgagcataattagtctatgattagtcataagtgctacagtaacacacatgtgctaataacggattaattaggctccaaagattcatcttgcggtttccaggcgagctatgaaattaattttttcattcgtgtccaaaaaccccttctgacttccgatcaaacgtccgctgtgacatcaagaaattttcatttcgcgaactaaacagggcctaaattgtaatcgttaaaatgatcaaaagaaaatttattttcctccaacttagtactcctttcgtcctaaaatataacaacttatagcatttaaaatttaacccaaaatataataacttcttcatccacgttgtatttttaaccaatcacaatcattgaacattcattttttttccacatacctccacttttcaaccaatcacacacctcctatcttattctactcaccttttaataatcgtgtttaatcctaaaacttttatattttaagacagagttagtaacattttgttaaaattatgggacatgcttatattttaaaatggatatttccttgataagaaaaacacttctagagttaaatgtgaatacgacgatttttttttttacggagtaccgacttgtaaaagaatcttggagaagacaaaactttttatctatcataaaaccattgtacccgaagaatcctgtccagtggagcccacccgacgaaatcagatctcctaaaccaacaaaaagaaaagaaaaaggaaaaacaaaattccttgtctctatcaggcttgaccgcgactcccccacgaaccggtggcgcctcctttcctcgccgcctcgtgggccagctcccaggggggcattcccgtcatttcacctcggccggcgtggcgggaattggcgcgaaagctggcctcacccccggagacgacgagacacgtcgggcgtttcccgcccaatccacacaccgcgccggaggtgggccccactacccgacgcccaggatcgcgccacgtggcgcgccgacgcgaccgaggcgcggggcccataaacccggggaaggcgcgagagtgggggagcgggtgcggtgcggaaacgtggcgaggttgccgctttgtcagctgtcgtctcctcgcttcgcttctcctgtttgcgttgtttttcttctcgtcgcagccgatgcgatgcgatgcgagctgtgacactgacacatgcacacaccgctgcctgtggccatgttcacttgatctggctctggctgctgcaagtactcggcttgtggaataataacctcttctgttcttcacgttctgacttttcttcgcacgttcttaaaacacaataattcgagacgtaatactgctagtgattagtaaagaaaacaaaatccacttgttcgaaagaaagctacggaagcgtggaagactgttgctcctcataggagattcatccaggagacgggacaaaagtagtagtaaatccggacatccattttccctcatcagattaaaaatcaccaaccacattaacaaacccccgttgctgtcaccggtcgtgactcgtgagacgaccagggtgtgtaattaacagctaatcacccgcatcagcagccactagtcacacccgattctttcactccaactgcggctgtgagcgctgacatggtctgaccactgcgcaccacgtgagacgagagacaacgccacaccaccatttaattactcctcccccactccactcccaacaaaagcaaaaaaaaaaaagaaagaaaaaataaatatctgccacgcaat

SEQ ID NO: 16337 - DNA, 5313 bp, Oryza sativa
ggtgaactgtcctcatataaaacttattttattttgttttcaaaacaagtataaacgcagaagctcatctgcacgtgtgcacacactgaaccttatgaaagcacaccctgtaaatttatagctatgaaagaggacataactgagaaaatattattcgcttgatttcaaacaaccaccatcgctgtctaatttttttaactttgaccataattaaattttaaattattatatcattatgtatgaaaattttcaggactggaatgcgacctatttcgttgacatgaaatatttttcagtatttatatattctcttcaataaaaaaaattcgagcagacaatggtcgaagacaaatgggagtcctatctaggagtagcaacaagtatttaaagacggacataccagtgagttaccacagagtatagtgctgccgttctaaacacaacaatatatgtgcactcaaacatgaaaaagaaaattaaaaaaaattgatatgtgcaacataatgccatgtaccatcattaaataaaatcaactcaaaattaaatttacatatatacaaagaaacacagattaatttcaggctcgaagcggtgcacaacacacaccacatattcatcccaaaggaaaaaaaacagcacatattactgttaataaaaacacatttttttttatttttaccagctacgttcaaaaatacttcatctctggttattcacctcacaagtgcttgtccatgtgcatattcatagaaatccttttagaaaaattggtaatatatcaataagttgtaacacgtcatataatggcatagttccaattttccctatccgtttcatgtatactaactttgggacaattatctatttgaccctactttgaagcttaactaccaatttgacatcgtttttcccagtttgcttatttgacctcgtttttcaaaattgaagttaccgtttcaccctgtttccaaaaaccgtcagggttccatttagaacaaattaaaaaaaataaatttacaagcctaaataactaaaatgcccttatttactcatttcttatgctctgtatcctctctcaccagagcacaaatggctggaggtgcgacggtcatcgcggctgcagctgcggcggctacgttggctccacggcggcggcacgatgaggaggaccgccagcggcagcggcggctgcagaggggcgacgagggctggcagaccatcgcagtggttgtgtcagctcggggggcagctgggctcgacggcagcggcgcgacgaggaggaccaccggcagcacgacggctacagaggggcgaggcgacgagggcaggaggaccaccggcggcggcgaccgcggcgacacgcggtgggagcagcggcggaggcgataaaccacggtgggagcgcgacggcagtgcgtagtgggaacagaggcggcctcggcgatggtggggagcgggagagacggcgtgagcggcgaaggggttgacccgcggtgggagcggcggcgacggcgtcggcgtgcggtttgagcagggacggccgtggcgacggcgggagctttggaggcgccgacccgcgatgggagcggcggtgacagcgccggcgcacggtgggagcatgggcggtcgtgtcggcgcacggcagtgaccgcgtggagcatggtgtgggagctcgttggcgcgcggaggccaaatggttgccgacagcggtacatgcgagggcgggcggcggcgcgggagcttgtcggcccgaggaggctgggcggcggcacgagagctcgccagcgtgtggagggcagagcttggcggctcgggagcacgccggcgcgtgaaaaaaaaaatgttgaataaacaattttagaaactagggtcaaatgagcaagggtataaacgtctatttttccctgaagttaacactgttagcttgcccttcacataatacggttagatccgaccttcattttttaaaataagggtcaaatgagcaaacttgaaaaattagggttaaattggtagttacactccaaatcaggggcaaatacgcagcaaatacgcaattaccctaactaactttttatttttcatgtttgagtgcacttgatgtatatcggtgtagtagcacgcgcgtgagattctcaccgtcagacatgacgcacctcgactttggggctgttcaaattgatgacagtttcaaccataccattatttggtaaaattgataattatgtggttatatttagtttgttactaattattggcaatacatatagaattttggcaacactattgaactaatcctaccaaaattttgacaatgttattaatttgccaaaattttggcattactaaattttggtagcgttcattttggcacaaactgaacaaaccctttattttaagagcaagggttttgtcgaatgtttatttaaatcaagattgttcttaaggggtgtttagatcccaccccaaaattgtacgctatgtcacatcgaacgtttgaacacctgcatgaaatattaaatataggctaaaaaataactaattgcacaaattgtgactaatttgcgagacgaatcttttaagcctaatagctccatgatttgataatatggtgctacagtaaatatttgctaatgatggattaattatgcttaataaattcgtctcgcgatttactggcagattctgtaatcagtttttttattagtgcctgaacaccctatgcgacaccctatataataaccgatgtgacacgccaaaactttacacccctggctctaaacaccccctaaatgcaactagtgcatgtgcattcatgcataaatatcacccgtaccacaggcgaagccgacaatgaaactcgccaatatcatagggtgctaatgccaccatctcaaaataagcaaacttttatatattatcagattcatacataaaaactagttaaaatcaatccacaaatcttatcgattttggatcactaaatgtgctttacgatccgtgctctagacccttctcctctatatctgatgacctcatcttcttctccagtgtcagtaacgtcccaaactctcacggaggaacagattaagatcctaagttggaataggggtgaaaggggatgggaggaggaggagttcaccagctttaaaggatgaccatgagagacgctgtacgatggtggacgcgcggcagaacgggccggtagttagacggcgacatcactgttgaagttgtaggggtcgatggtggatgttgggatggtgtttgcgacggggataaagtggggcgaaaaggttaggagacaatgacccatggtggcgaatttggtagcggggagtcatcggagacgaaaacgatgagatgcgggtatatcgcgggcgtcagctcgaggaggatgagaggtggggaatgagaagaaaggagagggaaagggaggccttaccggcacggcttgcacctttccggcgttggcgaggaggagaagggatcacgaaaacggtgttgcatagtcggtggtgttatgcaagggaagtgtgacacacgctacaaatctcaagacaacttcaacagttaaaaattatataatttaaattaggattttctgtcatgtcatataggtactcatagtataaagtgaacatcgtgatgaactggatcgagaaattaggaattctgaaagaacgaaaacattttcggataatcgagatcgttaattcgttatccactagaggggacgtacgtgcatgtaaacgtggaagcgcactaggcccgtcgtacaggagaagcacggaagctacggaagctggagcagtgcattaacacgctccaattacttctcgtgtgggtactaattaaatacggatcagtactccaatattaatagggatcgatcaaagatcacacggcacgtacgcgcgtaccctgcactgcatctgtaccgtctggcttgggatgccctcgatccatgcatccatcgatcgatcgggtccggccggtccggactgcctgcttgtacctgcacaggatatatgagcagtgactgtaactgtattggctacaaatgacctggccggtttcattaaccctcccatcacatgtgaatcagtaagtgcgtattacatgtgcagtagtaaaatcgatggcgccgtgttagaagcccaaaacaaagcttgattttgtctctttgtaaccacattttcggcacatgtcctgaatgcatatatattatattgatatatatcatgttaagatgtactggtacgtgctttcaagcctaattaacaatgatacgataaaaacaggtgtaagacctctttacctactccctccatacctaggaaagcttataattaatattataagaatttgctggttggtaacccgtttttataatctaaagaagtttgattttttagttttctttaagtttattttctgtattctacaactataagtgtttatattaatacttaatttccattccgaattacttacatagaaccattatatcaatttttaagatgaaatatggagttgtgataaattatggagctgcccctattaattacaacattagtacgcctttgagctggaggagtggattacaataaaaaagcagatgcattgataaggcgcagagagagaagatattagccaaatgttttgaaacatgggaatgagaggtattttgaaaaaaaaaaggaatgtaatttgagaccgacggagtagcatttcacaattcctttttactaatttcacatatatgtattcatttgggctaaaaaaaattaataatttgccactagttcacatcaccataattttttgggcaaacacgattaattctcatggtggagttataggcatataactctattcatcaggattgaaatcctaatatctaaaaataaattgcgtgtatttttagttggtgcacgtattgaaagtgatactccatatatatatatatatatatatatatatatatatatatatatatatatatttgcacggtcttcaataatatatttgactataaatttatttcatgttatatccccacaaatatgaaattaccatcacatgaaagtaatttaaaatataaatctaatgatataataagtataatactgttagtatgattattacttaaaagttattgagtttataatttaagacggaaggagtattgtcattattaataaaaaaccgaaaaaaagattgaggacacaaagcactaggatagccagcaggtcagccatgtttgagaggactctcgcggtgcatgttttcatggatcgggggattaga

SEQ ID NO: 16338 - DNA, 1259 bp, Oryza sativa
gcagaggttgtgcaggatgaagagattggtgaaggtgtggagggtgtgcgggatgaggagattggagatatcaattcgaagcccgacaaaccatatgttggcatggagtttcgtgacaaggacgaggcaaagaactattatgatgactacgcgaggaaatggggtttcataacaaagatttcaagctgtagaagaagccagatcacaaagcaatacaatcggtatgagttcgcttgccactccgagcggagctcgagggaatctggtgctagtgctggcagcaggtcaaggaggtccagtagagttctgaagacaggttgtaaggcaagaatggtggttgtgaagagggatgagaagtgggtggtcaccatagtagatctggatcacaaccatccacctttgaacccttctgcacttatgtccttaaagcctcatcgcctcataaaagatgaagatcatgatctcttagagtttctgcgcacaaacaagatacccacgcagaggatcatgtctgttctctgtgatttgtatggaagcatgcaaaacatccctcttgcaaggaaagatgtgagcaacctgagggcgaccatgaggccagaggctgagggcacctgcactgatatcgcagctacaatcaaatacttccaagaatcgcaagcagatgacccatcattcttttacagtatggaattggacagcgaaagcaaaattaccagcgtcttttgggtggatggagtatcaagggaagcatatagagaatttggtgattgcgtgttttttaacacaaaatacatcacaacaaagtactgtcttccatttgcgcccattattggtatgaacaatcatgggcagactgtgcttttcgggtgtgtgttgctgaaggctgaaattgaggagacatttgaatgggtgtttcagacttttcttaaggccatggatgggaaagtgccaaagagtatcatgaccgatcaagatgaagcaatggagaacgcaatcgcaaatgttttgccaaacacatctcataggcgttgctcatggtacatatggagaaatgctaagttcaagcttggtgtgctgccgtctcggttggaagggtttgaagatgacctaagacattgcattgacgagtcatttaatgttgaagagtttgaaagaagatgggctgctgtgcttgaccgatacaatttggcaagcaacaagtatatgcaggacctctacgaaatcagagaaaaatgggttccatgctatttcatggactg

SEQ ID NO: 16339 - DNA, 6393 bp, Oryza sativa
agtatttgtctgctaatcctgtttttcatgccagaaccaaacatattgaaattgattttcactttgttcgagaacaggtatctcgaaaattgctggacatttggtttattaatacaaacaatcagttggctgatgggtttaccgaagccttaccagtgcgtaaactcaatgagtttcggcgcaatctcaacctggttcccgtgttgggattgccggggggtgttaaacagatagatagttcggataggaacatatctgttgacaagataagatagagtttagtttgtttcttatttttctgtttcctttcttctcgatgaagatgtaatctataaactcctatgtacacgccacgccaggggctgtttctggctatataacacgggccgtggaaccgagagaggcaatccacgttaaacccatctttacagacatgatcctgtaggatcaagatgtcgactagagggggggtgaatagacgatttaaaaactaaatgacacataaccaaaactaacctaagttgctaggctcggtgagggtcaagtctaacaaagcaactaagttaagttttgtaaacctagggtgatagtggctcaattatatctctaggaaagtaaatcacactctaagtcaatgtttagcaatcctagggtgatatgatcttaagtatgtctctatgaatgtaaattgaacaaatgtaaatgcgacaaataaatgagacaaggaaacaagagatttttcaccgaggtttagaaactccccggtttcctactccccattgggacgagcccaactccaccgctcaaccacgaagccaccgcacgcccccttcgtcaaggggtgggcaaggcgggagccggcccacggagaggactacccaagcctcgatcactcgaagtagtctccaatctttagcacctgaaggctaattaagtactccctccgtactcgtaaagaaagtcgttttggacagcgacactgtctccaaaatacaactttgacttcttgtttctatataaatatttattgaaaagtgatatatgtatacttttatgaaagtatttttcaagaaaaatttatccatataatttttatattttcaaactcaataacttgagagttattcatgatttatattcccaatgtttaacttaagcattgtcctgaacgactttttttacgagtacggagggactgcaccatattttgttatcatttgttctcgtggaaggtgaagaccaatcctgaacctcattcttgttcaagagtacaagacgtgaaaagatcagagctgcaagtatgtacatggtcattgcatgattaggctctagttagcaaattacggctgtgttcttttggaggaacctctccccttcgcaccgaaaacagagtggtaacacgtgattaattaagtattagctataaaaaaacttgaaaaaattcattaatatgtttttttaagcaacttcctatataaactttttacaaaacgcgtactgtttagcagtttgaaaagcgtgcacgtggaaaacaagggtgataaattgggaacttattggaaagaacacggccgcacatttatctgtttgatgaaaacacgtatgtgatggtagtggatagattagtactaaaatgctatatatagctggttggtacccgttgtttggttgtctagtaactaagaaggctaaatgtgtcattttactctagagtaaacggtcaatgcacggtcaacacacggtagtggtatgaaagggtgtgcaaatttgatccaggggcatataaggaaagagccagtttcaaatggcatataaggaatacaacaagttttcaatggcgtataaggaattctctcgagaagaccaaaattctgaaataatagatatgtgtcatttagactcttaattcacttcctcgcaaaaaaaaatgactcttaattcactagtatattaataacaatcttttcgaagcccacactatatttaatttataattagccagtttgtatactcttattttttcataatctaacagaatacgttcaccttaggaccatcaatttgttattgagtccgaaattcgtccctcaaccgaaataccagatataacgggtccctcaaaatataataccggatcacttgaggttctatatagtgttatgcccgatttcggctaatgtggcaagctgagtcaacgtggaaccgggccccacataatcagtgggtagcactttctcataggttgattcatcttcccatctcgcaaatgatcatattggagagctgaggcaggggccagcagcagcaccaccagtagtagcaacccggtgggtacggatgtggcggcaacggtggctggtatcacaaacggggccgggacaggctgtactcaggagaggatggtcgtggacacagccaggatgggtcgtactcgggtggacatggtgggagttatggttgaggaggaggcacaggtggtggggtgccgtactatggcggaggcggaggcggtggaggaggaggccaagggcatggatgcattgctggctgcattgagagggagtgattgatggcgaggcggaccgatgcggcaccgaagctcagaagaagcgaggtggcggaggtatgctgccttatgctctgcagccatgccccgtgccctcctccacccttttctctctctctctctctctcatcttctctccctcggtgggtgcatcgagagcgagcagttgagggtgagaaggactggtggcgccggagctcgtggaggagaagcgaggcagtggcggaggcctgctaccctatgcgccacagctgcgccccacaccctcctccacctctctctctctccaccttcttctctcttctagcggtggatgcatcgagagggagtagttgagggcgaggagaaccggtgcagtgccggagctcgtggaggagaagcaatatatgcggcggcggaagcctactgccctacgcgccgcagatgccgccctatgcccacgggatccctatcttggacaagaacggcactgatccctttctcaaggcacccattctccattgccgctgggagactggcaacaaggagacggtgtggtacttctgtgggccattacgatgccagcaccaccatctccaatgctatagaaggaggagctctgtggcagcataggaggcaggtgagcttccaagggcaactgaggaggtggaggacggcaaggactatcctcgaagaccgcattctggaacagggaagcccatgtggatggtgaggttggcggcgctgaggaggataacatgggtgagcagacaccgttctctccagcggcggtgaggccatgtggctctccgttgactaggagagggagagaggaggaagggagagacaagtggaaagagaggggctgatgatgtaggtcctactataattttgcttatttttaagtgaacgctaactgacatgtgggtctcatgtaggcactatatcaattgaaaccgacatctaaactgtcttgagatcatatttacactagctttgggacttgaggacacatcatatatattgtggttcggggacgaatttcggattaagcgacaaattgagagactcagtaaacttattcctaataatctaaccgattttgcggttcagagacaccgataaaactcgatcatggacttttccttagcagcccacagctcccacacggccacaccagctgggtccgaaacataggcccaacaaggagcaacaaccctgttctagcccaccactcgacgccgacggccgacaccgctgacacgctgtccgcggtccgcggtccgccgacgcttgcctcccgcagccgccgcccgtcggccctcccccctcccctcgctggcacggcggctcggcggtcgccgagcactgacccgatgctgcgacctagccatcggaggaagagatccttagccgatgccgtgaagaagctggtgaagcaagaggaggagtggagctggggagaaaaggtcaacttcgtgggggtaaggatcagaatatcatatccaccactttctttttacaggcgtatttaactgtacatgatctttggttaggtaagacaaacaacacaattagtcaaagtttttagtatgaagcattgaagttccctaattcttccaataaaatgcaatcggacttgcaatattaacttgaactgcacagtttacctgttttggagaagtatacaatttcttggccctgcccttttcagatgttttccagaaaaaaaaaacaatgccttggccctggatgaccgtccaaaagaatactcaatactgtattcaacaaaatacaaaacacaaaaaataaaaattggaccgatttggaacccgagaaaagttttctgatgttgatctgtggggactcaggtacaatttcttatgtcctggaaaattactatagaactccgaacttccgaataggagatattttctaatgttcatgataacaacatttgtcaatactctatatttccaggagtacaaaatggtgggctcgatgtctttctctattaatgtgtttcagtgtacagacgggtccactagaagtctcagtctccttagcaccacagggaaatgattattaaagatcatatactttgtttaaatttattttgacctgatgagacgactttgactactggctgaagccagctacctgttggaaaattgattggctggtggccatagaaggagaacgaaaatatgggttggtggagttctcatatggctcagacatggtctcatggtgtggagagaagcatgagaaaggagagagtagatcagcaatacgttgtttctattcattgatatcttgacatcttgtttctattcagtgatcataaccagtccaatccagtttatgcagttttctccccttcgcgatggagttttcatgcatctggagtgatcttatcaggtaagttctttccacgttgtctcatcattttgttctccaggtttcctgtaatcatatttgatataaggtagtgctaaccttctctccagatcatggcttcatttttagaaataagctctgccctttatttgatatcttcttttcctgcttcgtagagttgtttgtgatcttacagttttacaggcttcaaaacccagctattttggcttcaattttttcccattacagttatttaattaatttatgatctaccttatgttgcttttgtatgttttcctcttgaagttaaattaggggatgttcggcacctagatttgctttaaaccaattcgactttaattcagaattccaattagagtaaatttaataaaaccccatgttttattaccaaagttaaaaaaatgcgttattgtagcatgtactttgatgctaaagtttcacaaaatctcaaccctatttaaattccagacaatgtagcatgtatttacttaatttttgccattataaaatgtctatagaatttgaattacgaatttcttggttaaaatgtttcattatattgaacccttcattactctgaacaatattgttttaaatatttaaaatttgctaagagttgaataagggcgggactttatgaaaattttaacctatatgctaccagctataactcccagagtttatagcaagtttgacaatgaataacctatagtttactgtgaaatttgttcttgtatttactttgatatttttgaaatttgaatggaaaaccatacaattattttttagatttaatatgaattccttttttcttggttgcttgacatggactctttacttttaaatttgtaatcccaatttgaacacagagtcttattaatgaaactgtttcgaggactggattggaacacagaggagatctgcctaaacaggattggactggttatgatcactgaatagaaaccagagtcttattaatgaaaccatacaatttgaacgcagatctcctgcgtgcaaaaaaagttattgaacataggctttttggggtcgcgggagggggttgctacacataggccattgagctcaattgaggcctgcacacaaacatttgttttagtgcttgagctgaaagaatgtgatggaactgtttcgagaaaatcactaagtggggatgaactgtaaatgttatatagaatttgtagccttttaaacatctaggactatattcttgaaggactctaattaatattctttgacaggagtgcaaaaattgtcttttgatgacctagacatatcgttaatctgcggcaaccacatagacaatgttgcattttctttctttaatcatgtgcctgtagatgctactgtcctgataccatccaatggcttgttctggagtctttgttctgttcttgggctgcaggaat

SEQ ID NO: 16340 - DNA, 1708 bp, Oryza sativa
cacagtattatgatgcaatactaaatggccttgaggtcttcaagctatgggacattgggaaaaaaaaccttgctgggcttaaccctccacttccaccacaaccaaagactgatgtgaaccctaaaggggtgtctggtggagggaaattaaaggtgctgtcccagcagccatatgtgccgtggttgtgctgattacagcttgtttttgtgtgtgcatcatctgtagacgaaagaaagtggcaaagcattctggcaagactgacaaaaagtgcttgacttatcaaactgaattatacaaatcaccatcaaatctttgtcggaacttcaccttccatgaaatgcaaatagcaactagtagctttgatgaaacccttctgcttggtagaggtggatttggtgatgtgtaccgtggagagatagataatggtacaacggtggcgatcaaacggagcaacccattgtccctgcagggtgttcatgagttccagaccgagattgagacgctgtccaaggtcagacatggccatcttgtgtctctaatcggatactgccaggaaaaaaatgagatgattttggtgtatgaatacatggcccgtggaacacttcgggagcacctgtacagcaccaagaggccaccattaccatggaaggagcgcctcaagatctgcattggtgcagcccgagggctgtattacctgcacacgggcccgaaagaaacaatcatccatcgtgacgtgaagactgccaacattctactagatgacaagtgggtggcaaaggtttcagactttgggttgtccaaggttaatccggacattgacgccacccatgttagcactgttgtgaagggtacattcggatatttcgaccctgagtattttcggttgaagcaacttacccaaaggtcagatgtgttctcttttggggttgtgttgtttgagatcctgtgcgctcgccctccagtaaacactgagcttccagaagagcaagtgagcttgcgtgaatgggcattgtcttgcaagaagataggcactcttggtgaaattatagatccctatcttcagggagaaatcgctcctgattgcctcaagaagtttgctgattgtgcagaacaatgtgttgctgatcgaagcatcgacaggccagagatgggtgatgttcttcggaacctagaggttgctctgaagatgcaggagtgtgcagagaacaatagcaaattcagtgaagaaacaacatcgtcgaagacaacaccagacatgatgaccatcatggatactgacaaacaatccacctactcgacaatgagcatcactggacaaaggaccatattctctgatatgatggatccgcaggcccgatgaaacacaacagttaatgtttcaactaatttcagatccatagttcatgtcctggtgatcttttgatcgcaatcactctagtatgttgaataattagttgtttcagatttttcatactagttccaaatctaagcatagttagacttatcaagtaaataattctgcataccatttttaagaagtaatgctactgtttgagtggttattttgttgcttttggatagtatagtttacccaatctatctacatacgaaggtgctgttaatgcagtgtcgatcttaaaaaaaagataattaagaagcaaagtttattatcatgttaatcagttgttaatgctatagttcagctgtc

SEQ ID NO: 16341 - DNA, 6771 bp, Oryza sativa
ccgcggggtccggtaaccgtgccaaaaatgataaggggaacctggttacgtccaacaaggcaacaatttgtgagatttggacaaaaccacttccccatataaaatacatctataaaatacttcagtggtggaattttttcgctcatcaacgggcaaaatggtttacttttaagtaggttattagaatttttatttttaaaagtaagttattcgaaagtttgtttttaaaattaaacaaaaagaggctgaaaaaatcattaaaatttacatcttccaccaagcattaccatatgtatgattttttaattagttttttagataaagttacttttgcttaattagtacgtaatttttcttatagattcaaagaccactagatgaagttcgcccaaagacatattcaagtagataactttacatgggtttaattaagggttaattggatccatgccattgcaaatttgtttattcagaaaaataccattacaattcgtctattcgtaatcgtgccactgaaattttacaaaattaaaaccgtgccaatgccgtcacgttattcattcatcatctgcattttccgtcttcttccatcaccttctatcctcaccggcgcaggaggtaggccagagcacggtggcggcgtcaaggcagtggaggatggcggcagcaatggtgccggccatggggaagaagacgaagccatcaccgtcagggaggccaggggcgcgggaggcagggcagagcgcggagtgcggtggtggtgtcgaggcggcggaggaggatgatcgccgcgatcgccgccgtggaggaagtcgcccctggcgccggatccggcgagccggtggctggatccatgtggtggcagaggaggaggaggagacaaggggatttggggatttcgccgccgcttccgcacgagatctcgcccgcttgggtttcgccaccaaatccggaagagaagggagaggagagcgcggagctaccatgctacgctgcccgccgccgcctgccatggtttggtcgccggcaagctctctctcctcccacgagctcgcctcactgcgggagatggcccacttgacgccactgtccctcttgctgctgccactgctccacgtcagttactccgctgatgtggcaggatggcgtcgagcacgccgatgactgcgcggttatcgtcctccatgaggcgcgcgggaggcgtgacagcagagagatgagagagaagactgaagagagaaggaagaagatggaaaaagaaagagaaagatgggaaaagtaacgacaggggcatggttttaattttgtaaaattttagtgacacaactacaaatagacgaattgtaatgatatttttttaaataggcaaatttgtaatggcatggatccaattaaccctttaattaaagcctcgtactccacctgtgaacacacgattccatagccatttgttacaacgcccttgtactaccgtctctctcctagccattgcatcaaacacctgacgtacgcactgtggcattccatggtacacaaagggcgtcatgacctcttctcacaccattcaaaatgagtgactgccacccaaatatagtgatagtctgatagagattcttgtgttactgaacaattaattatttcatctctcaaatctcacctgggcggcttggtcctcgacttcgccagctgagccaccgccatccatgatcgaccgcttggtcctcgactttccgtaccggctcttgactggagagtcgtcgcagcgacgccgttcggccactgctcgagtactaggttaagacgaaatatgatgtatggtgttggcggattgagagtgacataatcttaaaatttttactcgagcactataggttagaaatttgtggccccaagtgtattcttttctttttttttttaaggaatctctctccaattggcttggaaatatcttttagtaaactgctagttttttagtctcctccaatgataacacgttttgtgatgtctagctgcaaaattgtctatatcccaatggatccgattatatagtactgcaccgggtaatatactaagcattccctctgataaaagagctagagtggtctaaagtgaaacaatgatccaattagcaattaagtcaaaaaaatgtataagatctaataaatttataataccatgcgaatattttttaagaaagacatgtacaatttattatgttttaaccttaaaaataagtatttgagaaattatcgatgattgtaaattttgaagttttattaaatattatcctaaacgtaagataggggaagaaaattcaaatagtaaatttgggaattaaaatatatgacgataccatacatttgcatattatatatcgtattaaaagatgaatgattaaatccaccttagcaatgttttgcttgaataactaaaatacccatgaaaatctatggtaaaatttgagagaactcccattcttgggagaggtatatactctcaccaccacttgagtcaaaactaactaatagatacacaggtgaatttccaatcttattctcacttatgggattacttttgatatctcttttctggaaaagtaagtattgctcatgggatgagaaggtatatagctttgttaggataggagaaaacttctagatttaaaattctactccctccacaccaaaagaacttcatttctagcactaccctttgaccagcaaatcgatgagttatttattcaatactcctacctcactactagaataaacatttttcccgatgtggggtttttttttttttcagacggacatgacccttggagccaaatgaccgcctacaaaaatataaatcggggtgaagttcgctgttcacaggcggaccatttaagcggtgcctgcaaaaatgattttcgcagacggaccacttaagcggcgcctgcaaaaatctattttcgcaggtgaaccttatgtggtccacctgcaaaaatcgtacctacccaaaaaaaatcttaattcttatcttctcctcccacccctccccaccactatttccctctcaactctctctctccctccctcaacacttctctcctctccccaccggcccgtccccatccctccccgctggagggggagcgacggcggctcccggcgcggcggacgcggcggcggcggcggcacggctcccctcccagatctggccggagggaggccgagggagggcggcggtggcgaggcgaggcgcgatttctttttttgttcgtgcagaggattatcgcaggcaagccattgggcagtcgttggtctacaaacggtccttcccactgcctggaaaaaccacttttgaccgcctgcaaaaatacttttttctagtagtgtattttatcttccacacgcgtaaggtaaaaagatgaagttattttggtctaattgagcggtacctcactacatcgctagtacagttgaagggtgcgtgccgtagatatctaattgcttagttgcaaatttacctaaaacaggtcacactttctattttttatgcaatggatagttaaaagaagaaccagtgtgcgcatattgtggttgtccgtgtttgtattgtgtttgtgtttcgtaaaaaaaaaattgggttgtttattgataagttggatggcatattgacaaattggccggcgccatattttttgcccctgctaatatattcattcacttggttataaaatgcccatgcccacgacctcagttggcgcgtgagacgcggcaggccaggcgacgtcaagtagaccgatcgacgcgcaggccgcgcgcgaagatcgtatataccttcgttcgcccccgtactgtgagttctttcatgtcaatcaattagcttcaacacatgcatatgctatgcgctgcctgcaccaaaacacaccagatcaaaataaaaacgataattatatatatgcagcacctgacctgatttgttcttcaattctagctttgacgaacatatatatgtaaacctctcgtcgttcatggcgtcttgtttagcaggcaactccaatatgtacgcctgcagccgaagagctatagcgcgctcggcagtttatgcatgatgagaagaaaaagggtcttagttcatcacggtgaaaaaaaaccttgagaaaattaagttcagtaatggccacaaatggacttttcccaataagcatatatgcgcttctagatgatttttttttgaaatgtttagattaattttactaccactagcaaaatacccatgtactatatattcaactactatgtaggtccttcggttcgtcgcacaaatcgaggccggtcaaattaatgcgcacgctagcaatataattttacaaacaaagttttatacactgggagcaatatgatcaaagggtgattttcctctgtcttcgtctttgaaaccttcaagattctgcatccaaagttattcttgtcgtcgttgacaaagtgcaatagagagaaaaccacacaaaatcccagaaagaaaatactattactgattactaatattgccgttgggtatatctcacttttatataaaaaaaatggacacttaaatagggtcaatcggaattgaggatagtgagaagtgaacttttaaagattaaaacatttttttggattatagaaaattattaaaagaattttggaaaaatgattggctttggattagatgctaacaggttgggtcagccaggaggtgaactagactttatcttcggtaaagggttaatgggttggtgggctggagttcaatgggttgaggtaggaggtagcattcgtggtccatagccgtgagatgccccgagttaccgacttatttataatataagtggattcacgggtcaacccacttgcacccttagcccccgaccctaggctgcaccgacagttgtcggcggtggcaggtggtgccccgtcgaatggcgcgcggctcgctggatgggatggctgtaggagtaggaaacggaggggagggcgaaactattgaatgggttggattggaaggagggactgtgaagatggtcggcgactagcagtgaagaggctcggtggagtgtggtcattatttggttgccggcagcgaccaaatcgacggtggaggaggctcgggatgggtttggtagggtgcagtaatcgcgaactaaaggaaggagggaggaggagaaggctcagtggtgaaacgaggggatttttcgccaacggcggtaatatattgtggatgggagagaggagagggaggaggaaagtacatggtgtggtgcaaaaggaggagagggggtggcttggagctttaaggtgagggattcgtcggccaatttaaagctgagctcagcactagctaacacagaagagaggcaatgatgtgcgattcatgtcgcagctaggagcggcgcgatgacaactataacctgtgcggaggtcagggggaagcgaaggcggtgggctatcgggacgacatcgatgcaatgaaacgatgtggcggagctgcaagggcggttgggcggcattgcagctgtagttgccagcttaaggaaggaggtgtggcgggtgggccctactgtccgctgctggccatggagcgaccgagcgcgctagtctatggctcgagcggtggcgcatttggagggaattgggctattgggcctaattggtcagcgcaggttgcgtgggagaaaggagaaaaagcgatggagagaggaaggaggttgggccggcgggaggaagaggaagatggttggctgaagatgaatagtgattcgtgggatttttcaaatcgatgaatggagatggaactttgattaattcaaattcaggtttgaattcaaatttgatacttgaactcgagaaattaaggaaaggccaaggaataaaatttcaatggaaattttgatagaaattgatatttaggcccgtttggcacagctatagctcctaactccaacttaaatggagacggagttgtgccaaacagtccagatcctccgttttttggagtggaggtagcagagatactcctagaaaatgaactacggggatggagctaggtttttgctgctccataactccaatccaccccaaaagacccactaccctttaactttttagtctatttacacaaaaaattaccactcaactacccttcactcctcctctcctcccgttctctctcctcctccatctcctcccgatcccaacctagctccacagcgtcagcgggcgacggcgacaggccggcggcgcgcggagaccacgcgtctgggaacatcgaacagctagcgggctggcggcgtgcggcactcggcgagacgatgcgcggccgatggccggcggagcgcctggggatggcaaacgaccggcagggcgcgcctggggccggcggctatttttttttcaattttgctagagctgaaacgtacccaaacacttttcaacgagccttcaactccaatagaagctagctcttactggagtaggagtttggagctcggagttggagtttggagccttaccaaacgggccttaaattgatgggaaatttatgaaaggtatcagagggaaattcgaattccggaatttgaaactggatcgggatttttgggttgaagattcactggtggagaaaccatctttgctcggtcggccaaaatccataatagtcccggttgcaataaaaaccgggattaaagattatctttaatcccggttcaaaagtttagagctgccttttaatctttagtcccgg

SEQ ID NO: 16342 - DNA, 4560 bp, Oryza sativa
gatgttttcgttcagcggcaccgttttgttggtgggtgtgtagacatgagacgtagtgagatatcccaatgcgctgaaaaaaagaatttaggcattggtactcaccaccccaatctgtttggagtgcaagaatttttctatcaaaacggcgctcaataagatgttgacaatcatgaaaacattgaaaaacttcggattttcgcttaagaagataaatccatgtgaatttactgaaatcatccacaaaactaacataataggaacgactgccaactgaagttggggctggaccccatacatctgaaaaaataagctccaaaggagctttagaccgacttaatgacttagggtagggaagttaatgactcttcccttgttgacaagcatcacatatggtgtctttattggaatcactaacaaaaggtaaattattctgactaaggacttgatgcataatagcagaggagggatggcccagtcgactgtgccaccgggaagaagaaatcttgtggacaccaaaggcatgcttgacaactggatcggtagatggcttcaaagggtagaggcgccctttacatctgccgcgatgtagaagcctcctcgtgtcccgatcctttatagaaaaatgatttggatgaagttcaacaaaggcatcattatcaaaagctaaacgggatgcagagactaaactttttgtggcttcaggaacgtaaagaacatttttaagaacaagattaccactagagattggaacagtagcatgatcaatatgtgagatctccatacctgttccgttcgcggcgtggacttgttcattgccggtgtatttgtcccgtaccgtcagcttgtcaagttcgccagtaatgtggtcggtggcgccggtatcgacgtaccagttggtatcaataccatatgaagttgtggccgtgttcgcagccttctcctcgccagtgaaggaggtgtcgaaacgcttgtagcatttgatcaccgtgtgaccaagttttccacagagctggcacttgggccactcctgattgttggcgccgccgcgaccgccttggggagcgtcgcggccgccgccgccaccgggattgccaccaccgcgaccacgtccgcgctggccactcctccgccacgtccacgcatggcagcgttcgcttgagccatgccttgacgaagttccaaacgctgctcaaagctgatcagttgtgtgatcagctctgagatcgttatcggttccacgcaggctgcaaccgctgaaaccactggataataatcgaagtcaagcccggcgaggatgtaagacacaaggtcctcatcgtcgagcttttttccggccgcggtcatctcgtctccaggccgtgcatcttgttgacgtagttgatcacagaaaggttatccttctatgttgtggcgagagccatccttgtgttgatagcccgagctctggactgggacgtgaacatcccttcgatggtcgtccagacaccggcagcagtgttcatatgaacaacctgagaaagaatttcacgtgagagtgaaagcaaaagatagcttagcacctgctgttcctgagcaacccattcggtgtagtcaggattgggaacaacaatgtccttctcatcctttttcacgatcttggttggagccggcatctccttggtgccgtcaaagaacccagccatctgggcccctcgcagagttgcaaggacctgagctcgccacagggagaagttgccgcgagccagcttctctgtcaccggctgcgagagcgccggggaaggagcgatagtggaagaagatgacgccatgaggaaaagaggaagaaggctctgataccatgtaaagatgggtttaacgtggattgcctctctcggttccacggtccatgttatatagccagaaacagcccctggtgtggcgtgtacataggagtttacagattacatcttcaccgagaagaaaggaaacagaaaaacaagaaacaaactaaactctatcttatcttatcaacagatatgttcctatccgaactatctatctgtttaacaatgtccgcctgcgaaaaaaagaccccacgtcgggaaaatgctttttctagtagtgctggtcgcccgaacctactgttgttgcttcgggcagcgcctgcgacgtgcaggagccaccattgcttgctccgggcgctgcctctaccacaggtgccaccgccgtatcctggtctatgccgcaaccgtcgtcgccttcgaccacgacacattctgcgccgtagcctcgactcaataccagagcctacctgctgtttgggtatgtcgtaccgaagcgggcgattgattttaggaggttgggtttgggtcagttgggccttgttcttaggttgggccaaaggtcattttagtcatttatgtaaaaaactgacagttgaccaatgtccattgttagtcaatgcacggtttagtgatggtagtgacatggaagggtagggaaattttaagtcaatggcatacaagggaagagccaattttgaatggcgtatcaggaatccggtaaatttctagtgacatataggaattctcttgattgaatctcaaatgtaaaactcacattgatgttccaatacaagtacacctttgtatgtatggactctaaatttataatattttcttatctgaaaaaaaattaagaatccacgataacgctccattcaaaacgtttttcttcagcatctaatccactattatattttatcttaaatttgcatgtgtcttgtctaaacttcttcaaacagattggttcaaccttatagcatacacaactcctctgtaaaactacccctgcaatagtagcgactaacgtggatctttgttggttgcccggcaaaaggagcccgagggcttagaacccgttccaaatgaatctaccagtgccatgaggtgtaggaagcgcatgagggctacgaagtgcttcacagagtggatagagcatgagccaagggagaaatgttcattgatgtacgatgcggatggttcacggtaataatgagtgttgcgggactgggagtcatcttctcagatatcatgcatcctaaaggccgatgacatcaaaccacagaggttttattcgtgttgatatgcacggcatatcacacatcggttattgtattagttggttaattttcatggtgatctttcataatggtgtagaagtctcacttgtcatatattcaataaatcaatacataacaattttctcatggtatatttagttttagagatatttgacaggttggctcgtcgggtgataatttaccttaagtagttgctgaagaatcgtacttactgaagaatctccgtagcctcctccaagtcaatcaggaactgaggaggcaagtaatcaatccaatgggagtcccaggcgcattggagatccagagaccaaagcaagcacatctgattcttagcatcttatctagctgtttcattgcaaaatgtactggaataaatgcatgaagattgtacgaccattgcaacattcaaaactaaaatccatttaagctcttaattataagagagagttgtttaagaaaaaactattatattacaatcatctatacaagtgttttttttcagagaaacggattttatttttctacttcccttatagacacaattatttttagagatagtagctaactacttactttgcaggactaccgagagaagtctacccccactagctaacatagatatttattcttggcgtgcatattcgagatttagaatctctttccaattaggctaggctgaatcgggccacccgcccttgggtgttgccttattatcagcatggtgttgatgtagctcttaagatagatatgcctctgtaggcactagttgcttagggtgcaccacctcattatttgaatgtttatatgtagaagcatatgtccttaaaaaaaatgaacagttctatttctacgaaatattatctgcaatgtataaaaatataaaaggctaaaaacttgaacttttttatttacggtgaaccaaatatgaggattttattttttaagacctgcattgcgattctttatcgccaacatcatgtgctattatttatgaatactaaaattataatcatatgctaaatatattgattttttaattttaagttttgaaactaaagtaataaaatagcaacaacacattgatataattctaccaaaatttagtaacgttatcaacctgtacattgccaaatttcggaaatgttgaatttggcagtacatgaacaacctcaaagtaccaggttggtacgccgcggaacaccgtagcctgcccttctaaacgggataagatccaaagcgaaacgctgaatcgtacccatcctgatggcccagatcctgctgacgtcatcctccatcaaccccgcaaattcccccaccaacggaacactaagggctcgtcctccgcctccgccgccgcggctgcctcggcgtcggtggcaggcgccgccgtacgccaccgcgctcctttcctcgccgccgccatcgggctgcaggaa

SEQ ID NO: 16343 - DNA, 7937 bp, Oryza sativa
  unsure (1)..(7937): unsure at all n locations
gatcctatgcgcgcgccctgcagtgaacatagagcttcctgaagagcaagcaagcttgcgtgactgggcgctatcttgccagaagaaaggcatgcttggcaaaattattgatccacatctccatggagaaatcagtcctccctgccttaggatgtttgctgattgtgcaaaacaatgtgttgctgatcgcagcatcgacaggccgctgatgagtgatgttctttggagtctggaagctgcactgaagctgcaagagaatgcagagaataacaaaaaattcagtgaagcaacaacatcgtcaaagagaacaccagacttgataactatcatgggtactgacaaaccatcgacctactcaacaatgagcatcaccggacaaaagatcatcttctctgatatgatgcacccacagggccgatgaaggacaacagttgaggatttcaattaatttctgatccagagttcatgtattgatgatcttttgatcgcaattactagaatattgcattattgatcaattgtgtcagtttctgtctaactagaaccaaatgttagtgattctaaattccgaataaaaacccaatgctacaggtttgactagttttttcttgtttctgaatggtaatttaacttatctagctctatgcaaaggcactatatttccgttctgtggttcagctgtcaactgtactgattcctgatgtttccacatatccacattacattaggaacaaatatccagggtatctggagacggaacaaggctttgctgattctttaacattcatcacaatggttctttcatatcaatgtgaatttctgcaatgctatgaattggagcacactcgacacacacagtgttgcttgcactggctgagtgttgcatgggtcatgtgcatggtcaagaacaatgacctactacaggcgcaaatttctcatttagtctttctcgactattataaaaatagaagatctttttgccggtatattttggtacttcatccgtatttgagttggtttttaagttcgttcacttttggaaatacggattcatgtttgagttggatttttaagttcgtttgcttttggaaatacaaaagaagtcgtataagaaatttctttttaaaaaaacttgcatgctaacttgagattaaagtcagacttctaattgcagctcatgattttctaaaataaaatatccaagcaaattttcacagtgaatttcatcctagctaaaccgtataacaataataagattaaaatagcattcatccgttgcaatgcacgggcatattttctagttattaaaaaaaagaaaggtgaaggtatgagaaattgcctaaaattgattgatcgagcttgggagaacaaagctgtataagaatattaaaagccagaaacaataaagattagtttctcgacatcaaaggttctcatacttttgccaggtgcttgagcttcctccttaatcttctacatgaaagtgccatgaattgtgctgtgttgtaagcattcctctcgtgagcctcccagcaaccaagaagcgcaatgctggtcacggattgtctcagaaaatgccgatcacggacataatgtgacaaaaggggtaaatttctaggtactgatcacatttctttcaggtgcgatgtctattgacaaacaaaaatcatatggtatgtgatgttcttcaccccctttgtaatcttccttacctcagaaaatacgaatctatgttcttaggtgttttgtttctgaggtgcaaggtgtaaccgaataataacatatcgataagcttaaactgaatgataactattgaatgcttctttaaaaaaggaaaaaaaacaaggaccatggtgttaggaccacagagtcttgctcattggacaagaacactgcctcaaaggatgcctcttattgtcgcgcccgaaaatcaccctaaaattttatcgtctaaattatttctagaaattgtaaaagccaaaaatagccttcaacaattaaaattcaccaagtttcaactcaaattggcgtgtcggaatttttgtttgttcctcatgttttaaaacacttaaccaatttttactggaattttcagagcattctaaataattttaatgcaacactaacctttctcagttttatctaaaaacaaaaactaaaataaatctctctccctctccttgggccattttcggcccatctcttcccccccccccctctctctttctctacacatgttttctttagaaaaataaatcacaaattcacaaaatgacattcaaagaacacctaaaattcaaatagccatatcttgactatttgaactcggaattgacccgttcaaattgctaatttttccttaaacagtaaagaacccattttaatgctttgctcctgcaccttatatggtttttatttatgttttggccctttttctttgcgtatgtcgtgtagacactgcatatccggaagagccgctctacctagaagttgatcaggagattttggtagcgagcaaggcaagtcatgtcattttgatcatattgctgtcctaatttataaaattatgtttatttaaattattgcatttcgttttattaaaaattcccgcgtttatcactgttttatttagccttaccgattctccttgttatagccttattatttgtattattatgatccttgataactctaggaaaaatgaaactagtgagaactttatatatgtggtgcttactagtaaaattaggaatatgcttagccctggttaaatagaaacaaatagatgttttccaataattagactttgggaataacttttaaataatggttaatatggtttagtggctgtttagccatgacatgatatttccccttcaaaattccccaaacatgttttcagctgggttcggagtgcttgcttttgctagtcgcacctcggccatcataaggaccggtcttcgggccgaccgggcctctgttgcaaagcgtactccatacaaccacctgtctattgggtaagtcttaaccngggnnncccnnnaanatttnnncccggnnnntnnnccnttnaaggnnnttnnaanccccgtcataaacaaggaagacacgaatagggatggatgaagcccttgatggggtcgacgtctttggcttgtatgcccgggtcataaactgtctgctcacccanggcacctggcnnnnnacaagtgggtcnnacctctttgtttagggcagtactaaacaataggttatgtcatggcttctgtccatatgccgtggtggcatgtggcacatggaaacatgtgaggaagacatgtctggtgggtaacgatgtacacctctgatcagagtataatctattcgaatagccgcgccctcgattatgggcaagccgagcaatatacccaagttagagtttaattctattaaaattttaataactagagttatcacctgttggcttgggttaaggtaagatagcgttggagcgcggcttggtaataattttactagagaaaggtttatgttttatttaaatgcctttaaatatttaaatgctttgaaatgctagttttctgcaaaatagccttataaattaattctttgtactcccttgcattatatttacattttcccggcatggcttgcttagtacggtggttgtactcagccttgctcctttttcccacttgcatggcttgcttagtacggtggttgtactcagccttgctcctttttcccacttccagcagaggagtatttcagagatgatggctttgatgtttagctcgtgcctgccgtcaagcgtatgtggtggcccaacgtagcttccggtttttatcgtttatctttcagtgttgggcatttggtcgcccatgtaataaagtactctatttacgcttccgcttatatactttgttatttatcaactttgtaatgtgtaccttgccttctgagataaggaattatgcactcacaaacggaatatagtgttctattttccgggcgtgacagtcatccacatcatgtttccttcactagtcatattcagaaggctgagaataaatgcccaagtgctgccactgttcagaaggcttacttgcttagtactccctccgtttcacaatgtaagtcattctatcatttcccacattcatattgatattaatgaatctagacatatatatctatctagattcattaactaatatatgaatgtgagaaatgctagaatgacttacattgtgaaacggaggaagtatgtttttttttctctttcaaaaaccatttagaccaaggtcacccaacgacagattcaagcagataaccttgtatgggctaaaaggctaactaaaactcacctgtgaacacacgatctcacagtgatctgttgcaacggccttgtactgcaacctccgtctctctcctagacattatatcgaacacctgtcgaacacactgttgcatgccatgtaaacaagcacacgatctcaccacaccattaagaagtgaaaagataaaggcaaaatacacatctgtttgactaatcccaccaaaggatgggggtagtaattttggtattactgcacaattaatctcaccttgttggacctcgccatatccgagccaccggtgtccaactcccagtgtctgcggtgcctttgcctgtcctcgcccggcgtccgctttgccgacgccgcttgccgactgttggccggagccgcggagcgtcgttgcggcgacgtcgtccagcaaccgctcgcaactgggcgtcgccacggttgatcgatccattcaaccttgtgatctttgttggtttggttaatagccaccgagttagaaatttcaggaaacgaattaaccatcactatgctggtcatatatgtctactgaaacccaacaattaatcaaaaacaaaaacccaacaattaagctctcggaattctctttccaacggatccagtttgatctccaaattccatctcagacaatcgtaataacagaaacaaggtgttgattatttaatatgagagagagtatatataccttgcacctatacctttgagatatacaacatagttgcaactcctgatcaaagtttttgtttccttttgtccttcactcgggacgagcaaaggtttaagtttggggggttttgttgacggtcgttatcgatcagcttcgaccgtcaatattaccaaaatagagaagaactagtaatgtttgcaatgcatatatatgttagaataataatattccattagtattaggtttactaaccttttgcagagaataaccatgaaacggaggagaatcgatatcaacacagacgataaatcaatcggacgatgtcgagaatcagacttatgcatgaatgggccaataactcagaattgacacgacaaattgggctaaaattcacaagtctgcggagaagaacaacggaggaggccacctgccgaattagggccaggttgggccggcccctggttcggccgaaccagggggttcgcccgaacccccctggcgccgttggatgcagggttgcggctggacggtgtggattagctcccaatgatggttggagggtatttccgaccattccaaccgtcacaaccgttattgggaggctatataaacccctcaccttctcacttcacttacacacctcaagcaaggctctctcatattaagtttagtagtatcaagctagtagaataggaatagagtagaaatcaggagtccggaagtcttcagaagagttcgggtatggctctagtagctttccttttctcttttgtaagctttgtacttttattagaatactcttctatatacatttatggtattgaaatactttccgagtatataaatgcctactttacattatgttcatgttatactgaatatgctgctagcttatctgggaaatgctttggtgcgggtataatgtttgcttatgcaattgctctatgtcatgacgatgatattagaatagtattgtagtttagacatggtatttagattacgggatatcattatttggggttatatgctgtggatgaaaggtgggccgcagatggtgacagctcagtacgggtattcctccgcgcgtgtatataatcctaagttaaatccttggggagggtactcctccgtatttagccccggttgtatggtcatacaggctgtcgtaaggaactcggcagtcaggggtggcttctcaaagtacgaggagggcatcggatagaggggattagctagtatattggataactataatgtatgtatactatgtatactagaagtataggagtagattatctttctcttttctttccacttagcttatataatatattatgagaatgagtagctactgcttgtgtgtcactcccttggattatcttaacccctgcttaggatttgattattacaagtaatatataaattattagttctctctacatgatcttcccacgggataaaataaatacgatacccttggaatactctcgggtgaaatgctacaatggtatatccgtgcgcttgcggatgaactctgtaaccataatatactagaagtatttctgcgtcattgatgggaattatatttctagtaatgtcgttaagaaataccaacaagcattttcggcgccgttgccggggaagattcataatagagattacctgaactaatactttatatttacctctgtataatcactgccctttgcaggctaaccttggttgttttcactttttactgtgaaaacagggtagtgcatgattggtttcaacttgccagaaaacttcaaagaaaatccagaagctttcttccaaagcgtcaggccgtgagtcgttgctccgcagaaaactctaccggcagagaaaccagccgtactagcgccaccgaccttcaagactatggctgacaagaccctccgcgagctcgctgctccctctgctgacaatgtggccattgggccgcagatcaacatgggagatgtggatttcaacttaaagtccagcctcatcactatggtgcaggctagcccgttctgcggcaagcctaacgaggatgccaacgctcatctgcagcagttcctggagatctatggcacgtacactataaagggtgtcagtccagacaccgtcaggctgaggttgtttccgttttccctcctcgggagagcgaaacactggttttacgccaacagtgctgctgtcaacacctgggacaaatgctctatggtattcctcttgaaattctttccgatgggcaaaaccaatgccctacgtggaaagggacgagtccattcctgaagcatgggaacgacttcaggagtatgtggccgcctgtcctcatcatgggatggacgactggttgatcctacataacttttataatggactcactccaatgtcccgtgactacctggacgcggcagctggaggaacattcttctctaagacggttcgaggagccgttgatctaatagagaagatggtctccaatatgggttgagcgaggtatgcacaccgtcaaggagacggaattacttactgccaagctggacctcctcatgaaacgattggacgaccacgacaaacggccacaaggcaccgtccaggccttggattcacacgttacgtgtgaggtctgcgaccacacgggtcattctgggaatgactgcccagaaacccgtgaggaggcgatgtacatgggcaacaacaacaacggatatcatcgacaaggaggtcaagggtggaaccaaccacgcccgtatcatcaaggaggtaacaacaacggtaacttctctaaccaaccctccttgaaggatctcgtctttgcgcaagctaaaaccactgatacgctaagcaaaaagctcactgccaatgacaagatccttgaaaatattaatgttaagcta

SEQ ID NO: 16344 - DNA, 9362 bp, Oryza sativa
aagcatcatccagtgagtcggctgacaaagaggttcagccagaaaagactgtgccacaggagtactgcaacacacgattgctgccgtttcctcaacggagtaggaaaccgtcagtggacgagcagtttgctcgttttgttgaagtaatccagaagatccacatcaacgtgctattgttggatgctatgcaagtgccaacatatgcccgttatctcaaggatatcctcaacaacaagagaccactcccaacaacggaggtggttaagctgacagagcagtgcagcaacgtcatacttcacaggctcccggaaaagaagaagaatccggggtgtcctacgatcacctgctcgatcggtgtacatcagttcgaccaagccctatgtgatcttggagccagtgttagcgtcatgccaaaggacgtctttgacaagctcaacttcacggtgttggcaccaacaccgatgcgcctacaactggctgactcgtcagtctgttacccggcggggatagtggaggaaaatatatttttataataaatttatcttgggttgaaaatattattttttctataaacttggtcaaacttaaagcaatttgactttgaccaaagtcgaaaaatcttataacctaaacagagggagtacattccgatgacttctagaacacaagaatcaaaatcagtggattggtcaccgcgatcggcctgcagcaacctcatcgcgaggagcgaactgccagccatgacggacacccttgtcggtcatcttcgactgttcgtacggatcatcttcatgatggtcaggttcgaggcttagagctcctggccagcacgccaacgcagaagcaatgttttaggatcttttttagtgtacctttggttcgatgtggaccattgaacggatgagataactccttgctactacatctagtattagagtgtagtagtgtagtagaagggtaattgtgaaaaaattattatagcattattgtaaattcaccattaggattaggtgtaatatgtaattgctaatgggatcagatcgacgctaggtttaggggcatcagccaggaaaatgcttctcttcggatgtcctatcagatacaaaacatcggacgcctaggaccagctcactcctttacttactagtttctcctttctctatgttgacgtcaggaaaatgttgcaaatcggtagcatgtgaattggacgaacccctgtcagtgtaaacatacatgcctagccgtttcttttcattctttcctcatctctttaaatatttttctcctaaattacttatccgatctacgaaccgatcacactgttgtattcgttgcaattaaatatttacaacaagatatcacatgattatattatgtcaaaagaaaaacatgtgtttcaaaccgttaaaacaaaatgtttcatacgtgatagtgatatgtttcaatatgtgccttcggtgtgtttcacaaaattcctgaaactacctgctactactctctccccacctcatgcatgcatgcatgtattttagcaagcttcaaaataatttttctcttaagttacttattcaatctatgatccgatcataccgttgtattcgttgtaattaaatctttacatcaagatatcgcatgattatattttgataaaagaaaaacatatgtttcaaaccgttaatacttgttgtttcatatgttacagcgacatgttctaacgtgtatcttcatcatgtttcataaaatatttaaatgtttcagttgcaatttttttgtttcaccatatataacataatgtttcacttgctggtcaactgcaacatttaactgtccgatttttttttcaatttaaaaaagtttcacatagtgtactcgtaatgtttcactatttatggatcaaatgttgcagtgaattgaaacatcatttcactattcgctgaaacattattttcatataaggtgaaacagcgtccgatgaaatattttcgatctacttagtgaaacaattctgatatacttggcgcaacagcgtgcatcatttaaaaataattcaataataagctattttttttcatcggattatatttatgtgtggtcttgttttaaagatttaattgcaacggatttaatggtgcaatcggatcatgattcggataaatattttaagagaaaaaatagtttaaaccttgcttaatttatgcatgatggatggctggcacacgctgcatgatggggatggttggcgcgtgcgtggatcagacggtcgcgtgaggcgtccgatttttcgtctcgcgccgtacgtccaacacgtagcgctcttccatcagccaggcctttggccgctcgccccccacctctcggcggcgctcccggcgtcgcctgcccacctccctcctcctgtaacaacttccggcggcgcccgtccccctgcgcctacctcccggcgccacccctacccccggcgtctccccctccccccttcccccctctccctctcccggcgtagctctaagcttaactaggtgataccccacgctttgctgcgggaattactaagtaatcttcaatatgatttttgttgtgtgaacaatcgagctattgacaacaaataacgggtttgctgaactttgttataatggagagaaaaattgagtagaatatgtaagaaattgtaaataattatctgcatcgcaagaaggtaggaagaaaattgatgtaaaatcgaggttgttattctgagaacaaaatactccatattacatgactcgtagtaattgttaaacatatatccaagaaaatttgcttatttgttgaaataattagatcattgcagtcttgcagataggatgtccttaattatattcttgattgtatcaaaactggaagacgacttgtataaagatttggtccaattagctaagagaactggatatcgacggacctggctcatgtatttgagccataaagaaggtggagaaatgaaaaatctgttggaaataatgcatacttagccattaattttattccaagcattattatttgaaagcatatacagcaagcataacctacttgcgacatgataggacaagaaaaactcataaattctatcatgctagatatcaaacaaggcataaataaccaagccaagtaggtcattaggctaatcacaatgctaatctagccgcaatattttaatctagatgaacagtaccatgcatataaaaaactcaggtacgaacaaaactagattagaaatgcaccggttcctttcctttgtaaacgaaagaattcactcactgaatggatcgacggagatcagcgagttgaagcagtgcagtcaatcgatgatgtcgagcggccgcgtagaaatacgctgcccagaaacctttacaccgcccccgtgcaggtgcgaatgcggcgaaggctcggagacaccgctcgccggaatgctcgttgcacgacgagcaccacggccggcttggatcgacggcgacgcaacacgacggcagtttaggaatttcagagtagatggctattgtgttctgtgtccttcaaagacgtctccttgactcctatatagagctaacactgaacggcagcccacgctcaatccgttgctcctccgcgtcaaagccggatcggctccgtgagaaacgcagccgccaaacggccacaagcgcacgttctctcttcacgtgagaaccaagtcttcaggtgattgactcgatcagcagaggttgttttatgcaagcatcttgtcatccaacacatgctgatcgtgcggctaagcattaggcatttaaattgatgaaatgatcaatgtttccaagcatgttatttccatcaaaatcaacaaccatttttacacaaagtgatgaaaacagtgatgataaaatggagtcaatgaagaatcattagcaaccattatcgttttgagaatatatatagcaaattaatatgaggatctagtgaatttgattatatatttgatggtctgattcggacaggaaatctgtagtaacaatactctttcaagtttcttcttcatgttgataaactttgacatgtcaagtttagtgattaagtaaacacataaatacttgctacattcaagaatgaaccacatgttacccaagaatatgctgagagcgctcaaaatatggtttatctgcctcaccaaaaaacatatagagatgagagcaatgtaattttgaaaacatgtgcatgatacaaactaatagaaacaggaaaaattacataccgtacatgaaaaatccttgtgtccaactcaagcaaaaaaattctatgcagatcttgtagtgaaaagataattgttctccaaaagtttcatccaagattgtatatccaactactcatgctgaactgttgtagcaattgaaaggccaaagctgcctatagcatgctctaacattaattcacagctcatcggtgaaaaatgtccgagaaaaccatgcgcctgcaatggagaagtgaatacaaaatccaacatatttccttgtgatgcaacatgcaagcagcaacaacggacacctaaaaagaggcaattgaatttaggtattttatcaaataactttgcaaacaatacaaagtgcatataaaacggatgcagggcattttatcaaacacatagtgcacatatgattggttactatgcatacctgtgccaaaccggatgaggctcctgacagacttcctctggatccaaatgatttgggaataggagtctgtccaacaacgcgtacttgatctaacggggactggggaggcaactgatccagagcttttgaggtgactgatggttggtataggatgatttgaaagaggttatgaagaggattagttgggttaattacggcacctcatcttcgcgtaggtggttgcagtttcttgtcactgatttacttcaaagagaaaacagaacatggcgcagttaatagaaggcgatgagtcgtggctgtggcatcgttatgggctgggccaacggaaaaacgtttcacgtaacagaggctgagtaggatgggctggtctggcctggcccaatattgttgaatgtcgatctaacgtccatccggagacctgcaaataatccaatggctcaagagaaaaggatgacgtggcgcaatgtggtgcaagctttatagtctagtgggtaccaactatataggaagaaagaattagctctataggaagaggccttagtttgaagcagattgggcctgttcagtagccccttgactacagttgtacagctactacctccgtcccaaaataagtgcagccgtggatattcgttcccaacgtttgaccgtccgtcttatttgaaaaatttatgaaaaatttgaaaatatttagtcacacataaagtactattcatgttttatcatttaatagtaatgaaaatactaattataaaaaattttcaaataagacgaacggtcaaacgttgaacgtgaatagtgcaaaactgcacttattttgggacggagggagtatatctcttgtaatagactagttgccgtgtttcttatacaatagctgtactgtaggtgtaactgcaaccgctgcaccaataatctaagctgaacatgctcattattgtgtggattgtacacaacatttgcctgattatagcgataaattaaatattttgataataaacttaataaatactagaagaatgtattttaaggaaatatattctttagtcgtgaagcaaataatccggcaaataaactaacaagaattgagaaattttgatttattttttttcccgctgacttgactcatgtattggtatcactggaccagccgcttttcctgcaggagaatgggatccggatcaaacccgccacgcccgcatggacgcaatagtcaactagaagtcagaggatggccctgaccaagagtactacgactatgaataagagtatgatgcgcaaatacgcaatagctttgaccaactcatcttcctggccccttagcgcgtactcatattttagcagcaggttaatcgagtataccctatactactgattaatcagcccaagtgtttggatccaaactttgaatccaaacttctaatttttttcatcacatcaacctgtcgttttcagtcacattgtaacaatttcaacccaaacttccaactttagaagaaactaaacacaaccaaaatttcaacttataatctctccaaagcatcgagtactgacaatttctcatctcgagattcttgtactgacaagtttttattataaaaaaaggaaaaaaaaatcgtaaattagaaggcggcgcctacaaattaagcgagtcaaacattttggtagaatgcaagcaacggacggcagatgtcgcggaccaccttaaaaccatactcctcgatgacaagagcgaggattaccactagttagctttgtaactaggagcctaagccagggaggagcaatggcgagctcgagcttgtcgcgccgtgccctcctcctcttcttcttggaggtagccgtcgccatggcgctgcttcttccgggcggtcacgcgcgagtgtgcccgccgtgcggctcgacggaggtgccgtacccgctgagcacggcggacgggtgcggcgacccggagtacaaggtccggtgcgcggcggcggcggcggggggcacggcgcccacgctcctgttcgacgcgctcaacggcacgtcgtacccgatcacctccatctccccggcgtcgcagcgcctggtggtgtcgccggcgccgttcgtgtcgccgggcgcgtgcgtgtcggtgggcgcggcggcgtcccgcggcgtgcagctggacccatcggggccgttcaacgtcagctcgtccaacaccgtcatgctgctcaactgcacggagctgctgctgcggtcgccgctcaactgctcctccaactcgctctgccacgcctacgcgggcgccgcggggtcgacggcgtcggcgtgcgcgccgctgccgctgtgctgcacgttcgtggcggggggctcgtcgacgtcgtaccgcatccggctgggcccgcagcgtgcagcgcgtaccggagcttcgtggggctcgacccgtcgcagccgccggcgacgtggggcagccgcctcgggctggagctccagtgggcgacgccgagggagccgctgtgccgcacgcaggccgactgcgaggacggcgccgccgccacctgcgccgacgacccgtcggcaaccggaggcgcgggcacggtccggcgctgcctgtgcgtgtccgggctcgtctggaatcccatcgctggcgcgtgccagcagcagagtacgtttaatttttttgcttcgacggctgacagctcggctgtgaggcgcctctaatttttttttatggctgttaattttgatgcagatctcacggatagcggatccaaccatgcgcctctcattgctggtaattatattgcttccttccttcagcgctagctagcgtcttaatttcttattactgtcatcctgggaaattaattaggacctctgttctcgatcgggatgcatgcttgacgcctactatctagttacgacttcaatttgcaaggcgggcgactagccgcttgcttggttttaacggagagagatcgaattgtggagtcgttattcgttgctttggtgaaaactcagtgattaagtaggccgctattacccttttgttagttgttactgcgagtagttactcgctccgtgcacaaatatgaaaatttctcttagcatggagtaaaattaagaaggaaagaatgaggtatggataggggtagaagtgtggtcgttggggataagacgaaaataaatttaaacgagagataaatgattgatgggacacatattattttaaaatctttacatttgtgaataaattttaattgattggaatgtttataatactgaatttttaaaaaaatatttggaatgcttatatttgtagatagagggggtcgtagtattatagttatctgattatgaataagaaataatccaagcatcgaatacatatcaggagcatggtcaaggcacttagtcatttttattcggtatacaataagtaatccgggctgataaaataaaattgaggtcaatgatctggattgaatataaatgagagatcaactgaaagtaggtttacatcagtatcatgctgggtcccatactcccttgcgccaatggtcaacttgcggcggcttacatccggagaaaagcattgaccataccagagcaagtgtaaatctacttaactccatccagagagctagcattgtcagctttacaacacggacgaaccaaggaagttcaacggttggaaatttggaatgagttgctgcacgatttagctcgctttggagtttgtacgaattctccacgcgaaacaatttaactccttcgtggagcccaaccattaaatggatgtaccaagatttttctttgaaaacaatacttaataaataattcatggaggccacatcttggatagtttatatatgaaaattgtctatcctgtctcatggtgccacatcaacttaattaattttttctagatttgggataatcgattgatcaaagttccaaaacatataaaatatatcaaatcaaaccatgttcgctaatcgctacaatgaaaatcaacacaccacacaactcattttaaccattgtgaattcggtagatgtaaccttctatcccacggtaacagcagcaacacacatgtaattttcatctagctggttaaatatagggtgaatagctaatttagtccctcaagtttcaccgaaggtttaatttggtctttcacgttttattttgtccatatagctcctctaaatatttgttttggcttgaaatcatccttgggtccacttaatatgccatatggctatttccagtcaatattcctattagaaaatatcctttttgcccttaatttgtatacaactatacactagaaaagagaaagccaatataaataaacaacattacatatgtacttcccattatttcaatatgtgcacatgaaacttaagcaattgctatcgtatacacttgctagtacataatttatttttattttacataatatactatgtattatctataaaaaattcaagcatgcaatttttctcttttatatatatatatatatgtgtgtgtgtgttatttatgaagaaaattgttggttcaaggataaatttgaactaaaaggaaaacttgaagtacttattatatatagatagattgaaatagaactaaactaagcctctgatgaaactgatgaaacttggaggactactttgactattcacccttaaatatagatatttgatgtttgtt

SEQ ID NO: 16345 - DNA, 12990 bp, Oryza sativa
gccaccgccaacttctcccgcgacaacctgctcggcgccggcggctacggcgaggtgtacaggggcgtcctcgcggacggcaccgtggtggccgtcaagtgcgccaagctcggcaacaccaagtccacggagcaggtcctgaacgaggtgcgcgtgctgtcgcaggtgaaccaccgcagcctcgtccgcctgctcggctgctgcgtcgacctggagcagcctctgatggtgtacgagttcatccccaacggcacgctggccgaccacctgtacggccccctcagccaccccccgctcccgtggcggcggcggctggccatcgcgcaccacacggcgcagggcatcgcgtacctgcacttctccgctgttccgcccatctaccaccgggacatcaagtcgagcaacatactcctcgacgagcggatggatggcaaggtatccgactttgggctgtcccggctggcggagcaggggttgagccacgtctcgacgtgcgcgcaggggacgctgggttacctcgacccggagtactaccggaactaccagctcaccgacaagagtgacgtgtatagcttcggtgtcgtgctgttggagcttctgacgtgcaagcgcgccattgactttggccgtggcgccgacgatgtcaacttggccgtgcacgtgcaacgggcagcagaggaggagcgccttatggatgtcgtggacccggtgttgaaggataacgccacacagctgcaatgcgacaccatcaaggctctcgggtttcttgcgttaggatgcctcgaggaacgccgccaaaaccggccatccatgaaggaggttgcagaggagatcgaatacattatgaatatcgaggccggcaacgctcatctcaaggagctgcacagcttatgatcagtggtcaattatattagttagtcaaacaacccatataatgcacgggttattatagtttttctttccgagttttctgttttgctagtgtctcctcacgtttcaaaagtaacgaatttactctgtggagttttccatttactcttaggcagggttgaaaatttcggatcgaaatttccgaaattttagaaatttcggttctatcggaccccaccatatgatattatttcggccaaaatttttatttttttatgatttagtaatattttgtttaaattagatcaaaatttattaaaaaaattcatataatttcggaccaaaatttccaaaatttcggtatttcggccacccccaagtacaaatgaccaaaccgaaagattaaaccctgctcgcagctttctacatctgcttattcaacagtaacaaatttacttgcatgaatgcgccccacatcagggttggaaattttggtcatttcggacccctccgatatgatattatttcggccgaaatttttcaaattttttaatttttcgtgaattttggtaatatttgttcaaattcaactaaattttgttcaaaatttcggaaattttggaccgaaatttccaaaatttcggtatttcggtgaggtccgatcaaatcggctaaactgaaaagtttaaccctgccccacatcatacgacaccattcctagatggccataaaataattactatcagcttacaacgctagtaattcttttaccagtgttataaatattggttagacttcgtggtctgcgagtaaaataattaccaccttcctctcgatatagcccatgatctcgtagccaccgtatagtaatatgtttattgatgtgttcaatatacagtataagagtaaaagttgatactaagaggattgttaatctgtatcacaaaatggccatatgaatgaaaaaaaattataggctcaatcacacacgagggatacaattactcacaggtgaatcaaactagaaaagaaaaaaaaatgatacagccaaaaattcatcgtgaagctaggatcctggtggctttgttggatcttgctataaggatagagaggctggtctgtgtcttgtgatggtagtggatagtggagagggaaaccgggtggtgagcggtagtcgacgttggaatcatgaaaggacatagtggcgtggtataaagatgagctcgacgttgcgcagtagcatccatccatcatctagcaagcacggaaaaaatgcaaaaacattctcgttcatgtcatagagacgacgagggaaaaaaatagcaaacaacttccatcaccggcgaactccaccctatcctctacggccaaccacatggagcacgatgtgcaaatgtaagacctgtgcagccgatcagatcaattcagataaggtaatattggagattacacgttaatttgatttgcaaacaggggcttcatgcgtgaaagtgaaggagagtatgtagatgtaaattgaagtgtcatttccttacttgcttgttctgtcaatgtcaccgacgtggagcagccgccggttattgctctcggcctaggtgaacacctccttgctggttaaggtactacctagcgtccggctgcgaggctcgaagcagcaccttcgcctcaaccgccaccggccaccaccgtcaaccgccacggtgtcgtcgtcctcctcctcctccatggtgcatcaccgatctgtgggctaggatggtggatcaattcagataacccccccgccccccaagaaaggaaataatgaagtgagggcgagagtggttggttgggtatggggaaaatataatatatactggaagcgaggaaattgcttttatcgaaataaattatttcctccaataatggtgggagcgggatgatgggacgtggggtgggatcggatgcagggaagttgtttttatctaagtaaatcgtttgctccgataacgatgggagcgggatgatgggacgtgggtgaggtgggcctgcgctgatacatgtttgacacttgctatattaggagcgcactgcgctcctagtagtatctctatttgtttggattgtttttaacgttgattatgtttttcttttaattacctttgcagcatataaattctaactaaaaaagttgatgttaaattaaagatataatgttgttctatcataaatgaacgctaattgttctcatttctgttaacaactattaaaaagctttcatattggttcatactattatttcacacgcgttgtgcaaaatgtatatgacaataaaattgatcaaaattgcctcagcattcactaccaaattaaggatggattaaaacttagataccattgcttccgtataatatataggcaaataaatcatccacataatttgtggctagctagcatatatatcatgattggtacggtgagagttagaattcttctcttccatctgttcacttattttcttcgaaaatgaatttaatttgaaatatgactgcaactatatagatcgagcacgttgatgtgctatagactaaagcctaggtttattgtttgaattacttttcctaactaacattcacgtatttagtcattaaaatatttaaatcaaaactatattgtatatgacgaccgggtcctttatgctaaaaggcaaccttttatgcaaattaattcttcaaacatctaattgatatatgaaagaatttgtatcccttttactcataccataattggattatttaaatatttctcgaaagtatcttcgaattatttttgtttcaatcaatttagtgtagatattagttttgtacgacctcgagcttagcattattggcactgcttcaagcatgtcgacagtctgtacacgttcccaatatcaccctcagcttgctcgcccgccaacgctaacctcgagttcgctagcttgccaacgttgcctccttcgaacctgcctatggtatcacttccctcgagtttgggcagtttgcccgatgttgttgacactgctacccatgttgcacactagcagacaccactactgaaaaattgatctttgctcggtcgccccaaaaccacaatagtcccagttataaaaagaaccgggatctttagtttcagtttaaaaccccatagccattctacaatctttagtcccgattggtaacaccaaccggaactaaagataatctttattccgattcatcccctgtcagcccctgtcagtcccttgtcagaggtgcacctcgctcaacctcacatgtgcccatagccatagagctctgctattgctacgatcggtatatatatttttattcacacatggttgtaatcaagatgctagtttgatgtgtctaatccataaatcatcgtcgagctttgcatggttagcaaattgcctgttgccggcccacatgcatgctgttggttgccacttgtgcttcacttggtggattttcatggtgtttgtccgattttgaaaaaaaaaaacttatcttttggtttaatgtctcgagtgatttttttaaaagtcggaacacgatcttaaattgatatatgatgacacaatcttaaatttattgtcatttttttataagttttgatgtccgattggatgacatgcaaattgccaaatacatcaaatatatttttctacttttttaggatatatctttctacaagttaaaattgtacgtgtaaactttgtcttaattttctgtactactttgaaaagagtagtagtggtggcagcgaatcatccaccccacctatttccattgtaatttaacaatttatcccattaacttctctgtattaaaatcaattaaatctaaatggatagccacatataaagttaaattaaggtgaatattccttatagcaaaatgatagataacacgtttcatggagaatatatcttttatttattttgaatattattattatatttcttttaccctagcaaagattcagctagtctattatatttataaatgctagtgaagtggtatatgatgaaataatatatagtatctcaaatgttcgaatgacttgcaaaggttctcaataaaaatttaaagaatatacatttttacaagtgaaacaatagtcaacacgtgtcttaaattcaagttgtgattttaatcataaataacacaaaaggtgcaaatagataaaaaaaattgaatgtataatttaaaaattaaaagttataattatttaattttattgttacaaataatatataatctaaagttattgtatttaaaatttttcgttggaaatatttccgtaatgaagggaaaaatttaagaaaaataaacggagaagacgttcgtaagtgactggatcctctcgtacgggtatggcatgtctcctttgtttttaatctaactagctaggtggcccgcgtaattacgcggctagcatcatacaaaattttttaattttttttacacgtggttttctttaaaatttgttaaatagtcatctcgttggcttaggattttgatagactgaaccttatcatcattgggtttttaattttatagtttttaaaattcatactagccgttacctcttactccttttctatcgctttgtttgcttccacggtccgccacgatttctacttatgcaccatgaactttaaagatcttatagctttaaagttcagtgtcacatcatttttatttttatattttttagaagtactatcaaacgtcgccactgtactcctttacaatccgcccgctgtacccctctttagtgttattttgatttgaaaaatcaaacttgatcaagtttggtttcttttttttttactttctggaagtcccgtcaataactgcgacccaacttctttatggtctacccgccacccctcctcttaattgtcattggtattccaaaaatcaaacctaaccattattcgggtgttattctatagttttaatgtcacatcaaccatcatcaccatactcctttatggctcacccttgtgccccctctctttagtatcatttgtgactattgtattctagatagattgttcttttaatattccttatagtttatttcgaattttttatttctaaattgtattcctacttttaactctttttataatttcaaaatttatttttatttttattccgtattttgattaatgttgtattgtgtttaacctagactgttctttcattattcctaatttttttattcccgcacaattgcacggctagtatccatacaaaattatatatttttataatgattatctttaaaatttgttaaattcttattgtcttaaaaaccttatcatcatcaggtttgccgtccctttgtttacttgcttgacctactatggttctatttatccttcttggaacctcaaaagttttttttttcgaattttagcatttccacgtgtattcttacttggactcttttttctttatctaattttgtattttattttattttttattccgaattttaattgtgttgtaaatggactcttttttcaatattttttatcccaaatttcaattatttcttaaatgtattcctacttgaaattttatatttattttttaattttggaatttattttattttatttcaaaatttaatctgtcgcaactagatttcggcaatactaaaaggggtagcgaacaagcaaggaaagtggatgggttatgagacaaatgctttacactggttcagaccttctcgatgagaagtaataccctactcttttccagggaaatattccggcgagtgtgttattgatctaacgatctgattgtggttattattctcgccctcaacgagtgcccgacccctccttatataggcaaaggaatcaggattacaagatagagacttcatccttacggtataaagctctacatatactttacaattgtaaccgattgggactaggggatattaccttgatacacaagttaacataatacccgcgtccttttatatacatattctatccacatgaactatcccctatagcagttagatagcatagccatgtgggtatatggtacccataatctccacagtagcccctaagaccttcatagttgacaaaataatcttctaccgagtcatctgtactaatataaaaagcaccagttcatcaaatccagatgttttctaacctttagatctaatcatccgacagctcatatcaagagttggatcaaccactgcgattaacgatctcccacgtctaaacagtggttagggatcgatcaaagcgaaaaagaaaacgaaaaaagcttctttgctcgccgcctcctcgtgcagtcgcgcgccctacctcgcacgcaccgggcgccgctgccgactccgggcgcgcgcccgccagagccgctcgcgggttcaccggcagaaaatcacgcacgcaatttgtcaccccgccgccgtcgcatgccatccttcgcacgtcgttgcacccccgtccccctccaccgctgacttcaccccgcggcgcggccgctacaagtcgctgcagccctgtcactccctctccgttccctcgcccatcgtcgcgcccctgtcccctccgccaccaacttcgccccgcagcatggccgctccaatccgccgtacccgtcccgcacatcgaccatatcccgccccgcgtcatttgccgcccacgctgcctccggatcacccatatccgacctccagcctcgtcagattggcgccgccgccgaccctaagcttgtcgtcgagcattcaccgtcgccccatctgccccccatgccgatccatccctagcgccgtcgccgattcaccaccaccaggtcacgtccatcgtcttcttgatttgctccttccgcttcttatttatcctttcttttgttgatttgatcagaaactttatcctttcttttgttgatttgatcagaaacggcaatgaattttattttaacagagagagggggggggcaggggagggggaattgattgaaaaaatgaaaactggagtttgtttgagtcaatcaaattcaaatatgaataaacatgggaattttctgtttctttagctaggccatgtgcatttcacatttgtaatgttgatggaaaagctacagataggggcagagagtaactggagaaaatagaaatagaaatagaaatgagtagcgatgttagtagcgtacatactttacgcaagtcaatgaggatcaagaggaggaggaggcggtatcctagctaactggtcgtctcgtggaggtaaaaaaaatttctttgattccggcgaacctatggctatgtttcgttgataacttctaaagttcttcctgttgttcatcctgctatacatggtgttcttttaagtctttcctccaatcgcctccttatgttctattataccagtggtgccgtaccaatggctatgatgtgcagtccatatatagaatcaatcactgaaaaaaaatgagtttagataagtcacagccattaggactatattaaatgagtaatgaatcattgtatttgcactttttgcagaatcatggcagtaattacatggtcaggttgtgaccaaaaaaaaaatcagagatacatatgctcaggttttgatcaatgaaccacttgtagacattctcagattttggcaaaaatgcacagatacactacaaactcaagacacgttctttgaatttctgagtacagacagcgaacacattcagaatttcagattgcttcatcagtcatcacagaggacacaaattcagaaaagccctgttgtgagaaatgatgattattgacacttcttgtgtcttaaggtaggtctccagcctctagccactcgatggtatccaaaacaataagttttacgggcttatcaagtagcaacaaatcaggaacctgaacaatcaatttaagaatgtaaatgcacacaaaaaacataaaatttcaattcgatcactaggataaattcaaaaatccagacccaattcataaaatgatgcagttagtacgaaaataatatatctttaaacgatatagctagctcttgtcatgattctgatggtcatttaaaatatctatttgtcaagattttataagtgaacaggatcaatggcttaggttgctttcctttgaatgtagatgcgcgtgctggcatgatatttagaaaataggttttcccttgaatgcacattctattagttaatttaaatgaacaaaatctttatgcattttttcattactttcgagagaagaggacactgtaacaaaggccaatatagaggtaactttctgattgttatatacatggtaatcctggcggcggctatcctacccacgacgaggctacccaggtttttgcttgactccctgattgattcaggttcttgttgccaaaccattctccttcggggtatcagggctactccagcgaggagcagcagccaccttactactaccttgccgtcgcacaatttctgttcatctttttactggaagttatgctaattgactaaaactgtgatggtactacacattgacttgacaattgacatatgtattgcctacaatgagggttctgtagtaggtgcttgatggaataccccagtgaggaaatttgtttttgttctgtaccagagaaaaggtagcgaggagatctgtgagtgaaaaaaaaataacagttcaatgtccaggccacccctttatatttaccagttgtaacttcctcttttgattgcattcagttgactctgcaaagtactgcatcactaacgtctgtataaacctaaagttgcattcaagtgtagtgtttttgaacttgttgtggtctatgagatttattctgaaggattatactgatgatgatatattggtgtgctttggatcaggaaggctgtctcatcctactagtcaatcaaggggaatctaattggtagtataaatatcagagaattaggtgatgatcaggttcaacatcacagattcagatattctcattttctgtgttctttaaccagtggcacaatgtgtgctatcagtgtaattaaaatagggatttcttaatatgtattgctctttggatgatttcagtatttcaacgagttcttaatagacctttttttttcatctgtgcatgcaagaggatgcaacctacttgggatggtggcacctctagccataggtttggaggagggcaacaagcagatgcaccaaagggagctcaaatatgaggaattatgtggcaaaaatagcttgctgaagaggaatcttggtaagatatgacataagttcagaaagttaatcactgctgcaaccatctctggtgagtctttttgagaaagaccacataggaaagggacgagatgagcacttctagctacagatgcttaggcaaagttgggattccatacaaaggaaatgtatttaactttgtatgaattgtacatatgcactaaaaaacatataaatctgctctcttatgtgtggcttcccaagtttgataaactagccgtcaacccgtgccttgcacgggttattggtattggtagtataaagatcaaaattttaaccatacgttcactaggttggccatattcgaattgtagcatgttagattgaaataatagttaagtactcctttcgtcccagaatataagcatttttagagttagacaacggttattaagaaagttggtacaattaaataggggagtgttgtggctgaaggagaagtggagatagctggaaaaattgaatggtagatgattgtgattcgttaagaagagaatgttggtggtaaattgttatattttgggacaaattctaaaagctagaagttgttatattttggtacggaatgaatactacttgttaattattaattttgaatcaaacaaatgctaaatttgtgatacatccaacttttttatttgatattgtggaattctggaattaattaagtatttagttgagtctgtggtcgagtttaaatttaagtacaccctgtaatttaataattttgaaattaaaaaaaatagttatactcagtatggatcctagaagatataagatatatgtaattagcttttttgttttatcattcccaaaactcataataataattagtgatctatagtctcttgtctatttgtaccggttaagtacaaattaaagagtccacgatattgccaattgcatgttttattttttcacaaaccctaaataaaacctaatgttgtgattttgtgattttgccacgatatatgctatttaacgtgaatttggtcacgtctatcatatcaagcctagattgtttactctggctgaaagtaatactcatatgaacctacgtagtatatgataatatttgtttacgtgcatgattattcgcttagtaggtttctagctagttcaaatggataaaccgtgtgtatgattaattctgaatttcgttctctttacgtcgcatgatttattatcgagaagaatatttatcccaaagagtcaggattgctaaaattatgggggtcttagtttcagtcacgtcatgtatcctatatgatactctactaagtatgcttctctctatctctctcatttcctcttccaagtagataataattaaattaattttactcctaattcttataaactgtgtactaaaaaacaaaaggtaaatattgaaacttataatgtaattatagtttatgttttgaaatttagcgtgtaattaactacaatgcaagtgtatgcaatatattgtagttacctttcggttttcataaaagaaaatgtatctccaaattaggctgctaaattatacttgtaaatgaagctctatatattaactgaaatacttgttaggaaaaattgatataaggactaacccaaacgaatgaacatgaacactgaacagaaagctgcaaactacatgtacatatgcattgcatacgggatataccgggcatatggaaaattaaatatagttgattgcattcagagaattatagatcaatatatttttatctgcttctactgtcattaaacaacttgtcaaaatcagaattgacaacttagaacttgcaagtttaatggaataaaaaaacacattcaatatgtaaaagatgatcagcaaatagttgatcattccaatcaaaaccataaattgagtgcgtcctaattaaatagactgctaaatatgtattgcaaattgaacatgcaaaccatgcaaattcaaaggaatacatatatatgtatattgtagatgcagcaatagatctgtagcagatgcagtgacggatgtgcaagtaattttttattttgtagcaaacttttttcccccaaaattcatttggttaaatttcgtttcaggttaaaatttattcaatctttatggagtaaaaacagtacgtcaaaccagagacttaatagggatgaacgatacctctggagcgatcactgattcactggaaacttttaacttctcctcgtgattgaggcaaattgtcgctgatcgggaccacagtctgggatcaaggtcgactgcagcctatgcatatctcgtcgccctcgctcacgtccttctcgatcgcgttcgccgtttctttatcgcttcttaatttccaatctgatttctcacgatggaacttggagataaattagatgggttctgtccttccatcgataactggatagataggatttgcaaggagcccactgagtttaagattgattggcccacgatgttaaagtattgcaggatctacggtgtagattaaacgacttatctaattgacgcttagatctttctggttaacgtgagagctccaaaaaagtgcccgattagtataggtatagattgcccaatttgttctgtaaccgcaagatgccatgaactatatatttaagaacttgtttcacaaaactatatatttaagaacttgttttacaaaactataaatttagtgtactcgtttatcacagaactatacatttagtgtcttcatttatcacaaaagtacaaatttagtgtctccattatcataaaattacaaatttaatgtcttcattatcacaaaactactggtt

SEQ ID NO: 16346 - DNA, 1837 bp, Oryza sativa
cagttgtcttttgagctgatagaatttttgctggtgggtctcacgaatctgtcttccatagttattaggatcaaaccggatcggcggtccgaccggggaaaaccaggtcagaccgggctggcttttggtgatgggctgaggcgaggcccgctgagcaaagtccaccaaaaatcgctggaaaaggatggggattcgaccttgggcagtgacctatgcctcccctatcacaaaaacgacacccgtggcggtcagttgtcttttgagctgatagattttttgctggtgggtctcacgaaatcgctggaaaaggatggggattcgaccttgggtcgcacggttgagagctgcacgcgctacccaccacaccatcgcttcgcttctgttggtctaagacattaatcctataatactttaaatcgcggttggaccggccgaaccaccaaaccagtgaaccgagacctcgaccggctcattctccggtccggtatagaaatcttcaagtaaactatgctgtcttcaagtgtatagaaatcttgtgaccgccacagttcatagaatatactttactcccttcgtttcatattatttttttcactcaaccagttttagctattaaatatttttgtttcactgattcaccagttgcacatataatagttcattttcttaaaaaatagctaccatatgtacccacgtgtgaaaaccctgttttcgtgtgcgatttgtgctgcccatatggaaagatactaaaaattattttttatagtgataagcgcccttatagcaaaaaaaatatttagacctagtagcctgcaagaacaggttttagccaaatgcgaaaatcattttttatagtgataagtgcccttgcaacaaaaaataaaatctttataccacaccaataagtaattatatcactacgtgaaacccacatctctatcatatgttccatccacaacgtgcatgagacccacccaggttcatgaaaaaaggcccccaaatatccatcatctaactctccgccaccgtacaccaaaaaaataacatatgtaatttggatttcctatcacaacgcacgagcatgtttgctattcttaaaagaaagaaatgagagagatgaaaggaaatggttcacttgaggtgccttatcttgaagtcgagtttcgaaattgaccctgaattgaaataccagatataacagatccctaatcttgcaaaaccgggtcacattaggtcccaaggcagtattgctccccggttttggtgacgtggtggctgagtcagcgtggggcccatgtgggtcccacatgtcagtccataatcttctcccacctatctcacctttcttcccttctcaacccaaacctccagggcagccgacaacaggtagggagaagagtggcgactgacggctgcgtcatggacctgcacggcgaagagcgcgaaaaagcgaagtaggaagggctcccgacacatcgtccccttgggttacaccacaacattgttgcgtggcagctcgccgcgcatctgcgccgtgtccgcattgtggtcgcatgtcagccacaccgtcgggattggtgagagaatctccaagagttgggagatggagtacgttgcgacgcctgagtatactcgcgagcaccactgactccatgagtgcccgtgcatgcacgcgaagaggacgctagacgctgaattgcgggagaggtgtgtggtggccggtgaccagtagggagaagggaggcggtcattgggcggcggcggtaggtagaagcccgacgacggcgcctggcgattggtgggaataaggttggcagccaacaagaagcttggcggt

SEQ ID NO: 16347 - DNA, 1264 bp, Oryza sativa
aagaagattgctggttggcttgtggggtccacgtgggccctacactgactcagccgccacgtcaacaaaaccggaaagcaatactatcttgaattaaaagtgatccggttttacaagattaggggttgaggaccgtttaaaactcaacgacaagataagggaccttagatgaactattttgggagacgaaaaaactccagcctcatgggcctgtgcataagacccataggcaggcgacaccgcggcagccgagcgctgcacgacctctgcctccctaatccgtcccgtctcctcgcccgtcgccctcgactcccgtctcctcgcctgccgatctccatcctgctagcagaggtggcgccggcgtcctcctgctcccgccgcatttgcatcctaatccatcccatctggcctcggcctcgaatttcgtctcctcgcccaccgcttgcgccgatccccatcctgcgagcagaggtggagcccggcgtcctccttcttccaccgcatcgtcgttcgccggtgagcatccctctctacccatacctcatcaggtattctgcgttatccctcaaaaagtttgggggttagatctgcctctacccagctccacctactttcaagttgttaattttgatttccgtttttagctgatgtaatttggttactgaatctcatccaaacacccttagaacgaaaaatgtaagctcacatactttgtactcatccaaactcacataaatttcttaagaagaatctagaccacaaactactcatagtcacacaatatctttttatcaaggtatactcttataagaaattttcatttctcaaaattttctaaaggacatactgtgacacttggcattaatctaatttaacttttttttctttatcaggttataaattttctaaaagacatttgtgccacttggcatgaatctaatttaacattctttctttatcaggttataaattgacaccattgaacgtactttatctttctgtccacacatggctaccaccgccgcgacgaccatggtggcggcggtgcaccacccccgcccctgcttccgcgtgcgcgccgcctgggacatgaacccgagcgcctcccccaagcccaaggccaagcccccgcctcccccgccgccgccgttgccgaccgcccccgcccccacccacgccgacctcttcgcccgccacagcaacagcgagggccaaggtaatctccatccctcctctccgctttcccaaaccgctggaagcttga

SEQ ID NO: 16348 - DNA, 2154 bp, Oryza sativa
tcaagtcggtcgccggcgtcgacctgccagtgcagccgctgcacacgctcatctgctactggaaggcccgccccggccgcgagcatgagctcacgccggagtccggcttcccgacgttcgccagctacggtgacacctgcatctactccacgccgtccatggagttcccaggcctgatcaaggtgtgcgcgcacggcggtgcgccgtgcgacccggataggcgggactggtgcgctggcggcgacgccctggcggacccggtggcgcggtggatcgacgagctcatgcccggccacgtcgacaccgccggtgggccggtcatccggcagtcgtgcatgtactccatgacccctgatgaggatttcatcatcgacttcgttggtggggagtttggaaaggatgtggttgtcggcgccgggttctccggccatggcttcaagatgggacctgcagtcgggaggatcctcgccgagatggccatggacggcgaggccaagacggcggcggaggccggagtggagcttgggtatttcaggattggacgtttcgagggtaacccggagggaaatcgtgctgaaaataaggtgaaaatttgagtcctcgcgtaggcatggccacctgtaagagctagatctgtaaggtgatgtcggtgtgcgattgtgagatgtttgctagtactgtaatatgtcaaacattgcatttctgaacttatactccctccgtttcgaaatgtttgacaccattgactttttagcacatgttttaccgttcgttttattcaaaaacttttgtaaaatatataaaattatatacctacataaaaatatatttaacaatgaatcaaatgataggaaaagaattaataattacttaaattttttgaataagacgaacgatcaaacatatttaaaaaagtcaacggcgtcaaacatttcgaaacggagggagtatatgtgtgcgcttcagaattatatgtttgcttcggaatcttggacttcggtagattggaatgattctcattacgatttttgctgcgctattcctattccagagtcatcatcttcatgttagatgtgcatgttaattgaaagaaactagtgtgttggtcattgtcaggaatatcactggttatccagttatgtcaggaatatacagtaccacaaaactccacatccgtacaaccttataagtaccggttcacttagacatgcttattacgctaatccagaccgcaccattcacaaaactcaaaagtgtgggacctcgctagcattgttggtcagatctccaaatagagatatgaaagaaccatctaaagaacatgatatcttacacgtcatcaattatgttatagaagtaccctatatgatcttagggtctgcgggtagaactccaactcctaaatttagctttagaagttttgtctggagtggagttgtagataattaaacataaacccagctctgcctctgtgatttattttgtaagaacactccacccagtttcactcctgttttaggtggagctgaaactgtttggctggagctgtgtcaaacaagcacttaaagtctataacttcgcttctattttaagtgtagctgaaactgtttggctagagctataactgtattaaacagacacttaaagtttataacgattttatgaccttcatgaacaaaagatagtagaatcagaattacatggaaacattatagttacctaaatagttggcggagacagaaactaccacagaagcatggggtcggctagtcaatcagggaataaacacctaaggatccaacaggactaaatggcatgtttggcctattgaggtatcatattataagctattgtgttaatgtgttattgaaattatgccaacaagttggatatgagctagcttataggaaatggatacttaagcttctaggccccataaatcaatacctgctttgttgcttcagtttttctttggaggtagagataaatttgaagagcaagaataatctgaagatgagaagtgttagcttttttggccttatgtaccctatgaatgctctttacaagttcaagaacaggagtatacagctaatcaagtattatagtttaggtttaggtttattggtttagacttttaagtcagcttattgactt

SEQ ID NO: 16349 - DNA, 5843 bp, Oryza sativa
tgcacgcgccgtcgctccgacgcccgatgcagccgccaccgctcccgcatcccgtgaggccgcgacggcgcgacggcgctctgcccctcgtgccggtggcaggcctgcccccttcccgagtcccgacagcgccgccacggctctcttcccctcacaccagcggccggcctgcccgccttcccgagtcccgactcacgccgttgcggttgcaccgcctccggcctccccgacgcgcgtcggcgcgcgcgtcccgccccggcggccggcggccgccgcccggccggcatcccgcatctggcggccctccccctccggtgagcattgcgccactgcttctccggctgtccggctctcctctccctcagtccctctgctctcccccttccaatagtcagcaggtagtactacctccgtcaataagttctttatatccatgattccccaattggagatatagtaatttgtatagattaccacaaaattgtgcgccacaatgaacctcatatgacatttttgcatggtgtgatggttgtcaggagattgaggaatgaagaagtcaagcattgtatttctttttcagaagcatgaagaaaaaaagttgcatcttgtgatctaccaatcccacctgtggatgaagggtcatctgttcctgctgtagatgatgctccaattctagttgatgaaggggcatgtgaagaacaagaaccacctacacctacagatcttgttgatgaaggggcaatttacattgtcatttaggtaagttttaaacttttttgttattatccacttgtattgaaccatttagagttatatacttgtatcatttactaggttttatatcgaatcatgatgtattgcatttagatttttttcgctaggcctaccctgggttcaaatcctaggtccgccacttgtacaccatgtacaaaagaagtacacgcatttctgaatcctgatatcaagtgattttgtattcaatgaacattcgacgcacattcaacatattagcaatgaagggtgagcatagatatatatatgtgaactgatagacctttcccttgcaaagcatagttcaccgcgtaattaaccggtagccaatggccaaatgcaagttcacaattattagactagcaaaatttacctaaagttcttttgggtgcaatataggatagcttgttgagatgaccgaatgatctatggtattctcctaatctctacaatagaagtgaaaggcatcgggaagactagtaaaacaatcatcagagttgcatctgaaattgttcgactaagaggatcctcgatcgccgcgtcctgactgtggagactaattaaactgggccatgcacgaccccatggagatgttttacgaataacttcctgtcgactacaaattactcattaactttatataagacagatagaaagacaaggcgcctaattcagatatgaggataaatttggcaactcacacttctggcaagaaatcttggaggtgaaagagagcttttacaaattttgtaataaaattgtaggtgatggtaggaacactttattctgggaagatggttgggggtagacccctgaatgaccgatttcctgagttatataatgtggcagtgacaaagaaggtaactattgcaactttgaaacagaaggggattgattccgtaaagttcaggagatgtttgtattgtgagaaactcagagactggaacaaaattaaaaatagatgggtgatctgcagctgaatgaaaatgatagggataagatttggtggaacttgacaaaagaaggcagattcactgtgaagtccttttatagtgctatgaaaatggaacaagtaaactttccacagaaaaaaaaacattgaagatcaaagtttttatttggctgtttgttggaggaaagggggtacgaattgtcaattttgtgatagagaggaaacaattcaacacctgttctttgattgtcctatggttagattactttggaacattggtaccaaattaattacagaatccgtcaataaatagcgagacaaatttattaagcctaattaatccatcattagtaaaagtttactgtagcaccacattgtcaaatcatggagcaattaggcttaaaagattcgttacgcaaattagttgcaatctatgaaattagttatttttagcctatatttaatacttcatgcagttattcaaacgttccatgtgacatggtgaaaaatgttatggtgggatctaaacagggcctagggcctcagagttatacccattttgtactcaatgaacattccaagcacattcaacatattaattagagacaaatagacgatgggtgagcatagatatatatatatgtgaactgatggacctttaccttgcaaagcatacatagctcaccgcttaactggtagccaagttcgaaattcttagactaaggaaaatttacctaaagttcttttgggtgcaatataggataggatgatgagatgaccgaatgatcgatggtgttctcctaatctctactgaagaaatggaaggcatcgggaaaatgagtaaaaccgtcatgagagttgcatctgaaattgtttaactaataggatcctcgttcgttcagtccagactgtggagactaatcaaactgggccatggccccatcgagatgttttacaaataactctttatagactacaaattactcattaacttgagttaagacagatagaaagacaaggcgcctatttcagatatgttttggcacgatcgacgacctcaagactctcactgtggcacccaacaaactaaaacttcaaatctgcacatttgatcaaatttcaatgtattttgacggaaaaaaacagttactgaatttccttatatgtcattttgttctgagattttgacatatgcaattaaagcttttgagtagtgttgtttttgctagtattcaattacggataagtaggtttccaaaaaaaaaaaatacggataagtacggcaatacaaatgtccttgaattgcttcagcagctagctactgtgccgagattttgacatatacagcatctttaagtagtgtagtttttgctagcattcaattatgcataagcactatagatataaatatgctttcctaagagcatgcccaacagtcactcaatatttgattcccaaaaaatctgaattaggaattccaaaataagaattaggcccaacaatcaccccctcctccaagagaggcccaaaaattaattccctatcatttgttagtttgccacataagcaaggtgggcctagttcggtaccgatcaatcgtctccctcctcgcaccagcgccgagacttctccctcccagcaccttctccctcccacaccagcgccgccatctgagtaaatcgcatcatcaccagccaaccagtgtcctgagtgctgcggtttctacaaaaacggaataccaaggatatgccatagctattcgtgtcatcaaggaggtaatccctagcaaatcctattgatctcttgtgccctagtcaatatctgtctctatttggttatgtggatatctattgttggaaaatattaagtttgatctaataattaattttatagattgattattgttgtattcctgccatcggttctctccattgcacttcatccctgtggtaaacgctccaaccctgtggcaataaaaaagagaagatgagtcgtcgaagtaccctcctccaaatgctattggatgaggagtctttattggatggctacgaagaatttatttcttcggcggttgatatagtgtacgatgagttcgacgatgatgaagttccaaagcgtggtggatctgttataggtcatgcagtaattaatcgggaaagattggctggacatcggagattatataatgattatttttctgaagaacctacgtacctcgatgttcagtttagacgcaggtttttagcagtgctttgttttgacaatatttgtttgcaaaattgatattaaagataattaatatcgttaattactatgcaggtttagaatgagacgacctctgtttttacgcataatgaatgctatagaagcacatgatgaatattttgtgcttggactgtcatgtttgcaaaaggtaatagcagtgtcacgtatgttaagttatggaatagcggcagatgcagttgatgagtatgttcgtattggaggtagtaccgttattgagagttttaacaggtttgtggtggctattgatgaagtttttgggagaggagtatttgagaacaccaaacgagaacgacatagctagattacttgctcagggggaagaaagagggttcccaggaatgttgggttctttagattgtattcattggcagtggaagaactgcccgactgcatggcaaggccagtataaagggaaagagggagttcctactatagttttagaagctgttgcctcacgtgaccgacggttttggcatgcgttcttcggttcacctggatctcacaatgatattaatgtccttcaacgctcaccgctgtttgcaaagctagctgaagggaaggctcctaaagttaattatagtattaacgggcacgactacactatggggtactatcttgcagatggtatttatccttcatgggcaacacttgtgaagagcattaagctgccacaaggaaataagagaaaatattttagcaaagcacaagaagctgctaggaaggatgttgaacaagcatttggagtgcttcaagctcgcttttctatagtccgtggaccagctcgtttttggaaagcacttactctgaatcagataatgagagcttgtataatcatgaataacatgattgtggaggacgagcgcgatggtgattttgatttagtttatgatgagatgggagaacaggtgggtggttcccatgaacgtacgaccaactttaatgattttattagtcagtacgaaaaaattcaagacaaggaagttcacaaccaactaagggaagacctcatcgaacatttgtggaatcatcatgcagaccgatattaattttacattatatattcttatagataatgtcatagattgtaataattggagattcacagcttgtttttaaattagtacatattgagcttatagtaattatttattgacaatgtgatttattgttgaattcgatacagtacaatagactgaaaaggacagcagtgcatatcctttttcaggactggatatatatacaggatatacaccacaagggtgtacatcagaatatgcactgctacatatgcaagccgatgataaattctggcatttttgctacatatgcaagtccatgaactgaaggttttacatgccaatcatcatcgaacattgctactagttctgacagttactttaatggactgaaacttatttcaacccttgtaaaattgatgcctgaatggctctgtaacaaccgggttatttcagcactagtggacaacatgaactgaaaatgcacactatcagtaacagggccatttgagatgaagaagcaattccatcaacaacaatttccagcaattttcaacaaaaaaacaatttccagcaattttgtagtagtagcaaatgctccggctacataaaacagtaccaaaacaagatagtacaatttactagtccattaagtaggctctatagctaaagatctaacaaattttgaatgctaattgatgagtaataagactaatttatgcttgagctgaacgatgacttagaatttgattcttcacatttttatagtactcctgctcctcgatgctcattgcactagtatcagtcctcaaaagctt

SEQ ID NO: 16350 - DNA, 2186 bp, Oryza sativa
cagatgtagcattgcctaactaggagttctcccaacaacgtgtttatatttcactctaatatcgtagtgagatggataaaacacattgagaaacaagtacaattttaataggcattcaagaactacctcccaccgaagatcatgagcaaggtgtggctgtgatgatgaatcatcttgacatggtgatcctatgttgttatcagcctcctggtgctggttccatgatatataatccatgtaaaaccatatataaattgcattgcaccatatgaatgaaaacaacaaatcctaacctttttgccacaaagatccagaatattgtcatggtgcatattttgctgttcctcacatcttcttttgttctatagtggaatggacaataaaaatttactatagatgccagtatgtgtattgagtgttcaaataaaatttatcaattagaaacgacaaaataccattgatatatttctttgattactcattgagtcgtcttgatcaggtctactgcatcgaaccctctgtatgtgcacatatttaaatattgttgcacaaaatatggtgagaaacatagaatgcattactttgacattacctttctattagtccgtactactccctcttcaataccatcatcaaaagttctctgagatgttgcctacaacaatgaaatcaggaaggggtaagattttagtgtgaatcacataaattttttattttacaagcatctacaaaaatgaaatcagaagtagctaaaaattcaatgttaaggacaaaggtatttataacgtttaccatagttggttcactattcccattgcttgttcctttgttttccaactcctcaatacgctgacccagtgttttgactaatttttttaattcccccacttcccctctaacatgtgtctcttcattcgatgatgagtcattcactgtagtgatgtttatgttcttgagatgatgtgatgtacgaccataaacctgcttaggaacaggaagtaatcccattccgtgcacttggccaggtttttctttgcccaatactttatttagcgcatcaccttcccatgcaactcttccttggtcattttgtgccaactctggttgttcatcgatgaggttctccaatgtgacctgcaagtgaaaaaatatatgcccactgtacaaggtagataacatacatattagatatttatggaaggattatgtgtatatggcataccacgtgttgatttttatctttatccttttttttgtgagttgctaagtaaaccattgctctatgtggctgcttcttatttggatcatcttgtctctgaaaatgaaaggtaatgtaagaaagtaaagtgaacatgtatagatgaattttgaacaaaacaaattggctcaccaagtcctcagaccaacgagcataactctttgtccctgctgagtgagggttctgtaacattgaacgacttcttttgttctttgcactgagggcctattacagaagcaatgtagtctcattgagttcacacttccaatgttgtttacggtaggaacaacagtacaatatatgtcaatgagacaatagtacagattgtggagcagattttttacctttcctttttttgacttccaatatttgataagtggaatccattggtctttttctacatcgtctggacaaagcttatacagagcagaacgcttcttctttgggttaaaatatttatcttttagtgcagccttgtatcgcctccaatctcttccaattgatttcagtatccattgaacgcatgatggagggtacaggaaatttgtctgaaatacataggaataatgagagtagaagtatttgaatttgcatgattacgtcaatggttaggcaagggataacagcaagtaagaaaactcagcattgaatatctgtaaaatacatataaacattgaatcgaaaacattcagttgccatggatatgaacagatgcatcaatctgagagtaggaaaaaagtaatgactagtaatacaaacagagcattatacttatgctattttagcgtttgaggtacctggacaaattgtagtattgttaaatctccttcatctgctttgatctttctccaggtcatcttatctaatggacagtaagctccatttcttgctaatgtgcccaaaaactgtcctagcaatccaccttcat

SEQ ID NO: 16351 - DNA, 1661 bp, Oryza sativa
cctaaggcagtcaagtgcatatgacggcaggttagcaaattgttaagcactaagtttttctatgcacaccaagtgtttgtcatttttcttgtacgcagatggcatcttaaaactttaccctgcatcttattgtttcaatttttaatctagctcacagaaactcttatattaaccatataatttaatctgtacaaccaaaaatattggctcatagtgcagtttaattcctcaattatcatgtaaagtccttaattctttattctgattgcttttgtcaatcccatctgcagcaatgtctgatccactcatgtactgctttgctatttttctgatctagccagtagataagatggtcgttttcgtttggttcaattaaacaagcatcagggctgcatcgacgctgtatctactggatcctaatcctaagcttccaggtacagttaacctcacctacacatgttcggtagacaaatttcttttggcttgaaggcataattatagaatcaaaaatatttagtggttgttgtcaaattaggaacactcatgtattaactatatttcttattttaacacagaaaattgatggatttgaataatattaagaagttattgcttttccctagaccaagtgatgagtaccttgctggaatagatggttttcttctgtttgcatatagggaaaagagtcttgaagataagatccgatgtccatgtaaggagtgtgtcaacaagtggttattaacgcgggatgaagtgtatgatcatttagtatgtcatggaatgttacttgggtatagtccatggggttgtcatggtgagaaccacatcattcatctctgccaacagtaggggaacatgagtcagcaaagtacgaggaatggatggtacacatgcgccaactagtgcaagatgcttttgggaacacaaacaatgaccctccagtgaatgaatatgatgtacaaaattttttaaacagtgggccagaccatgaaacaaaagcattctatgacttgctccgagatgctcatgaccctttgtgggaagggtgtgaacttacaaggctgtcatttctagttctcttgtttcacataaaatcagttaacaagtggagtaataaatcattaaatgatttgctagcaatcttgcaacaagcaattccaaatggtaagaatttacctggaacatttgctgaagctaagaagataataggaaagcttggacttaattatgtcaaaattcatgtttgtccaaataactgccagctttataggaaagctaaggcaaacgatgacttttgttcaaaatgtggtacttcaaggtggaaaaacaaagaagataaaactactttaacaaagaaggaaaggagaagggcaaccccaaggaaagtgttaaggtacttcccaattaagccaaggcttaagaggttatttatgcacaaggaaacagctatagcattaagatggcatgatgagggtcgtacaaaggatggtgtgttgcgtcatccagctgactcagaggcttggaagtccattgactctaggaatccccagtttgcatcggattctcgaaacattaggtttgcaatggctagtgatggatttaatccttttgggacattgagttcaacttatagttgttggccagttgtcttgtattccata

SEQ ID NO: 16352 - DNA, 3755 bp, Oryza sativa
tctggattcctgcaagcagacgcttcagccaaacgacgacgaaaaggaaaaaaataaaataaaaatttgaaaatccctaaaccctaaccctagaatccataagccgtcgccgctgtccttgtcattgctgtcgtcgtcgttgtcgcttgaatctaccgctggcatcctggtcatcgtcatcgctcgaagccgccgacggatccacacgtgtggggacggaggggcggcaggatccgcgttggaggggaaggaggcgtcgggcatccacccctccaattgatgccggcagcggacatccttctcaccacggcccccgctcgccgtcgcttcgtcaggggaggaggttggccgtggctgatctgcaccccatgccagagccctcacccgctgtcgagccctcctcccccgccactggatccgccaccgccttgctcaacactgccgtatccgccacaaccgctctcacccgagcccggcaccttcgctcgccatcgcttcttcgagagtgggagagttggaggagtttgagagaactgttagacttactgggagtgtcgagttggacttagtgggaaaagcgagaggaggggaggaaaaaacatgtggacagagggaggggtattttcggatgcaagccacttaagaggcccgcctacgaaaattgattttcgcatgtagttgttgaaccgtgattgggggagtgattttgcaggcgagagcagttatagcccgtctgcaacttaaagagcatatcgtcctgaaaaatcatttcatatcgtagtgcataaactctaacatgtgcctttgtttaacaatcatatttagttcgatggtcaccgaccaattcagtattgctgcatctatgctgcttaagtacaacgatatgccgatatccgagctgcaagcctgcaacatgtcttacacggatatcgcgccaacatgtcttcatcaatttgtcatttttattttcaccttctaatgttgccctgtttgccgttcttgttttggttgtctcccttacttagcagttccatcaatttgagctttccttcacgcttttttcactgcagaatatacaactacgtgaatatactcttacaccatgtgcaatgttcatttatatccggagaagggcagtatatatatttgttttgcagaaaacaatcaatgctttgttgataaattggaaaagaaaggtgagcgtatgtgaagagatgcattccctgaggatgaggatggtgttgtaatgttattgcaagcaaaaacatatcaccggtgaataagatttgtgttttctgtagacagacaatatagagtagtagaagtgggaggtattgggaaaactaatagtactcctactaactaatatgtggcagagatggttcaaggtgatcacaagcattttggcagagtccgtgaagatcttgatcaagaccaggtagttcccagtatgagaacatcaactacatgtacagtgcacagtctaaacatagccaagctattgtggaggcaaacagtctgtatgagattatggttcaaaaccgaagttcatgtgatttctttttctagactacagatatattttgaggtacataaacacgaagaaaaaaaaagggcaaaacattatgccatacagaaattacagacaaacaatttattccatttcatattacacaggcattcggttttaatttgacagggggcattattacccagtaattgaagcaatcttaataagaaaataattaatgtgtgcaaatatgcctatctgcagcgatagtatcccaattgcaaagcattatcgtcaactcgtcttaccaggtgtgtgttgggctgactgaaggagtgagagcacgaacaaaaacggagctagctgaccagacgaaaaacatacctctggtccaactaatatgggcttataagtacccttctcaaggcctcatgggcataagcatgtgtgaggcaatgtatatatatgcccatggaagatgttgtaacattggttaagatgtagtgccttttgtaagcattcatggtttagaaaatagaagtggaagacatcaggaaagtgcataaaaccgctgctctttgatttattggagtccagaaatgttcagctcctcctcccaacccggaagcacggtcttgcttggttattgagttcactacatcgtaccctagatgaactcatcgtgatgggccctctaaacgatatataaaattttatgatatatagacgctaattttatttacaaaatgaaaacaaatacatgtctggtaattattgagaaataaagtcgaccaaaatatcaatatatttgtaccttggaactaatatcactaccttaatgaagatacttctttggatatttcttgatgcaaaatcatcaagagcgttattaagatcaatagtgtctaagatatccttctcgatagagcatgtagccaaatcatttaacatttcttgcaacatagttgatctcaaatagttattcaacaacttcaattttgagaaacttctttcagttgaagctaccatcacaggtatagttaagagaattctttcagctggatgcctggacggctagtcttgcactcttgccgagttgctgtcttgcgtgattgcgtccagggctccaggcgggaggctgctgccgattggcagccggcgggctgacgccatgcaggcaggcggctaagtgttgacttgtgctgtgcgatgcgatgccgagttgctgtgttgcagacgagtcgacgatgttgtgcgcctgtgcggctataccctgtgtgatgcgatgccgtctgccgagttgccgacgacgttgcaactcctctcgtctttcgcgcgtttcttcttctaggtaggccataggcagttactagactactagtattaggtgttggacccactcaccatcatggccccctggtgattgcctcgtctgcataggcctagggccggccctgcatacaacaacacgtagaacacgacgtatatatcatagtaggtgacacgactataggccttcctatatagatgccggttttctaaccggtacaaatttgaggccacctttgcctagttgcccacccacaccagaaccggcactacaatctttgaaataagaaaaatctaggcagaagaagttttgaatctgtgatacccgtggagctcggggaggagccgccaccatctagtagcaagaacacaccatcccccgaggccactgtcgagccaatgcctccttgaacgagcagcgagattgcccaatctgaagcgatgaggcaacagcagccactggcttccttacctcgccatagggctccaccaccaaggcccctccaccgagctcatttgcccccgccgcccgatccatgccgtcgcacgcttcactacgctgtcatcgaatgcagcttcaccacggtgccaccggatctgaagcgccgacctcctcgcttccaccatggccttggcctcctcgctctccgccggagagtgaaacaaggtttggggagataggagaggtgccgtgggctctccccctcccgtgcggatcctgtcgcctaccctcctcgtgcatgcatccggctggccgggatcctgccgccttttttacaagctcccttgtgcaccgatcagccggcggcggcgatgggaggggccgatccgccagcggcaacgatgggaggccggggatgacatcgatgatgacgatggcagcggttgctagatagggagcatgatgatgacgaac

SEQ ID NO: 16353 - DNA, 3806 bp, Oryza sativa
gttgagacaatttgcatattgttttccccttgccaatcagtgggtgaaactgcgcaactgtagccatagtattccaatagtgtttagcatgaactttcgacaaaattaaaaagttgagtactttttgagagtaaggaactccatgaatgtatctttaatgcttggtatgtataagttttaaaggattggaagcaatcaggattgagactatgacatgatctaatatgaattccctggaatctcgacgacagtgccatgtgtgtttgtattttagctcctatttgtgggttgcagataaatgcttgggctttcctcaattgtcagttagtcctgaaacataagaactgtacttggagcatctaaaatcgtgttgcttgtagtgcaacatccaatacaaattacttgtaggatctgtaagatcaatgtgtgttttgattcttattccgtgataaacaattagcatctgtgattattggttttgatatttggagattatcgtcaaagtggttttggagatgatcggatttactgttattttatgtgaccggtccgaccgggttgtgtatgccggtcagaccggcggtgatcgagcggtcagaccggccggcccgcagtctgaccggccgacgctgtgtcggcttcggtttcgggttgtttctttggatatccgtgattgtttcatggttatggcttctagatggatattatacgtatgtaatactgttgtttgctactaatgagtcaagttggtgatagcttggtctcggaatatagtttctttgtttgtttcatccataggtgactcgatgcctcgggagagtatttacggtgatggaccggaagtcggcttggtggtaagacgacgtccgtggtagtcagatatcatgtgggatactaaggctagagttgatgcatgtggttgatggagattccatatggcatacgatggaggtattgtgtgcgtatgggatgcggagtcaaatttggaaggagtccaaatttagtatgattggaaggagtctaaggtgtataggactcttagtatgagtttggtttgtggctttaggctgcctacctcatgtataaatagagggggagcgtgagtcttcccggtatcgcttttgtatcgcttttgagagcaattgagttgctagtttagctagggtttcgagtttagtcgagatttttataaggagtgctgtcggtgcactttttaaacacagagagaagcaataaatttgtcatctactttaagagttcttcgatttgtgtttcaccgggttttggcggtctaaccggcatctcaccggcggtcagacctattggtggtcagaccggcggcggcgacaggagctggcgattgatctcggcggttcgaccggtgttacaacctcggttagaccgacgatatccaggcggtcagaccggcgctactacttcggtcagaccgtgatccatcgatttcgagggtaacttttatttccgctaaaagtttttggtttttgggtataccaaccattcacccccctctggttggcttagttcttgtgattcgaccctacaagtggtatgagagccacgtttgctcttttcgatctttatcaatcttgagtttttgccatggctacttctaataagttttcaactaagcctcatgttatcgatggaacggatttttctcattggtgtagtaggatgcaatcttacattatagcttagaattatgatatttttggctcctcctcccatccaagccctactctttttcttggtagctaatctcgctaaaccattattgtgctcctcgtttaggaattaattaccaactactacaaaacatggtactttgtttctacactgcggaaacacgtgatctagctcattgtgtgacaaggcatagaagattgaaatgaaacaagtgaaataataataaaagaagtcatgcatgcataattcgctggaattttcaaaagcaaaggaagtcgaaattaaacgatgtatttttttatcaagtgaacagagcagttgaaaacagggtagtgagtcttggcaattgcattagtatgagaatacgacagcaacaaagaaaacccggtactttctctgtttgctgaccttgctaacaaaataattaattcagaacatactttcattgatatctcatcccttttttgctaaatctttcagacagcagtaattgtaaaataaaataccagatatcatgagctactaatgttagtcagattatgatcaaatattaatttaagagagtctagctatacttgaattattattaatatatattttgcagtacagttcacaattttcagttgtgggatagcattttccagaatttggagacattaaacttttgtatgtttttacctttacaattacaaaattgctctggttccagtagaattcgagcagaactcaatttctgctttaagtattttgttacaatgtgattgcttcttctgattgtgagaaatccaactgatcatttaactcacatagttgaggaagtcacatactgtactgcatgttgttgcaaaagctcaacaagtgtatcaatattccttctgtattcgatctgccccaaatgagagcggtttttacatatttatacaggagtatacaaggggaaatggctttaatgcccctagtcctatgaggaatctgagtggctggccagtgggccaccctcggacctattggtaatcttacaggtgagagggaggaagcgcccataggggaggcagcgctggttcccgagggaacctgttattacacggataaaggcatgccccgggtaatagcgtgctccgcttggtcgtcattaatggtgtcagaggcagttggggcgcgtagtgcgcatttattccagcccactcgcgcctggttcctgactttagccagtggaagcacatcaagtgcttgaatcgctccgggcggcctcttgaactctgggggcctcccaagctccgaagcctctggcagcctccggagctcccttgccgggctccaaaagcccttcacgctctggagctcgagatgccttctggggctctagggcccatgggtgctatggcctcctggagcaatcccggagcccttccgccgatctccgaagcccttccaggctctatcgcactcgccgtccgcgggatccgattctctaggatccctggaggccttcggagcggccacctcggccagggaccgacatggccttgacctgtaaaatcaaaggtgttttgattattattctgtgatgaacaattgggcattggagattattggttttattatttcgaatttactcacgaagtggttttggagaggattggatttacaggtgaatcgcaggatctatcattttatgtgaccagtcagaccgggctctggtagccggtcaaaccggcgtgtattgcgcggtcagaccggcgcagcccgcggtctgaccggccgatgctatgtcagtttcggtttcgggttgtttatttggatatccgtaattattacatgattatgacttctagatggatactatacgtatgtaatactgttgtttgctactaatgagtcaagttggagattgcttggtctcggaatatggtttctttgtttatttcatgtgtaggtgacttgatgcctcgggagagtatttgcggtgatggaccgggagtcggcttggtggtaagacgacgaccgtggtggtcaaagatcatgcaggatacttaggctagagttgatgcacgtggttgatggagattccatatggtatacgatggagttattgtgtg

SEQ ID NO: 16354 - DNA, 12462 bp, Oryza sativa
ttttgtaaggagtgctgttggtgcactttgtaaacacagagagaagtaataaagtcgtcatctactttaagagttcttcgatttgtgtttcaccgggtttcggcggtccaaccggctacataccggcggttagacaggcggcatcgcggcggtcaaaccggcgggaatacggcggtcagaccggcgtcgacaggagtctgcggcaggcgatctcggtggttcgaccggagttagatcttggtcagaccgacgttcatcaagcggtcagaccggcgcattcacttcggtcataccgcgatctgtcgaattcgagggtaacttttatttccgctaaaagtttttgggtataccaatcattcacccccctctggttggcttagttcttgctattcgatcctacacgacccacagtcatctccttgggaggatggttctccggagtgccgcagcccttcggaggctggcttccctcgatccggagacactccccaaacaatgcacataataagcatcttagttcactatgtacctttagaggagctagctactcatatatactcagctctgaagatgcagttgagacaatttgcatattgttttccccttgccattcagtgtgtgaaactgcgcaactgcagccatagtattccaatagtgtttagcatgaaacattcgacaaaattaaaaagttgagtactgattgagagtaaggaactccatgaatgtatctttaatgattggtatgtataagttttataggattggaactaatcaggacatgatctaatgcgaattccctggaatctcgacgacagtgccatatgtttatattttagctcctattttgtgggttgcagataaatgctggggctttcctcaactgtcagttagtcctgaaacataagaatagtacttgggacatctaaaatcgtgttgcttgtagtgcaacatccaatacaattactcagctccattaacaatgaactccgaacagagcctttggatgttaagccatgcaggaatgtcctagctaggaaaagttaccaccaatctgtaaaatcaaagtgtgtttgatttttattctgtgatgaacaattggcaaatgagattattggttttgatatttggagattattggcgaagtggttttggagatgattggatttacaggtgatgaacaaggactgctgattgtcgggtccggtcagaccgggcagtagttgccggtcagaccgacgtgctttgagtggtcagactggtcagcccacggtctgaccggccgactctatatcagtttcggtatcaggttgtttcattggatatctgttgataatttgtgtttatgactttgttaacagtgaaatttgtgtatgtaatactgttgtttgctaatgaaggagtcaagttggagatagcttgtgctcggaatatgttttattggttgatgcatgtgtaggttgtcttgttgcctcgggagagtgttgccagtgatggatcgagagtcaacttgaggataagatgacgtccggatggttacatattatgcgggatacttacactaaagatcaatgcatgtggttggtgaagattccatatggcatatgatggaggtattatgtgcgtataggatgcggagttgaatttggaagaattccaaatttggtacaattggagtttgtaaagttagtttcttggacgggaaggtttcctagggtattaggacttcttgtacaagtttagttcgtggctttaggctgcctacctcaggtatatagagagagggaaggtgtggcctcccggtaccgctttagagagcattgagttgagagaatagttaggatttcgagtttagtcgagattttcgtgaggagtgttgttgttgtactttataaacccagagagaagtaataaagttgtcatctactttgagagatcttcgatttgtgtttgctcgagttcggcagttcaaccaacgggataccagcgttcagaccggcggcaacgcaccggtcagatcagcgggagagcggcagttagaccgatggcagatcaggcgactacgacttctttagggaggttagaccgggtggtctactcctgtcagaccgacgacatcggcttggtcagaccagcggatcaacttcggttagactgattgacatcgattcgaggataacttttaattctggtaaaagttttgattttggggtattacaaccattcacctcctctggttggcttagttcttcctgttcgatcctacacaatcagctaatccattctgctccttaagaagtgcaattataatttgttaacatatatatgcttaagatttatatatggttcgatggtcttaccaatgcaacagccaagcaatttggcatgctactaagctcaactcagcggtacgaatgccaattccacaactgcaaaatcgtaacaatctcgcctactgtcttattcgttgttttttcttacacttatcttcatatatttcatctccacttcaggctttaattatgcatcatctcctcttgattaacgagctttggtagatctatatattaatttggactcaaaagtaatattttattttcatattgcactgacttaattccgaagaaacattgaacgcctagtcttaacattttctgacatgactaaacgaagtatattttatttttttactagtatttatatattttaatcaagtactataatggtactcttcacaacgtacaccatgtgcaattaaacgtcacagcaacattgatatttatatatttttgttacgatgcatattcattgtctggctaacatatgttcacatcaaggcctcgagggtgaggacactacatacgtaaggagatatgtgcctggcaaagggggatgatgttgtaatgttgttaccagcagtaatgtgttgcactttgacacagtttcaaatgaaattcaaaattaaattttctgggcacagacagtgtagagatggaagtgggaggcgtcaggataattacttgtactactcctgcccttgaccatattggagtgcacgaatagttttggctcctccacccagccaagccgtgttgtttgtgttggtaatgatggtcaatgtactgtagtgtttctcatgcatccgaggctgcagggagatgatcgccaagagagacagaacacttttaggaagctgctttggtgataggtgcatagggtagagaatgccacagcagaagatggtgacttgtaccctcaagaacaatgagctgaatgagtatggctgggctaaaaagaaccagcggtgatatgggacaagaggcagaggagatcagaatgaaactagtgaaacaacaaaaagtcatgcaaaatttgtagcttattcagaagcaatggaagcgatgttttctttttccaaagttaacagagtagtttagaacagggcagcgagtcattcgaattgtattagtacttgatagtgacatctcaatacaggaaaaaaaacttgtacacttcctcatttgtaccttatcacttttcgctaatttcattatatatacggttatgctacacgacatgtagcgtgctaggaatccaatggcgtgcctccaagctccttctcctctagttttcccttttttaaatcactaagatgatgccccgcaatttgctgtgagatatacgttagatagttgagaaatgatgaaatgatttggattgaaatattatgaaaatgatttgagaatgatgatttagcatatagatgtttagtttttgaatgaaataaattgtgatataattagtatatgtttgcatgttgagttttgatgtggcatgtttacatgtaggttttacgagtgctaataaatattatgtttatatgtttagctttaggtgtttagtggcattaactttatagaaagaagagatctgtggtcctatccccaccttttacgtgttttcttgttcttttcaccaccttttccatagcgcaaccaagctggatcgcctccctccctactgccgaaattacttccttttactaactcccaccatctatatccagtaaaagaattactatcagtggtagccgaacaaaaaagttactaacggtggttgtttccactttgttagggtctatgcaaatataaatattgctccaataaaataattactcatcattctttccagtaatatagttacttttcgttcttagtaaaaatattactgtcaattggtttataacttcgtaatgtatttactccgttttggcagtacagtattggtaggagcgtatgcatttagtatttcttttactataaaaaaacatgcaatctcacacaatcctgtgcaaataaaaagatgacatgtatcacacaacattaattaatggtgcgggcaatctagcttgtgcatgattataggtaccttgggatactaatgtaaatagaatctagcttgtgcatgattataagttcagtacaccgatctcatgtgcaaaaactgtagctattgcgatatagagtgatacaaatatttcttttgcaaatgccaagctgatagaactttatttaattaaggttgagcgtatgtgtgaagtgcctcgtggagattgctggcgcgcgacgcatagataaaataggagtggaagacatcagggaaaacaataatagtgcacaaagtacaggatgacattttaacgagttcgatctgccattttgttaagtttactggctgcattggtctgagctagctacaagagttcccttcagactagtatactgctaagccatagcttcatctttttgttctacttcttctcgtgcagttccatctaattatgcccatgctgaattgaaatgcaacaatcgagccttctttttttttaaaaaaaaataaatagccatctatgttcaggtataaacaatttaaaataacaacattctggacatgttcaattcgttgctaaaataaaacttaccatttgttggtaggcaacacatcaggtgaatacaaagcaaatcgtgcacacatgcacaaactccatctcaaatcgtccacctgatatgttgccttgttggtaaagctaaatttttgcttggccaataacatcgttgacaccttaccaaatttttatttcgatgtggttctgcgagtggatgttttggaattataaatgtatatacaatgatgaaagtaatatgttttatttataaaactaacaaattttggcaatgcaaatacaaagacctagaacaaaaaaaaacacacacacattttgactgaatttgaataaaatttgttggcttaaaaagtgaaaattttcaggtgaactagttttgtgaggggtttatgaaatttcgaacccttccacctcgatcctgtagcacgtccacacacgtgatttcagttgaaattctgagcctacaatggaatggcacacatgttttctctttgattctatttacatttttttttgcactaaacacttctaggcaccattgatcaagctcgagtactaaacttccagacgttgatttctcgaataaaattaatacttatgggtatgtttgcctaatgaatgccagtagtgctttttaactcgatttgtttttcttacactcagattcacatttttggccaaattattttctactgtttttttttcttttcagcaaatatagaggaagtactgttcagtacactggccattctaataaatgaacatcaaggttgagcatataaatgtgtgaactcactcatggcagagaatgaagttttttttttttgaatgcgcaaaaactttgtatgccaatatatttatatgtgtgtgaattttataggagtgaaagacatggaagaactgtagtactagtcaaaacatgcaggtgagaactattgcagagcaaatccctcagtgtgggagtcgtttcttgaaaagctgtgttactgtcttactggtaggctgcacaaggaagaagtcgtcacaatagatcagatatcatgaacatatatgatatatgaagtgatagttgcacggggaagaaggtagtgttgtactattatagttacaaccgcagttcaccagtagagattcaatattttttagagtcatatatattatagaaatagaagtggaaagcattgggtaaactaatactcctgcaaggtaacatctgttagaggtggtttgagggaaccacgagggcgtcagtcactaagaacatgtacaacgccttcagttagcagttgatgaccgatatggattgaacgcaccggcaaccaagtttggtgctccttagacaaggaaatttttttccatacagtagcatggtgagattggatgatcaacacaattcacagaggttgaagcaaagaataaacatggtgatttctttgacaagaaaatgcttgtacaacctttttagctgctgccgaagaaaaactaagtcaaataagcattggtatgaattctagcttgaggatagatggtcaaaattgttggtcaaggatgacaaaggagcacaagaatcattccattccgatcgaggctatctcatctagtcgtcttaccagtagggatgaaattttggtcaattttggtaattttgaacccccagccataaactatcttatccacaatttttgtatttttcaaaattttaatttggtcaaaatttattcaaattcagtcataactttattagattttcattatcttaaaaaaattgttaaataattttgtaccgaaattttctaaaatccctgaaattgtactcgtcattctgatatcaatattttttttcttttcattgtgcaattttcttttcggtatgcaatcaaatggtccgttagtaaattggatgttgtaaaactcgtccgaaatcaccattgaaaccaaacgcgaaataaacgtcatagaagatccaaacacggtgatgataccgagacacgatacttaataacagatttcagccgtagcctatatatacataacactgattacggatactcctccttggtccatcataattacaatgtattagatttacaacgaccctcagccagtcattgccggcagacgctccctcgcgcctataccaagtcatcacgagtttacaatagatgtgcctctctatttaagagagagcataggataaagtccaaacctaactctatcatatacatgtttcaacttcaagtcctaaactataaccgactatatacatacacatatttgacataaactttaacattgaaagtgttgcccgactatgagaatggtgttgtataaatagttgctataagtatagcactgaacagacctcatgctcctgtcttttacctgaaaaatagacataatagggatggaaggcatccaggaaaacccatactagttgtgaaacaatccaggagagttccaccatcagggctttggtgatcttggaagcagcttaagttagcttaggcaagttggaaccatcgtgctctttgaggattgatgctagtactaaatttgtccaagccttatagactaagaagcgatgacgaaaacaattacgaaatctgtgtcatagtattgtgatataataaaattgtgttagctacaacagcatatcatttaaacttctggtttttcatgtccacttcagccttaataagctagccgttgtggggctattttgactcaaattaaagtcatgttcctattcaccattttgcccagggttttcactttcgatttcaccgaaaatttaggccatttcagtagaaccaaaattcctgcaatttcatgattttttggtacttttggacctttttttttaatttttaacccaatttaactgaatatgactaaataattcaacaaaaatttatgaaaacccgaaaatttcgactgagataatgacttgctttggtggagggggtggttggggtgttccgaaattactgaaatttcaaaccagaattgcattcactcatttcggtacagcttctctgtttgttttactttcaccaagtacaattgtacacttgattaaattgcaccatgtgcaagagttacagtgatgtggggagtgatatattttcttttcaccttttgcaatgcccaactcataaattgggcacatcatatatgaagctagctagtgttgcgctgatgcttctcgaggatgtggtactgttgtagtgttgttgctgctgatgcatggcaccagtcaggccatctagtgaagtttaaggcatatcacatagaatgatagacaaatgcaaatagggttggaagttattgggaaaaccaatagcactgcgaagtaggcgcccaaatgggacatgaaaggacagcgcgacgggagggggactagtcttttgctctaggggcagaagaggttaggtcatgatgccgacgatgggaaaatgtatgacagggtcggccaaaacattctggagattggatgagatagaatttttgtggtgatgttaactattattagaaaactatatatcattagttgtcatcttaaatataaattctagattttaatttgggcttcagacttttcttgtgcacatacttgccggctttgtttcattcaaaggatttttgggcttcatatctttttttggtttttccattcggcaagtacaaacggtactctttactactacctccgtttcaggttataagtctttttagcattgcccatatttatatagatgctaatgaatctaggcacacatatatatctagattcattaacatatatatgaatgtgggcaatgctagaaagtcttataatatgaaacagaggaagtaattgctatatgtataccatgtgcaggaattactacatctaaagtgatgttattttttttaatgtgtgtacatttagtcttggctaataatttggttattaatggtgaaactgctatatatgtcaagtagtggatgcccatgcatagaagaggacggatatttttgcaagcaatggacaacaccatcaaagttcaagaggtttttattttcaagtatgcgcgataagaaatagaagtggaaggcattgggaatactgatactcctcccacccacaatgagtcagagatggtacaaggtgatcttcgatatcctgttactgcccgtacgtgaagatctctaataggacagaacgttataccgcttttgcttatgatcttcaaagcagaggcgtgtgctattgaaggcgattagcatgacatgtagcgtgtgcatctaaaacaacaatgccaaattagtgccaacacaaatgggcagaacagcgggcaacgctgtgcttctgactgcacagctaattgtaagagcaattctacggtccttgaggaggtaccatgaggtaccaaaaatttagtgtaaaattctggtacctcatggtacctcgtagtacctaggtaccacgaggtatcaatttacaatagaaaaagtggtatctcatagtacctcctcaaggaccgtaaaatggctctaattgtaattactacctgcacatttgctcaaattttatgtatcttggtataaacagaataaaagtatttatcatactttttttataccgaatgctgatattctgacgtatagataggtattatgtgttgtttgcaaataataaaccagtcagaatcagtatgattgcagccgtgcggtggagatagattgggagacggccagtggcctggtccagttcaacaatctttaggtaattcacccctgtaggttcccctacccccatctactattcctgtacgagtatccccattggcagaggaggtgccttccatctggtgcacgctcgttgctaggggtgggcattaaaaccgataaccgaagaccggacccgaaaaaaccgaaaccaaacccgaaaagaccgaactctcgggcatcggtcatttgttcgggtgtgacatctgaaagaccgaacaaacttcgaaagattcggtcatcgtgcaatactacccgaagaaaccgaggaccgaagaaaccgaggaccgaagaaaccaaatcaataccaatcactaaacagacaacgtgaccatcccatggaccaaaacagcccaacaacaaggtgaggcccaaatccacgtcaatgacccaatccctatgaccccaccattcgattgaccgaagcactcctaaccctagttagcccacgcgcatgtctccttccttccgcgccgctgtcttctgcagtactgccgcatgctgctactcgccggcgtcgccgcagtgtcgcatgcaatcgtgtggtcacgtggaagccataacaaggccacaggctgctggcttgctgatcctgctgcacagccgcatgccggccgctgtgccatcgcgtgccgtctgcgtcgcgcggctgatttctgccgcgtcgtcgccttccgtcccgccagcacttgtcaccatgcaatccatgctagtggatatccgtcccatgtgactgaggtggagccatggaggttttcaggagcaagaagacgagaagattgaagaggacgcacgttctggttcgagcacctcggtttagaccgaagaccgaaccaaattttcggttaaccgaagtagcggttagtaatttttgcttaacaacttcggtttcctgtttccaaagaccgaatttttaaaaaaccgaactaaccggaccgaaacttcggtctagtccgaatgcccacccctactcgttgcactgcctaggaacatcgtcaataatcttccttctcgccattgattggtgtgtgctatcttattttcgtaaaattcgtctaggaaagaacacagtcaatgttatctatcatgtgcatgcccggcatggcgtgtgtcatcggcgcgttgaagagtgcggtactggcacatgttggcagggtggtggtcgcggcgaggggaggatcacagcagcatagggagagccaagccggttggcgaccgggcttagagggaggcgacggtacatggagttatggacgaaggcaacttgatcaaacatattattttttaataggaatattggttaaaatccagcctctgtatatacccaaaagatgtgtacagccaaaactaatataagagtatttagactaaaaacttataaacctaatatcttgcgggactactatatgttgcacgtccttcatatcatgtttaggtccatttaatacataatacatgctgcataatgttgcagcccttttcctatacatctaaaatgggctaggagtcggatgtaagcttgagggtctatctggtatggggattctccctactactttgatcccacatgttgcatttatataaaaatacagtatttttttcatcgtgtatgtctattatctctgaatatgaaagaagagcagagaggtgaagacaagacaaggggaacctacagcacgtccatggaaaatttacatacaaatgagaggtttcactacacacagaacaggttgggaacccacaatagatgccggttttctgactcaaaccaatttggggtacctttgtccatccgtataggtgtagtgtaggtacatacgtaggattaggaagcatcgtgaagtaaagaatgtcacagctagtttgctgatcgtcaaaccttcagaatgaatccatcatagggtaggtctagttcacaagctatcctgagacctcgccgcacataatcacgtccaggtctctccacatgttgtttcttttctataagacgtctccaccataaagatgtcgtccgtcccattgaatttttatttttgttctgcgtgacattgtgtgctcacactgttgcatttgaacaaagagaacccacgtgcgggagtaattttcaaaatactccctccgtttcaaaatatttgacaccattgactttttagcacatgtttgaccgttcgtcttattcaaaaaaaattgttaaatatgtaaaactatatgtgtacataaaagtatatttaacaatgaatcaaatgatatgaaaagaataaataattacttaaattttttaaataagacgaatggtcaaacacgtattaaaaagttaacggtgttaaacattttgaaatggagggagtaatagcctgctatgcgttgttggccttcttatttgggagcccacgattgacacaacctgcttttcttcatagaccttttttaattcacatattttttcccactgaacaatgttctggcctagaaaaagaaattgataggttgaaactttacacatagcaattttcacataaactatatgcaacgaaacacgatgcatgaaaactttgtatatagaaacttcatatgtgtaaagttttggtatataattttttgcaagtgaattaaaaaaaataaataaaacagatgaggccccatatagcctagttactacttagtgggtcattgctttgttttttgcataggtgggccagtaggaaaaaaaacctaacgcaataaaaaattgc

SEQ ID NO: 16355 - DNA, 4643 bp, Oryza sativa
catatatgggacattgttaggactggaaggcaaatcaaaggataatttacaagcacgcttggacctacaagaaatgaatataaggccagatttgcatcccataagaaaagctaataataagtattatttgcctcctgctttctatacaatgtctaaacgggagaaacatcaattttgcaaagttctccatgatattaaggttccagatggctatgcaggaaacatctcaaaatgtataaatgttagtcaagggaaaatttcaggtcttaaaagtcatgactgtcatattctaatgcaagaacttctcccagttgctttgcggggtgtgcttccttacaatgtcacttctgtcttatttgatctatgtggatattttagagaactgagttcaaaagtcctgtacattgatgtgcttgacaagttagaggaacaaattaaaatgacattatgtcgtttggagatgatatttccaccagttttttttaccattatggtgcacttggttgttcatttagccactgaagcaaaattaggaggtcctgtgtgttaccgatgtatgtattttgtggaaaggtacatttctctcacaaatataatttcatttgttatctagtatagaaattttaacatttttaatctttctctttatttatgtaggtatttgagtgtattaaagtcatatgtgcgtaataaggcacatcctgaaggatgtattgcagaagcatatttggcagatgagtgtatgacattttgttcaagatatcttgaaggttttgagacaaagcataaccagcctacacgaaatgatgataatgatgagtcagttgcatgttcagatgatgaatgcacaccatatctttttcctcatgttggaaaaccacttggcaagccgagaagttatgttattaggggcttgactaaaatgcaagcacatagatatgtgctcttcaactgtccagatgtcaacccataccttcggtattagctcaagatcatacacttcatcactaatcattttcttcaaagcatacttcatgacactttttccttttacagaactcatgttgatgagattagaagaacatatcggcaaggccgcatcaccccaaagattatcgagcgtatccaaaatgaaaaattccatgaatggttcagagctcatgtaagtttcgtgttattatcatttagatcaacaaataaaatcatgactaagtaatcctatgtacacagataatggatctagagaggaaaaatggcatatgcagtgtcaagaatgatcatagatggctggctcgtggtccgattggtccagcaaaaagatatcgtgctttcaatacccgtggcttccggtttaggcctaaacatttggatggagtgacacagaatagcggagttgtcctaagtgcaaaaacatccagttatactaaatcaagtgacacaaatccaatattgggtgatctaacatactatggtagagtcatcgatattattgagctaaattactctggacaattttcagtagtactgtttaaatgtgaatgggttgatgttgtttctggaaaaggagttaaaaaagataagtatggttacacactagttaacttctcacatctcatacatactggagaaaaagttgagcatgagccttttattttccccaatcaagcagatcaagtttattatgtcgatgatccaatgaatcctgggtggtctgtggtaaggaagaacaaacctagagatatatatgacattggtgaggatgaatgggcaggtgacatagaaattgagccattccatgtttcacaccttggtggaatgtccagtaatgcaaacaattacaagcaatgggttagaacagatgttgaaggaacaacagtagatgttgataataatgctttgaataatgaaggataacagaggaaaatagttactctttcatgatttatttcattacttcaaggtatatgcaattccctgatctaaaaccttctgatggattaattcttgttagcaaaggtgcttccagttttagaactatcgaaaactctatccaactgaatgcatctaaatccaacaatatttatggtcttttaatttaacttttctgcctttttggtgtacggtacaactattaggtccactggttaagtatgatcttacattatgttcttgtgagaaatatgattacaagcgtagtggatgaataatttgtggttaccttggctattctttctattaaaagatagcaataatcgttgtgtttatatttatttctgattgattaaaacctgttcatgcatgttcatgtccattctttgctctatattgtttagtttcaggtccattattttgatgcagacgcagttacattggcaaggtatctgtctttctagattctattgatcagctcgctatctccatgtcttctttaacaacaaaagaaatgtcatgtctttgctgatgaacttggtttcttttcctacatggccaggtggcatcagggtgttactgtttctttcggcaagcgaaagtgaacaagcagctgtcactaaccaacatatggcagttctagtccaagcaaacatgagtttaggccagtcttcagtagtcaataataattcccaatgtagtctatatgtatagattattttaaatttgttcgtgtgagcttttccttttctactgctatattgattagtcctgtaatcatgtctgggttatgtgatctctctagcatcttgttttttaccatattactgaaatgattattctttcatattgccgaaatgattattcttccatttttttttctaagttcatgatgtaagacaaaaagattctgtgcaaatacctcagctacattgtagcaattttgtgattaaatatttttatacacatgtcatggatcagactcactcgctaaattaaaaaataaatccaaggagttatgaaccaagcccacagcctcatctataaattctgcatgctttctcactgtgcttgtggtacttttataacttgagtccagccatcctttttttatatataaaatgggcattggtcaacccaatgaatgcttggttcattgatcaaaccacaattcctaaaaataaagtgtacgcatgtgtgtataaaattaaatttcttaaaatttgattaatgcaaaaaaaaacaagtacaataatttacaactaatgacacaaatgtttgcttgcccagttggctagtctggtgcgattcttgtgtatttacacaggaggttaggagttcaactcctctgttaggcacgttagttgttttagaaagcaacccaagtactttttatgcgattagataatgttacatcactatgttaaataaacccatggcaccaatatattatccaaccctagtactttttatgtgattagataatgttacatcactatgttaaataaacctataataaaccaaggcaccaatatattatcccaaactaaatctgttttaattacatagcgcaacacagagttactataggtggtagtaacaatgaattggtgttactatatgtataccaactgtaacatattggaaatatgttacaacctttttttcaacacataaggtttcgttgctatagcattcgccagtaacacatctccgaatgtgttacaaaatagtgttacagaatgtcagttctgacgtagtgtcatcccttgtctccatttaattttatcagatggtgattgatagcacactaaaataataacaccacaattggtaaactttttccccctctctcaggtgtgataatactgttgtaagtactgattgaaaagagagaaactaaatgttgtaagaaatagttgaaactcaagggaaagaaattctgaattagttctaatcaggccggatcgagatctagtgactaaggctgttggtttcttcaccacgttggcttcatcgccacccgttatcgcagccgcgccaccagctgcagccacgaatctcgtcgcccactggcgtcccacccacctctctccagggctcacttctccctatcataggagcaaacatatatagtgcgcatgaagtgaaggatttggcatgaattcagtggatgtcactgatctaattgcacatacacattattaagaatgcacatattgcattgagtaaatttcacaaaatctcagagtttgcaatggatatctaaggtcgcactttactaattgataatgtaattcctatgtaacattttgatcctaattaagaaaggtccttttgtagaagtccgagtacgtgtctcaccacctagccaacttgagaacgctggccacgtcgctggctgagccatctttagtcccggttggactaaaaagagggtagcggcaatccctcgaggtccccttttctttttttttcattgttaatttgctattggctagagttaatccttgtattttctcccaaattgagtaggatgcgtatccccaaatcaaaccccaaatcattaacatcacaaatcctaagttatacacacaaatcaaatacatcacaaatcctataagtaattatacacaaatcaaatacatcacagattatacatctcagatccatacaatgaatgacaaattctagaaattatacattcagtgaat

SEQ ID NO: 16356 - DNA, 842 bp, Oryza sativa
gccatccgggcctatctgatcccatcagccgcagattttccaaacatcgatcccattccacaacagcaattatacaaagtagtagtcaaacaaaactacgctagggatcacctcacatccgcccatgaccgtgggcacggctgttctaacagtttaataacctctgcagagggggtacactttacccacacgacattactaacccggatcacccagctcatgcagaacagccacgtctggagaccttgaggcattcatgacaaggcatttcgaaagccgacacaggttcaccatatgccaacgagaggggtcccagactgacatcaggttaggtcccagaccatactatgccaggaagcccgggggttctcctcggcaccaccccgttgaatccacatgtctcttggcatcatggctccctcggtctgtggttttggaaattcatttagttcgcaagcaccgacccaggtgtcgggtattccaagtcttttgtaaaaccccaagttttacccatcgttggatattttaaattagaggggaggtgttccgatgcccgtgcccgaaggccagtgcatcgaagcacaacagttgacaaaggaggtttaagtgttcaataattcacagagggtaattgcagcaattaggattcgggccggcaggctatctaacaagccgcggccgaattactgtgtttaacctattcatgcaacatttgtggaaaagaaatacttagatttaaattataggtgcaagatgatcaaaggtgacttgccttgctcgagatcttgagctcgatcctcgaaatcctcgcactgcgggtctgcgggctctgaaactacacg

SEQ ID NO: 16357 - DNA, 5565 bp, Oryza sativa
gagccgacgccgagccgagcgctctccccctctctcgttctctctgcccgctccatccccggcaagctccccgccgcgttttcgagttccccgcgcaccgttgcctcgcacgcgcgccctcgcggtcgccgcccttgccacgcctgcgccgcctagccgctgctctgccgcgccctgccccgcgagccagcgcgcgtgcccgagccacgccgcctgcatctgtccaaaaaccggaggcagcgcctcccgctcccatctctctccctccccaaaccggcatggcgcgagctccctttctccccctccgtttctccctttcccctctcggcccagcccctgcttcctccgttctgttcccgctccaaggacgcagaggagcagccgcgccagccgtcgcccctgccgtttgaccacgcccgtgaacccatcccttcccctcgaagctccctcaccccagtgccgctcgaggtcggtttcctctcctcccgaaccgacatagccaccacttaaaaggcgcccctcgtccgtgccctgttcgccgtcgcctttcgccgttgcgtgtgccggagtagccggtgcgcgctaggaacagaaggggactccaggcgtacgtcttccttctcttccccggcccgaggccgtagcgatcacgccccgcgccgtcagccatcgtcatagcgccctcctctgcagtggtagtgcatcttctccgttctccttcctcgctccatctcctccccttagactcgggtagtagctcgagtagaccccccgtagctagctggcgccgccccaagccttgcggccacccgctgtgtgctcgccgccgttgccacccgagctcagtagcgcctctcgtcgccggccatgctcggcgtagctccgcccaatccgacgcaagaaacagactctggtggccgagtagatgctctggtctggaggaatcgaactcccatcgcgccgtcgccgtttcccccttttctcgccgccggatgccgccgccgcaatccgccaccgtcgagcatcccccagcaaatccgagccgttggcccgtcccctctcaacccgtgctacctcccagtgtgctcacttttgcctgtaccgccgtagttcgccccgccgtttgcagccgccgtccgccatccgttccggccgacgccttcttcaacctcccgccggcccgcgtggcagccacgtaggtgccacgtcggcgccacctcggctaggaccgggtcaacccgacctcggcccgccgctcccttccgccccgcttgcgcgcgcggtccaccgcgagccgtgaggctacgcgtgggcccgccgcatccgcgtcctccgcgagccgcgcgcgtgcaccgcgcccccctccgaaccctagcgccgcgctacctgctccccgctcacggtgagctgagccgccgacaagcgggtcccactcggggccacgcaaggtggacccggcccaccggttccccctccctctctcacctcgcgtgcccttgggctgccttctcgggccggccggcccatttagctcggccgagccgcccttttctctcgggccgcgccctagccgcccgagggaagtctatttcccctccctctttcttttctttttccaaaagggtttaattaaatcctttttcctttagatcaaaaatccaataatcttagaaattcaatatcttctcaaccgtacatccgattcactccgttcaacttccaaaattcctcaaatctcgagatctatctaatggcacacttagaggtcaataatagggctttgttttcgccgtttgttgagttgtcccgtttcacgtgtagtttcgaagcccgaagacccgcagtgtgaggatttcgacgatcgagctcaagatctcgagcaaggcaagtcacctttgatcatattgcacctataattaaaatctaagtatttattttccgcaaatgttgcatgaatatgttaaacacaagtaattcggccgcggcttgtgagatagcctgccggccccaatcgtaattgctgcaattaccctccgtgaattattgaacacttaaacgtttcttcgactgaggagccgactacaggaggcagccaggcaggcgaggagtagaggaggccgtctttagcagttttccgtgtgttaggccccttttgtgccgccgccaactcttttggagtcgtggcgaggtagtgcgtgcgtgtgtttgatgtggatgttgtatggtagtctggattctcctaggaggtgtgcgtatagtcaagctcggcgtagctctgtgacttgtccacacccgttgtatcaggtgtctttatgatttgagaaatccagtttatgcctagtatgtgctatctgagttgttatttattttgcttcttgtcttccttaagtgcttatctgttgcttatctcgcccttttctgggagtttagatggctagccgccccaccgcgctgctcgtgcaccagcccgcttcggttttgaggaaggtagagttgagccagaagcagatcatgagtcagctaatgagcagtctcaccacagcaaccgttcgcaccgtactgcttcccgcaatgcagaagttgagcaatcccaccgcagcaaccgctcgcatcgcatagtttcccgtaatgcagaagtggaatagtctcaccgctctcaccgctctgtcggtcacaattctggtgaagaacgcattccttcaccaccccatgttgagaataacatgcagcacttgatggcagttcagactcaaatcttgcaaggtttagccacagctatagccggtattcagcacaacgcgcatggaaatggccaccctcacatgggcaacaatagatccaagctgacagactttctgaggtctcgtccgccagagttctctcagaccgtcaagcccgttgaggctggcgattggctaaaggatgttgagagaaaactcaacttagtgcagtgtattcctattgagaagacggtctacgcctctcaccagctaagaggacctgctgcagattggtgggagaattactgcaatgcacaccccgaacccactaacattccatggaatgagttcgctgcagcttttcgtgtagctcatgtgcctaaaagcactattgacatgaagaaggaagaatttatcaggctcaagcaaggcaatagcagtgtcaatgagtatctgagtcagttcaacaagttggctcgatacgctcctgaagaagtggacacagacaagaagaagatcaggaagttcttgaaaggagtcacagttggaatgagactccagttgcttgctcatgacttccccacctttcagcacatgatcaacaaggcacttccacttgaggatgccagaaaagaggctactgaagaatataagaaacgcaagtctacccatcaagggaattcttcccgaggtgcaccccaccctcgctttggtcagcctaagcagtatcaccagtcggtcactcaggctaaccgccagccaggctatgcccctcgccctcagatgaaccgtccagcacctccgccgcagcagcgtgccccaagtggcaatattgcgccaaacagtgttacctctttcaagtcaccaccaggactgtcaaccgtacagtgtttccggtgggacaagatgggtcactctgctagacagtgccctcagaatcctaccaacaccaactcagggcatgctaatggcagcaccgccagaactcctactctagcagcagctcagtctcgtcctagctcttaggcaagtggacaaggttcccatgcttccaacaacttcggtcgaggtcgggtgaaccacattcaagctgagaccgctcaggatgctccagacgttgtgatgggtatgttctctgtcaactccatacccgcaataattctgtttgattcaggagcttcctattctttcatatcgcaagcctttgtgaaaagaaatggttggaaaacctaaaatttacgagtaccaatgatagtacattccactggaagggatataagggcaactaaaatatgcccggaagttaaccttagaattgaggaagttgacttcctagccaaactgatagtcctggactcgcaaagcttggacatcatcctagggatggattggttggctaagcacaaaggacagatagattgtgccgaaaggtccatcaccttgcaaggacctggtggaaagcaagttcactttacccccaacactcttaccgcaagtcggtcaatcctaaccaatttgcaagccactcccttggaatcggtgcccatagtctgtgaatatcccgacgtgtttccagaagagttatcgagtatgcccccagatcgagagatcgagttctccatagaactggcaccaggtaccgcaccgattgcgaaaagaccctaccgaatggcagctaacgagttagcagaagtcaaaaggcagatcgaagaactggagagtaaaggttatgtgcgacctagctcatccccttggggagccccagtgctcctggttaagaaaaaggatggctttgagagaatggtaattgactatagagccctgaatgaagtaactataaagaacaagtacccgttgccacggattgacgatctgtttgatcaattggaaggagtgaaggttttctctaagattgacctaagatcaggataccactagttgaaaatcagatctgaagatatccgtaagaccgctttctcaacgcgctatggtctgtatgagttcacagtgatgtctttcggacttaccaatgctccagcattctttatgaacttgatgaacaaaatcttcatggaatacctggacaagtttgttgtggtattcatcgatgacatcttgatatgctccaagaatgaggaagaacatgctgaacagctgaggctgataatagagaagctaaggggtcatcaattgttcgctaagttctcaaaatgcgaattctggttggaccgagtagcattccttggacacgtgatctcctctaacggtatcgaagtggatccaagcaaggttgaagctgtacttgcttggaatccgcccaagaacgtgtcagagatccgcagtttccttggcctagctggatattatcgaagattcatcgaagggttctcaaagctagctagacctatgaccgagctgttaaagaaggaaaagatgtttgaatggtcagcagcctgtgaggacagctttcaagaaataaagaaaaggttgaccactgccctagttcttaccttgccagatatacgaaaggatttcgaaatcttctgtgatgcatcaagacaaggcttaggatgtgtcctaatgcaagagcgaaaggttgtggcctatgcatccaggcagcttaggcctcatgaagtcaactatcccacccgtgatctcgagttggcagccgtggttcatgcttttaagatctggcggcactatttaatcgggaacaaatgtgaagcatacaccgatcataaaagacttaagtatatcttcactcagaccgagttaaatatgaggcagagaagatggttggaactaatcaaggattacgatcttggaattcattaccatcccggta

SEQ ID NO: 16358 - DNA, 1735 bp, Oryza sativa
ctccatccatccgggaagtatgaagatgtaccaggatatcaaggcatacttttggtgggctggaatgaagcgagatgtcgcagaaaacgtggccctttgtgacatttgccaaagagtcaaagaagagcatcaaaggccagctggtctactgcaacccctaccgattcccgagtggaaatgggaagagatcgggatggatttcatcaccggtttgccaagaacccctagcggatacgactccatctgggtaatcgtggatcgactcacgaatcggctcatttcgtgccagtgaaaactacctttgatggaaagaaactggcagaactctacatgacccatgtcgtatgtcgatttggttgttccaagaagattgtgtcagatcgaggcactcagttcacctcaaggttctggaagcaattgcatgaagctctcggaaccgatctaaatttcagtacagcttaccatccgcagaccgatggtcagacataaagagtaaataagatcctagaagacatgcttcgtgcgtgtgccctggatttcgaaggcacttgggaccgttgcctgccatatgctgcattctcctacaacaacagttatcaggccagcattcagatgtcgccgaatgaggcaatgttcagaagaaagtgccgcacccccttgtgctggaatgaggtcgacgaagcactagtgtttggccccgacatactcaaggcagtagaagagcaagttaagctgatccgagaacgtttgaagacagctcagaaccgtcagaaaagttatgccgacaatcggagacgtgatctcgagtttgaaaaaggagttcatgtgtacctgcgggtatcacccctccgtggtatgaggaggtttgggatgtccgacaagttagcaccccgctacatcggcccctacatcataaccgccagacgtggcgaagtggcttatcagcttgagttacctgaaggtcttgcagatgtgcacaacgtgtttcgcgtgtctcagttgaagaaatgtcttcgtgttccagaagaacaagttcccctgggcaataccgagctggaaaagaatctaacctacaaagaaaggccgatcaaagttcttgaagaggcagaacgtcagactcaacgaaagaccatcaagttctacaaggttcagtggagcaaccattcagaagatgaagcaacctgggaacgagaagatcatctccgcgccgagtttccggagctgctcccttaggtgctgaatctcggggtcgagattcttgttaggggggttggtctgtagcgcccgttccgtcgtggcacctagagggaaaatttaaatcttaaaaaccctaattgcgaaatctatttctttgcttgttgtcagtctccgtgccaatctctgatctagaattccctatccatcgtcgaattcaaattccgaatccaactctctccaaattcaaattcctccgcaaaagtctagtttgcctccctcaggttcggtgggccaattcccctctcggcccatctctctctctctctcccttacccttcctctcgctctaccagtgcgccgcacacgcgtgagcgtgcgtgtacgcgtgagccgacgccgagccgagcactatccccctctctcgttctctctccccgctccatccccggcaagctccccgccgcgtttttgagttccatgcgcgatcgccgccgcggtcgccacccgtgccgcgctgagccgccttgccgctgctctg

SEQ ID NO: 16359 - DNA, 3349 bp, Oryza sativa
ttaggatgttacaggtgattccttggaagattggtttcaaggaggacatccacacgtacaggagtcggatgaggagcaagagagataccgaggcgaagattgcagacctagagttccgggtatcgagctacgaactcaacatgcaagaggaggtggcaaggaaggttgatgaacgcatggccgcacatcggtcccatgatccccagccgaccattcctcctgcaatggtgagtccgtcaggaaaccgtagcagctgcgcctcaacggggcaggtaggatcacagagcatggacgccatgcaaacacaggacgaatcgacctgtcccgttgatgacatcactcagcggacaccatgtgagctgcatattcctttcaagaacttatcaataaaggtaagatttagccattccgctagttgctgcttatatatgttgattactaataaataatctctcacaacatgaaggtgacgtcgggcatggccatcccaacagacccttcaggtacttaccactgcaggccgattccagcaggatactcgaaggtcgaagttgagttggtcgaaggcgcgtacgaggacctcgagctggattaccctggaggagacggtgagacgcatctacgagacacatgacatgccattattctatggcgcaggcggtacatcatcctccctgggcgacaagcggcgtctcgtgcaccatctcctccggctccgccatctcctcctcaggatcctgcaccgtctcctcctcatgctccgccagcaccgtctccacctcaggctccagcatcgactcctcctcaagatcctgcaccgactcctcctcgtgctcctacacctactcccccgcaagctcctcttccggcaccttcaaagtcaagggcccccccagctccaccgcctgcccacacaagggcaacgaagaaggcgaaagttgacgccgccaagaacaaggacccggggtacgattgcacgcaagaggagcttgacgcttacgttgcatcagaagtcaagagacaattcaagcctcgaagtccaaaaaagaagattcctatagaccccactgtcaggaacttcttcaggggtatgtctgcatctgtcaaggaggccatcaagctatcggactatgagcgaacgctgaagaaagcatcttctggaaagtccaaaccagtccctcagcttggagagcaaccaaaccaggagatcgagccgttggtgaccggtaaagaaatgacgatagaacaatttattactgacaccggtctaactacggatcaattgctaggagtcgcaccaatcgaaaaggcggaagtaaaatacatgtacgaactcggtaaaccgcttgtcaagcctgagctgctgcagtccctacccacacaaatgtacaagttccatcagctgtacatggagatgagcgccaccggtagagagatgatcggagcgaggatcagggacacggacttcttgcaaggagatgacattctctggatcaatttcaggggaatctacgaactataccagctggacgccctcgacgtctctattatgagttgctggattttgtaagtatatcgttcagttagatttcttactatacgtctcctttaattaattaggtccttgtatataagtagaccatagaaaataatatactcccttttatcgttgtagaatggagattcaaagggcccgacggcggagggttttcgatactggattcatcgaccctcggaaagtaaacgtcgcaatgctcgaccaatatccacaagaaacagaggacaatctcgtccatctcctgaaggcgcaacattacaagacgttcatactgttgccatacaacacagagttagtttaattttactgtcttcctacataccaaatttcattcccgtacgaacttgctaagtgtttcatatgtaatgcatcccacgcacattgcagattccactaggtgcttttattcatcgacctggaggcctgcaccgtcaacgtatatgactcaatggataaaaaagagtctacatttgacaaggttttcgaacttatagacaggtaccgtcataagttcctttgttaattaagaaaatcttgttatgttaattgctactatgaattatagctttaaactccatgtagggcttggtatcggttccgtcatttggtccgcggcaaatggagagaaagacttaggcggaagttcaaatttcctgtgagtacacatgctctacatttatatttctccgattcaaatacatacaagtgtatattaattagatctctcgttgtttgtcatttatttgtagtgcgcaaagcaaaagcagggaactaacttgtgcggctattacgtgtgcgagtattgccactgccttgcagaccaaatcatcaccacaagagagctcgatgtaagtacaaataaattcaaaatttcattacgtagcgatttcttgtttaattactaatcaatttcatacattcatatagtttattcgcatgagggataacctgaccacacacaaggaatttatcgcggcggttcaagaacaactcatgggattcatcaacaaagaaatccttgatcccaagggtgaattctactacgacggaaacacaattcaccggtccttagcttctgagctagcagcgagtactactacgtcgaaatcgtagctagctaggacatataatggattgtaattaatacatgactacatatgtttctatatgcatgtgtacacattttctataatgtaaatatattttggtcatatatatatatctatatacatatgcatttgcataacatatatatgtataaatacatatatattatgcatgtatatacatataatataatataatatatatatatatatacatatatatatgtatgcatatatatgtattgaaacatatacatgcatggtttatatatatatatatatatatatataaaccatgcagcaacagggccatgcaaaaaaaaaaaaaggtcagctcgatctttagtcccggttggtgttaccaaccgggactaaagatcgatctttactcccggttatttcaccgctatctttagtcccggattggtactcccggtttggaaaccgggactaaagggaggttacgaaccgggactacaaagggtttctccaccagtgctaatagaatgatcaacaagctgcaaactagagtgagccattggaagcaaacatgagctcgacaccaccaagtaacgagcttctggtaggctcgagcttggctctgtcaaagctggattatagcacaatcgcagcagaaagaatgaaaaggttgtatttctcactaacagtgctgacaagaagctgt

SEQ ID NO: 16360 - DNA, 1407 bp, Oryza sativa
ttcatgccatccgtactcaaaccaaaccgtatgtttcgtgcgtcctttccaaattctttaaattttctgtcgatgtttcgccactgcgaaccatcggcggggtgtctcagcatcccgtcctgttgacgctcttcagcgtgccatcgcaacattctagcattccccttgttcctgaacaaacgccttagccgtggtattatagggaaataccacatcaccttagcaggaattctcttctttgttagctgcccgttaacttctcctggatcgtcccgtctaatcttgtatcgtagtgctttgcaaacagggcatgcttctaggttctcatactcctcaccgcgatataggatacaatcgttcggacatgcgtgaatcttatgaacttccagtcctaacgggcagactatcttcttagcctcgtacgttgtctcgggcaatttgtttccccccggaagaatgttcttgacgagtttcaataaatcgccaaatgccttgtcactaaccccattttttgccttccattgcaacaactccagagtggtatccaactttttgtgcccctgctcgcaacctgggtacaacgaatttctgtggtcctccaacatcttgtccaatttatgggcctccttttcactttcgcagtcttccctggcgtcctgcaacatctgaccaagatcatccgcaacgtcgttaccatcagcagctatttcctcctcgcccgtttgatttccttcaaatccaacatactgagcaaagtccggaatattgtcgtcttccacttcatcttcttccatttcaacaccttgctctccgtgggatgtccaacaattatagcttggcatgaaccccgactcaaacaagtggaaatgaatagtcctggatgcagaatactccttctgattcttacacttattgcatggacaacaaataaaacccctttgcctgttagcttcggccactctcaaaaaatagtgcacgccgtcaataaactctttggaccgccggtcagcgtacatccattgccgatccatctacatgagtcaaaaaaaccgcacacaaataattattcttacaataatgacagtcatacaataattataagatatctttattcatacaaaaatcataaaatattacaccaaataattcttaaaaactatttgtaaagttttaaactaattttaatgtgttttacttcttttaatttttattttagtttgttttctattatttaatattaactttcactagagttttccttctcaactattttataaaaccttgtttagcaaatgaactaaatttctatatattctttcttccccacacacattttctctctcatcaacttacaactaaattttggagacaaaaaaagtgtgcaaaacataggtgcaaatgtagtat

SEQ ID NO: 16361 - DNA, 3156 bp, Oryza sativa
actaaagatgatctttagtcccggttggtaacacaaaccgggactaaagatcaaatgtgcccgttacccttttgaaccgggactaaagatcatctttagccccggtttttattgcatccgggactattgtggaaatcggccgaccgacgaaagatggtttctccaccagtgtacataggtaggatgagactagagtgatcagtgagggagaccactgacattctgcttgtgcttaatcctcttaactctgaagatcatccttcctgggcccccactcctcttcagaaaagcctgaagctagcttagttaagtgctaactatagcactgatccatgattaaaatactaattacctccacctgttaccagcatccacccaaggactaaggacaaaccacgagccaagctccgactattaagtcattaactaaccaaaagctcctcaatccatgccccctcctagatggcactttatccccttcattaacacctctcccatcccttctaccaacctaccaacctaacccccccaaaaaagagagagcatctcacatgctctccattctctcccccctggccccctgatctccctcctctctatctacaagacaaaccttttctttattttttttctttaaaaactgtgcctccttttctcactggctgctcatgtgattgcaaacattcatcaagaaacctaacttcccataaccaccagcagcaccacaaccacagcatgcaccctccttcactttcatcagtatgtaccactcactccttacctccctcatctttggccaatcaagagcatctccatataaaaggagacataaaaacaagttgcaaaagggctactagcatgcatgagggaaataaagtgtttggaaagctatgtgttgagtgatgcattcttatgaggtctccaaaagggcatgtttagatctaatggtagatcatcaacaacccatgtcttgccctaaaaaaaactatctatatgggttaaaagaaactagaggaagacaagaaagaaataacaactaaaactaactcatgaaccatgtcaccctgatgaatgatgatcgatgaagcatgatgatcactctggccgaggctgcaaatgaggggaaataaaaaaaaaagagaaagagatcacatttcctgatgaatattacaaagagctaagcatgtgtggctgggttttaattgcgaattaagtagtgtatatatatctcctccctcaacttaattaattatgtcattgttgtgctactactgttgtggtggcttcctcctagcggcgtgatgaatctaaacatgtgtgtgctggcctgcatggagggggcgccgccgcgtccgcagctgcacacctcgccgccgtggagcccgaggcggttcaagcacaggcacaccgccgccgtcgtcgccgtcgtcgtcatcgctgcattgccggcgccgttcgccgtcgctgacgcttcgtcgtcctcctcctgcttcatcggctcgctggtctgatcctgcggctggtaaggagctaggctgatggaaaggttgaggtcgatgccgaggtgacgcggcggcggcggcggcgtggcggagctgggctcgtcgtcgctgctgtggctgcaggcctccggcgagttggagaggacggcgaaatggtcagggtggtggtggtggtggccggctggcgcggcggcgaaccgccgtggcgcctggagctgctgctgctggtggtggtcggcggcggcattgagcgggcggtgcgtctgcgggtcgacgccgcgggcgaggagcttgcgcttgatgtgcgtgttccagtagttcttgatctcgttgtccgtcctccccggcagcctcccggcgatcagtgaccacctgcatatacaccatatagatatatgttattatacacacatcgatcgatcagtgatcagtaatatgcttgtcgattcatccatcgccatgttgtcatgatcggatcatgattctatctcttatatagctaatacaatatttatcttctttgcaggatggccggcatggaggcttacttgttgcctagaagctcatggagcttgatgatgaactcgtcctcctcctcggtgaaattacctcgcttgaggtccggtctcaggtagttgatccatcgcagccggcagcttttcccgcaccgcagcaaccctacacacaggtaacactcagtcagtcaccgtcgacctctgaccatgatcgccgccgccatgcacgccatggccggagtagcatgattttgtacgacgttgtatatacctgcggccttggggagcgacctccagcatccctcgccgttggccttgatgtaggcgatgagccgctggtcctcctccttcgtccaggctcccttgttcgtgtgcgccttctcgcagcatggggacctccccatgctagctaggctacctagctcgctacacccagatcagtccctctctctctatatatatacacacacagatcgagggaaagctctcttgttgatgaagagaagaagcacaggagcgagggagggaggaggaagatggagatgagcgggggctggttgcaggtgatgctttgtgggagctttttcgtgagcaaggagagagaggagggtggtggttggttggttttatacgagggagagggagaggaggggagggccccattgacccggatccctctgggccatttgaccgagttggtgcgatgagacgagaggaggagcggaggttggttgagtggctgccatttgcaaaggccctcccccccacggggctggatttggtaggtaggtatacttcactcccagtgctcctcgtcctattccctttccttttttctgtgtctggttttgtttattgtttcatcttttatttttttttcagttcgatttgtttttggaaatgggattgttggttgtacccggtgagtgtaccagatgcgtgagttgggcgcgcataggtaggggtttttcttcgcctccgatttggtgggtgtccttgatggtacatctttctgaaatacgtatgtggtaacagcaaaaaaaaagttttttattacagcatctacggtgttgtataattgtgtattgatatatgaataaggtatttgttagttttgctagtaggacgatgatgatgca

SEQ ID NO: 16362 - DNA, 11664 bp, Oryza sativa
cctgcaccccggaaagtcgaaagatacactggaagcacgtaatgatctgaagcatatggaacaacgcggcgaccttcacccggaaccaaaggagaaaggaagccattacttgagtccagccagctacactcttagcaaggcagagaaggaaagtatgtttgaatgcttggagagcataaaggtaccgtctggatactccacgaatatcaagcgaataataagcacgaaggagaagaagttcacaaacctaaagtctcatgactgtcacgtgttgatgacacaactgctaccagttgtaataaggggtatccttccagacaatgtccgggcaacaataacaaagctatgtgcattcatgaacgcaatttcgcagaaggtcatcgatccggatagattagaagcccttcagaatgaagtggtgcaatgtctcgtcagttttgagttgatatttccaccttcatttttcaatataatgacgcatctgctttgtcaccttgtgaaagagatccgtattctcgggcctatgtacctacacaacatgtttcctttcgagaggtacatgggcgttctgaagaagtatgttcgtaaccgtgctcgtccagaggcaagcatcgccaagggttatggaacagaggaggtcatcgaattttgcgtagaatttatcgaagaccttcgcccaatcggggtacctgaatcacgccatgaagggagactacggggaaagggaactctcggaaggaaagcaataatgacggtagacaacaatttattccgtaaagcccatttcactgttctgcaacactcttcattggtagctccttacatcgaggagcacttggctctagttcgcgccaggaacatcggtaagtccgatgcatggattacacggcatcacattgatactttccccgcgtggctacgacaacatctcatgggtaacgagtcgatcaaccaacaacttgccttcctggcgaggggaccgtctgggtctatcgcgacattccagggatatgagatcaatgggtacacattctacacgagagcccaagacatgaagagcacgaaccaaaacagcgctgttcgtgtcgatgccatgggacacgatggaacaactgccacgtattacggtgccatcgaggacatatgggaacttgactatggtcctctcaaggttcctctgttccggtgccaatgggttaggttgactggtggaggcgtaatgattgatgacagtgggatgacaactgttgaccttaacaaggttggatactcggacgaaccttttgtccttgccaatgatgtaacgcaagtctttttcgtgaaggacatgtctagcaaaggaaagaagggcagagggcctgatgagcctaagcgtcaagtggttctcccaggcaaaagaaaaatcgtcggagttgaggacaagactgacgaggattacgatcagttggatgggcaaccccctttcacggtgacgattgaccctagcatcctcctatcaaatgaagacaccccttactcacgcagcgatcacaaggagggaacaatagtgaggagaaagtacgtgcggtcaaccgtcaccgccgatgtaatgccgtaattattgtgtacacgatgtaaactattttggatgtattgattatccatataaatcaattgatgtatggcatatgttaattacgcacgattattagaggtttcaacaagtttaaatcaattgatgcaggcaagtgacgtaataatataaatgattgttatatttgtaatgcaattaattaagattattagacctgtaattagacttatcatataagattgtgtagtgttctaatattatttgagttttaatataagattattttattgcaaattagacttagtatgacattattgactacggaattggtgcgactcctaggaattgactattgtagtcttaattagacttagcatatacgcacgaaatacttagcatacattactattttagtcttagcatgtaatattatttgagttttaatataatattactttatttgtaattagacttggtatgtaattattgactacggaattggtgcgacaagtagcaattgactattgtagtcttaattagacttagcatatacgcacgaaacacttagcatatacatgactattttagtattagcatgtaatattatttgagttttaatataagattattttatttgtaattagacttagtatataattatttactagctagggttgtataatatacgtcacctagacttagcttatatcacgatttgtaattagacttagcacgtaaggttgtgtagggttctaatgtacgacatttacacttagcatacatgacttagattgttaaaacataaatgtctcgtgacttagcagatgtttcttgtatcaacagatggctgaccgcgatgaggaacagatattgtacgatacaatcgcggagggaagcagccagtactggaatgaagaagaggggaacgaggatccaaaccagtacttgaacgaggaagggaacgtggagagggatgcggaggggaaccagcaggggcacgtggaaagggatgtggaggggaaccaggaggaggaggctagtggtagtcaaccctccgttggacagaagagggcacgcgggcaacgaggtgcagcgaagaagcttgagggtcggcacatcataacggaagtggaagaagatggacgtcctagtgccccggccgaagccgccaagaactatgtacgtcacagcggttgggttgtgcgggataacgtgcctgtcagtacggtgtactggcgaagaacaagggcacgcggagatcatgagagctttgtccaagattcggagaaagagatgctgtggaccacaatgctcgagacattcacccttcctgcgggtacagaggacaaagtgaaaaggtggactctgaagaaaatggcagaacagtttcagagcttcaagggagatctgtaccagaagtatatactgaaggggcagacaccgaactttgacacattcccaaagctaagggatcactgggacgagttcgttgcatataagacaggtgaacaagggaaggcgatgatggaaagaaacaaagaaaatgccgccaagaagaagtaccatcaccacttggggtcaggaggctatagcgtcgcgatgccgaagtgggagcagatggaggctagcttgattgagaggggtatcgaaccggcaacagccaattggccggaacgatcgaagttctggtactatgctcacggtggaacgctcaacccagctgatggctcactggtcttcggctatcagatacaagaggctgtgcgacgactaacagatgcagtggaagcctcctctcagggcacgttccgaccagacagagatagggacgagctgacactcgccctgcagactccagagcatccaggacgaactcgagggaaaggggtgattccttggaagattggtttcaaggaggacatccacacgtacaggagtcggatcaggagcaagagagataccgaggcgaagattgcagacctagagttccgggtatcgagctacgaactcaacatgcaagaggaggtggcaaggaaggttgatgaacgcatggccgcacatcggtcccatgatccccagccgaccattcctcctgcaatggtgagcccgtcaggaaaccgtagcagctgcgcctcaacggggcaggtaggatcacagagcatggacgccatgcaaacacaggacgaatcgacctgtcccgttgatgacatcactcagcggacaccatgtgagctgcatattcctttcaagaacttatcaataaaggtaagatttagccattccgctagttgctgcttatatatgttgattactaataaataatctctcacaacatgaaggtggcgtcgggcatggccatcccaacggacccttcaggtacttaccactgcaggccgattccagcaggatactccaaggtcgaagttgagttggtcgaaggcgcgtacgaggacctcgagctggattaccctggaggagacggtgagacgcatctacgagacacatgccatgccattattctatggcgcaggcggtacatcatcctccctgggcgacaagcggcgtctcgtgcaccatctcctccggctccgccatctcctcctcaggatcctgcaccgtctcctcctcatgctccgccagcaccgtctccacctcaggctccagcatcgactcctcaggatcctgcaccgactcctcctcgtgctcctacacctactcccccgcaagctcctgttccggcaccttcaaagtcaagggcccccccagctccaccgcttgcccacacaagggcaacaaagaaggcgaaagttgacgccgccaagaacaaggacccggggtacgattgcacgcaagaggagcttgacgcttacgttgcatcagaagtcaagagacaattcaagcctcgaagtccagaaaagaagattcctatagaccccagtgtcaggaacttcttcaggggtatgtctgcatctgtcaaggaggccatcaagctatcggactatgagcaaacgctgaagaaagcatcttctggaaagtccaaaccagtccctcagcttggagagcaaccaaaccaggagatcgagccgttggtgaccggtaaagaaatgacgatagaacaatttattactgacaccggtctaactacggatcaattgctaggagtcgcaccaatcgaaaaggcggaagtgaaatacatgtacgaatcggtaaaccgcttgtcaagcctgagctgctgcagtccctacccacacaaatgtacaagttccatcagctgtacatggagatgagcgccaccggtagagagatgatcggagcgaggatcagggacacggacttcttgcaaggagatgacattctctggatcaatttcaggggaatctacgaactataccagctggacgccctcgacgtctctattatgagttgctggattttgtaagtatatcgttcagttagatttcttactatacgtctcctttaattaattaggtccttgtatataagtagaccatagaaaataatatactcccttttatcgttgtagaatggagattcaaagggcccgacggcggagggttttcgatactggattcatcgaccctcggaaagtaaacgtcgcaatgctcgaccaatatccacaagaaacagaggacaatctcgtccatctcctgaaggcgcagcattacaagacgttcatactgttgccatacaacacagagttagtttaattttactgtcttcctacataccaaatttcattcccgtacgaacttgctaagtgtttcatatgtaatgcatcccacgcacattgcagattccactgggtgcttttactcatcgacctggaggcctgcaccgtcaacgtatatgactcaatggataaaaaagagtctacgtttgacaaggttttcgaacttatagacaggtaccgtcataagttcctttgttaattaagaaaatcttgttatgttaattgctactacgaatcatagctttaaactccatgtagagcttggtatcggttccgtcatttggtccgcggcaaatggagagaaagacttaggcggaagttcaaatttcctgtgagtacacatgctctacatttatatttctccgattcaaatacatacaagtgtatattaattagatctctcgttgtttgtcatttatttgtagtgcgcaaagcaaaagcagggaactaacttgtgcggctattacgtgtgcgagtattgccactgccttgcagaccaaatcatcaccacaagagagctcgatgtacgtacaaataaattcaaaatttcattacgtagcgatttcttgtttaattactaatcaatttcatacattcatatagtttattcgcatgagggataacctgaccacacacaaggaatttatcgcggcggttcaagaacaactcatgggattcatcaacgaagaaatccttgatcccaagggtgaattctactacgacggaaacacaattcaccggtccttagcttctgagctagcagcgagtactactacgtcgaaatcgtagctagctaggacatataatggattgtaattaatacatgactacatatgtttctatatgcatgtgtacacattttctataatgtaaatatattttgttcatatatatatctatatacatatgcatttgcataacatatatatgtataaatacatatatatatatgtatgcatatatatgtattgaaacatatatatgcatggtttatatatatatatatatatataaaccatgcagcaacagaggcatgcaaaaaaaaaaaggtcagctctatctttagtcccgggtgaaataaccgggagtaaagatagcgatctttagtcccggattggtactcccggtttggaaaccgggactaaaggggggttacgaaccgggactacaaagggtttctccaccagtggtatcttccatattgctagatttgacgcttgcatattcctccatgggcgcataattccttgagcaacttttgttttagctatattcaggagcaatctgaaactatacatgggagcatgcatacgttttaacctagaatataacaaagcccagtccttaatattgtccaacagtcagctgtataaaccagaggcaatagctaggtaggatgtgctttctacactttgacaacaatcaggtaccacagggagaagctcaaagttgacaaagatggtcatgatatagggtgtgtttagtttctgaaaaaaattgaaagtttgaagaaagttggaagtttatgtgtgtaggaaagtttttgatgtaaaatgatgtgatggaaagttgggaatagagggaaactaaacacggccatagaagagaactagaaaccatttcaacacatatagttgatatatgtgtccgccaaagtaaatacgcactgattgatacatagaagatgtaaccaccggaggaatgttcatttagaactatgttcagaaatttcatactttttttccggtttcgcgagaaaaatgctatgaaacaagctaaaacaactgttctacaggtgctacttcttaaccaccgtatagcagctttctcaaaatattttttaacacaagattgtcggttaattttcatttatgaaaagggtttgctgcataagcgtagtgtaaaagagtgcctcgttttgttggagagcaaggcataatattggtagtccttttataaaaggagttgaaatgtgatagtgcatcgttctaatcaatcatgataaaatcgtaatagtaaagattttattcttaagccccatattttggggcaaaaggtagattaacgttattcctaaattgcatatgctatctaaaagtaacaatgcatggaattgccaagatccaatatttttcctttatatattccgtaatgcttcacttaaaacaaaagcaaagcacctaataaaatgctgttagttattcatttgtttccatatgtcatgatgtcctagccatatttaataggattcatcctttttccctagttttggtttgcattcaaaatgtgtgatgaaaatatgagcagctacaaactttatataccataatatagaatctacctgttgtaaagactagtcagatatcagaaggctgtacttcagctcttcgattgtgttcactattagtaacaactcgcactaacccagatcattagctagatctaataaaagtcggatatacactagtatataatactaagctgaggttgttagatagcctacctcatttgtttccaggtgtagtgtaagcctctctatgcagacgtaagatgatagaggaactgagctgaaaaagaaaagtcaatataaaaacaataagtcgtcatctcgaactaaatagaaattatgtagaagtcagtatcaacggcaaacacatctcatcagatctttgcaaagcatgcatgtgacacctgcacttataggaaaggaccaacacctcaccctacgctgtagttccttaggtaaaaaatgtttatactcgagatctcaacaatttttgccctggaaatttaatcacgtgaggtagaaaatattcccaagatcctatcaatcggatctaagatgtctatagaaaactaatataaaatagggatgcttaatcgactagttcttgctgcaacacagatttgctttttttttctcgtaaacaaaaagaaaatataaagacatgctcatttcaaagaactgccaaagctaaacgtttgcttaaccaaagaacgtcagtggaaagagtaggtttgtcttgtttagtctaagcgtgtgcgcttatggcccacaagagctggcccaacagcaacctgcggcaataataattaagaaatctaattgtcaaaaaagggatcacctatacatttatcgacaaattttctactaaaaatttgacagatgtaattatagtacaattgtagtgtaattacactgtaacttatatataattacactgtaacttctatgtaactacagtttaacttgtatgtaagttcacgtaattttgaatcattagatctattacaagatttgttctggtgagaaagaaaaaaatcacagcacacgtatatgtgaaaggatttgttcccacgacctctattttactgaaataacatgttaccaagagattcttgaaagttacatacaagttacattatagttacagtgtaattacatgcaagttacagtgtaattacactacgattgtactgtaattacatctgacaaatttttggaagaaaatttgtcgacaaatatatagcaaatttggtcaaaaaaattatttttgaactaattgtcaaaatcttggagacagatttgttgagataagtccgtgaggacttgcaacttgcaaaatagacagggattccaaattttcgacactgcgaggcagtgagcgcttgtgaactcaaccaatataatacccagggactgatagctactttttctcttggtggaaggaaaaaccatctaaaaagcatgaacttctcccaaccaatatgtttctattttgtccacaagaatggttatttcagagggcagggtcttttgcaaaacttccttaaaaactggaaatggggtaaacgcaaatggaacaaaacaaaatcagtgactactatagagagttattctcatttgaccacctgaacgtatggtgggacgaatccttttcttaccccctcagcaatcaccaagaagtaccaacagatgacaaaacaattcccccttttctacccttccaccagtggctcaaaacaatcgtgaggctcacacccatgttcctagctgatgatgattcattaggttcctcctggatagagccgaatttaacagcaagcatcctacggttccaatcatacggaggtatccacggcaatcgaatcattcagattggacagctatatatatcaaaggggtcaacgatcatggggctcactctcaagatcttggatgatgtcccagggagcttgtacttaaatttaagtatgtattagtggtatggaccactcaaattgagcgtaatccgcactggcaagaaatccaaatcttttgccagtgtagaagacaagaaccaacttaggagaagatgatgaagatggctgtagctagctgtggacggacagggagaggataagcagagggcttgggaatggatggctggatgcaaacactgggcggtggtagttggtggttggtagcccacatgacatcagcccaaaaagacagcagcccgtgtcttcttcttcttttcacaaattcctggcctgtgcttttggcaattgctctagtcccccaccgcatctcatctctcgcacctccctttcagacgtcattctcggctggctcgggtgagttttttatggcttttgggtgaagtgttggtttttttgtggtggggtcaccttctagaagcacaagtgatccaatgtcttccccacaaatggtcagtggatgcagcgtccgtttgcaactatccttgtcaatgatctactagcggctcaggcactgtttagatcctccaaaatagtaaaagttttatcattttaaagcactttttaccattttggatctaaacactagcaaaagttagcaatttgccatttgccatttgctagtccatagtagcaaattgtgccaaaaaaatgctttggatcactctctctctccaccaaaaagtgctagaatggcaaaagttcaggatgcatctaaacaccaactagtacttttacaataccaaaaacttttgccattccaaatgcatttaaacatgccctcagctgcaatggatgtgaaaaaggtggcatgcagtgtgccggaatcacgtaattattttttccaagaaagaagaggcagctgctcctatacccttaagaaaagctgaaactgataacagccagacctttcctagtcatagccggcgcaagaattcaacggcttatcgattaactttaaatccagcatagcggctccattatacaacctttttttttccaatgagaggtttgggttggatcgcttccggcctacccaacgtctaacaaacggtcaagatcgaagcaggcaaactttgatgcactttgtctaaaatcctatcacccataaattatcgggtgctagctagtgagtggtgactggtggtgagtgtgcgctgatatttttgttaagagaacaaaagtgatcttatccttctgcctaacaattgtaacatcacagtcgcatgcccatgatgatcatccccttaagatcttgtccccttgcccatgtatctaagtgggtgtattgtgtacagacctggttatgtaggagtgttggagtcttcagaaaatgtacgaagcatggtgcatgcctgggggtatggaaaggaagtatcaccacatgcgtgcaagcatatataacctacaaaaaaacatatgcaatacatgtgtaagaatactctgcaagttactgtgccattgtccagtctgcctcagctctttttcaaggtgacttacaggatgattatttgagaaaaaagtatctaccttgcaggagcatctgaaggtgctcgtccaagtaccataaactttccaaagtcatggtctttgacaaatctattgattaccattcctttaattttgatgtaccttgaaaaaggaaaccacagggactacaagacgcgcaaacaccaggtcatagtaacctgcatatcaaggcacgtccaaaaaaatgctaagattgagacatcaatacatcataaaaatcttttgttctatttccccccaagtcaaataaaggaagaactatgtgaacttaattagtttgttgagtaatgaaaacagcaattgcttgcatggttactagaaaccccatcctaatctatcagcatggatccaatatcattactgtcaaaacttttttgttctgggagtactaaatcatcgatccattgcatccttagtgttaaaccttttcgtgaatttagtgttaaaccttttgagttgggagttcataagatcaggatatataacacacgtcaaaattttaaattgtgcaaatggtatatggtatgtaactatgtatatgtaatgtatg

SEQ ID NO: 16363 - DNA, 38702 bp, Oryza sativa
  unsure (1)..(38702): unsure at all n locations
agtgcccaggtaacttttttctcttgaaagtcacataaacttttcaataaatctactttacaaagcaaaagagaagaaaagggttaaagatgttttgacattcatactacataggatgagttaggtctagtgaaggttctacccatgagaaggaccgtgcaaaacccaaaaactaaagtaggtgggatattgtggaagcatgcggatatgatgcaaagctcagtatagctttacctaacaccacagcttgagcaactgaaagatggcatatatgatcttaagtaacatcaatgatgtagagtgcaataaccccttctagaacgaggtaggtcaggtccaaaaatacttaagacctttgatattgcatcacaaccggcacctaacaagagaaaggattaaaaagatattataacctctagtgcacccaccaagccactctggtatgataaaagcttgaagatatggtaggctcgatatggattggaagcttctatgaatctttgtcattgcatcacgggtgctacctaacatgcagagaacaagagatagtttttttcatatttgcagaatgacatcatgactgtaacattttgttagtaattaattgtaccactgtccttgtctaactcctattttcagcagactgtcaaaaaaataacaataagaaaatcttagttgttacattactgttgttccactttcaagcaatagcaactaattaatatagtgattcatgtccctctcatgataggcaagagcaatgtaaatattaacaatatgtacgaaatgatatgacctgcacaaaggtgactaagcttgtatggcattattaaaaggaaatgtctatccaaaggttcaggttaggccttttagacaagttatttaaaggagtttccatggtagagcaaaattgtctatgaaataaatgtttgttgcagcagaagcctatttagatgtggttgactttaaatgcataaagcaaaagtgatcagctgctgaaaaatgtaccttgctaggacaatatttctcaaatatttgatgaagataaatactgtacagcagaagcaggaaactcagattctgggagaggttgtgttttctaaagaggtgtgtccaaaagatgctaactgctcaggtcatcctacaaacagacatgagatgataaacctcagagacagaatacccatgacacaagctaaaaatattttgctgcacatggttgaacagttggagcaattgaccagatgttcaaaataagaacttctggatgggctggccaattcatgaaaagaacatagacatggggtccaattcttgttcaagcatttagaagaaagcaagaattaacaaggccagtcatgggccttgggcctgaattccagaccatcatttaagtcacactacaaaaattatgccctccaagaaaatcatgccctagttttcaaggaagacagacaagatggaggaaaagatattgtgatttacagatttccatatttacaccgcttcttgaatctttgtcgttgcatcaccagcttgaggattattacttcacaaatatgattagttccttacttcctttggatgttgttgataatgaccgtgctttgatgctcaaatcatgggttggaaacttatgctttttcctttgaagtatttgggagcccaccttcattttaaatagacttagaaaaaaaagataaccagcctaatgttgataaagttgtgaagagtggctggctggagggtcagaattctatcctatggtgggcaattggttctgattaaatttcttgtttatctacttttctgttcttaaattcattgtttggtctgtgaaggctataatagatttctgatcagaatgggtctgggtaaatgaaaacactcagatgatggttcttgttgattctgctctgaaaatgaatctgtaccaaaaaaaaaattactgcaatgttgctaaaatcctttggacagagatgtcgaacatgttatctcgccaggccggcagaagccggccgaagtttattaagggaagtcagacatgctatctgttttggtaatagtttaaactttgaatgtgttgctataagtggaaacaagatttaacatccttgtggaatatgagaaatgacctactttttttttctgtgttacattgaagaagtatgaagattgtgcagcacaggatgatgctgacattgaggaactggagtctggggaatgttgtgcctagacagctattatggctgatggaccagaatatgtaaagagtgaagaaggggctggtacagaagagattgaagattgagctgtggagcaaggggcagagcttgaagtggaggaactctaccctatgtatgagaagtaatcagaaagcatgtcaggttgtttagatttgtgtgccaaaagcatgcgttgctgtctacaaatctttgtactctgggttagtgtgccgtgaagtcatccatgtgtggaattttgggcctgtactgcttcttcagcttggaactctgtaaatatgttggtctcgttctaatgaagtccagaactgatgcttagccctttggttctaagaattattaggattatccttgtttccttagtgacttacctccctgtattcccttattaacagcatcatgccattgggccaggtatgttttagtatgctcctgagctccataaaaaaaccttaaagttctagtcaaggtcaagtacaatggaaacaagaacagtatcatatccactgggcaatcatctgatctgtgcatgaccatagataaaccactccattatttaagatcgaagtttcaatgcaagcagaaaatttaatggagtgtgccaagaaatagaagattagcatgtaagcttattttcttcttgtgttttatatagacataggcatatccgcatatatcaggattgtcaacatacctgaaccagagtgccttaccactatcgtatcacacagatgcatttgctccagccaacagtaatctcttttatatatgtacttctaatctatctgtggtacgcattgatgcttcatttgagcagtgctgatgtatatccctgcagaactgaaaagcccactgaaaaaaaggaaattttctgcataattagtatttgtattggacaaactaaaatgcataaccattcccttaatcctgaactcaagatacagtgcaactttctagtgacagagcatcagaccataaaatgtgggaagattgtaataatattggtcgttagttatgaactgctaaagtgctaagacaaaccactacctgggtataaatataaatagctattttgttcaagacaaaccactacctgcgtataaatataaatagctattttattcttttcttttacaataaatagccattgtgttgattgttgaccactataaaagacatggcggaaaacttgtattgtcaactaagtatttacaggataaagcaaggatcaacattcacatttcaattggtgaacatcgaccaaatgctcaaccgtgcgaaaccgtatcagcttactatggttgagaccaatatgcaagtcatgttgtctgctacgcaacaatttaggtctgtacctgaggtcatgctatgctctaggcagaaatttacagattcctataataagaacctgaaagccaatttttcagtcacactgaccacccaattgcaaccattgatttcaaattggcaaattggttgcaattgggtggtcagtgtgtgtttgataaattattttactaaaattcatcgaataaatatttcaagtaatatcggtcacatgaagcagaactgtatgatacgtgggcccaaaattatcaaataataaacatgtctaaatatatccaatattggacttgttctgttgcgtattccgaataaaaaaatagtggtgcaaacagatttcaaatttgatgcacagtctaaagttttgaggtattcaaaataaaaagagattgactagtactacgtgtaaattacatttgatctgttggtggcaactacattaaaggtgggacccactgtcattagtagagataatttcctgattatctccagacttcagtaccacgtcgatgggttagctcatctctgcgctctggcttggcttatcacggagattaacgcgtggcgctgaaagtgcattaatccccctagtgggttttggtgattaatgacaaatgtggttaagggactaatgagttcattaagtgactttcaggtgcattagtccaaagtgtggaagatggatgcttggagaccccaaaaagtacaaaatcaaagcggaccggaactcgagaagtgcataggatagtttatcttttgaaatcgagtttttaggaaaaaccgtactattaaaaggggttccaggtgatgctctgagatatatcaagtgctcttagtgtgaaccaagtgtcaagtttccctaggagtcatttttgcaaatactccatttgtccaaaaatgcaagtccggaacttactgtcttccaggtccggaagttccggtcttgtgaaaaagattttcctaagtgtagtccggaagttccggtcttccaggtccggaacttcctgtctagtttccagttcaaatttgtgagtaacggctagatgacgtcacctagccgttatacatatacagctcgtttccagctcgttccttggccattccactttcatttttcaaacctagagctattgctagcctctcccaagtgtttctggccttctccactcaatctagagcctaattcttgtgagaaagagagattgagagggagagaagaagatttggagatgtgtgaagactagatcttgggtgagcacttggaatatctcgtgggctgtcatctcggtgcttattactcttggagatgatctcctagacggttaggtgtcgcccgcgagaatccgttgcatattgtggatgtcccgggtaagtttgtgaaggatttcctctcctccgaaagggaacgaggtaagttagtgaagttcttgtgctgagattctagaggctttccaagtagagcaacccacacttgtggtggatttctagaagtaggttgagttggatcttggtggtcactcaattctagaaatttgcctaggggtgtttggggttgaaggctgtggattttctctggggtttttgcacaagtgaggcaaggggttaatcgagacccagctctttggagctcctcaacggagagtaggatcgcaagatccgaacttcgggaaaaaatcgctcttgtctctttctgtgatgtttcctgtggatgattctgtgatatatcctctgcttagaatacctgtgcaccatcttgtgaagattagcttagtctcttgtttcgaaatttgaatttcatctctgttctgttacccggaagttcctgtcttagaacaccggaagttccgggcctgggaggccggaagttccggagttccttaccaggaagctccgggtctgtttgaattttaccgcttcgatttgtttttaagttttcagggacagcctattcaccccccccccctctatgcttcatcaacgcgttcaggcgctagaaattcggaggcaatttccattgcctctgcctatataagacgtgaaccactaggtgtcgcgggagaggggaggagaccggagaaaattagaaggagaagaagagaagcagggagaggcgcacaaaaacaactcacattgatctatttgctggtggtgttccgaggagattagaaacttctcggtgactcgcctgcagttcgtgagcaagcgcgccacagtgagattaaatatctctcatcgtcgagccgatgtcgcaagtggagatgatggtggtagatggtaagtatgataaataatcctctccaaccctgttggtaaaccagtcgttctaatggattatcggagtacctccttctcatcaattggagcgctttgaaaatcaaatcgcctccattttcttaaagcataaacttggatttgcctaatctgcggattggattatcctcgtattttttataatcaacactcttatttttatggtgcgcatgccgggagcgagccctaaattataaacaaaggaggagtggagataaaaaaaaaaagatatatgctatgttcatgaccgacgaggccaagcaatgcattggctaaagctgaaaaatgctatggctgttatatatgtctatttataggcgaaaccatggccgagtgctgacaaggccaggtcactatactattaacacgtctagtctaaaatgaacgggagccggatacaccgttgctgggcactgacgaggcaaaagcaaccacaaaaaatccatgtttgatgaaggccgagatacatgactgggcaccgatgaggcaaaagtcacccgcttcaccaaatttcctctacacgccgacgtgatggtagtgtactgtgaccgggttttggtgaaacaaagccacccgttacacattcactatattcaccgtaaaatctgcaccaacctcaaccttcagcgagcaaataatnnnnnnnnnnnnnnnnnnnnagcgcagcttaatcggaggtattccataggctcgtcctgtggatgtaattaactggtagcctcattgctaggcgccgggaatcagcgaactgcacgcaatctccagtcagcataccttttcattaagcatttctcgcgaaggcaaaaggcgaactcctgcgggagccctcatgtatttgtaaatattcattaaatacagggtttccctattttctgtgtgttcattgttttgttttcatcaaacagtgtgaatcgctgcagctgatcaaaatcccaaaggactaacactgaaaccaccccttcttggtgaatattacatttttgctgttgtcgccgtgcaaatgctcccccccccccccccccacacagacaagagacgatgcaattgtggctgcggcgtatgccaaactgccaagacggtgctgatcaccgatcagccaaaccaccgagcaggtcgcgggcgtggggaggcaggcaaccaacaacccaacgtaccagagctgacacgacgagaatcaacgacgccgccaatggcgaaccaaaatcgcaatcccggcgccgaatctcctctactctgtggaatgacgcgaacagcagagcagagacaacacccgatggaaactaccacatcatctgcaacggattgctcccccccccccccttcccccatccgcttaaccccacggattgctcccccgatcccgcggcaaaacccctcaaacctcacatcacacgcagcaacaagcaaacaaaccctagatggagtagaaaagctggagagaactaactgtagatgcgttcgcgggagctcaccgattgcggccggcgacggctggtcccgaggaatcctccggtggcacgggtcgctcccgcggtggcggcggtgagctccattgccccccgagagattttgaaatgggagtaaaaatcaagagatcaaatcaaaatgtcctcgaaatttcgaattcttttttttttttttgttgagagatggtgttgtgcacttgtgcgttagcgggaatgcggcggacgacggcgttttggcgctgtgacactggtgcgtggggcccacttgggaagctttcgcatttgcaagggatcgtctcttctttgctaggcccaccactggttttatcgaaatcattaacaggtccttccaggacttggattgaaaaggcgtgaagataagcttgtgatttttaactcttacatatgggttttgcgcttgtgtaattgtgttgcctctagcacctggccacctgctacgagaaaatggccctgctccttttataatttttctcaagatttttaccacggattatttgctcctcacttcttaaaaaatatgatttcttaaaaaaaaaaactttctctccactacagtgattagacaacctattctaaactatttttaagtttagtcttcaaaatattaatcattatattaatcaaataaacaatccgtgacaataatccaagcaaatgtatatgcatctcatgttggtgtcatgattggggatgcgtcacttagatttgtgttgtgttgatagcatgttttagattgttgggttagtagtatattagatcgccaaaagcttggatgtgacataagagttattgcctgtataaactatgcatattagcatgctcataattttggatttcctctcttgtatgtctagcaataagttgttcccttttatttttagtgccccattgctaccaaaagattagttacgctaggtttaattaaaaaaacataaccaatttactaatgaaaggtcattgagatttaaggtaagtgttatatttgctgtgataattcaagtcttgtcctaattttatcaaatggaatcacagtttcacatgcaaattaaaacatgaaagatttgatgaagtcaaaatagcttgtcatgttccgctatagacaaatacatgttttatacttgtcaaaggaaggtcattgacccctttgacaatgacagatgcggcttcatcagagaaaaggcacaaaaagtgacagaaactactgaacgtggaggccactagaggtgacgtggaccattggaagtataaaagaccaccagcggatagtaaagacctttgagagagtttataccacttagatccaacagagtaggcttgtcctatgaggccaagccccacaacaaggcccgtaggacctagaagttggaggcttgcaaaaagacatgtatgcccttgtacatacctatttgtaaggggttgggatataaaattacctatgtaccataccctagccctatacaatactgggtttcaagggaaatgcaatgaacatattttttaagaattaagaagattagggtttgagcgtacatcacatcaagggcattggaacttctctaaggctgtatttggaaccctaagttcccaacccctctacctcgtattccacgtgcacattcaaactgctaaatggtgcatttttttgcaaaaggtttctaaatgaaagttgcttaaaaaaatcattttgatccattttttttaaaaaaactaatacttaattaatcacacaccaatggaccactccgttttccgtgcacactgtgcgtgttgggaacatatgcttccgaatacagcctaagttcttgccctaacaaattgttgcctttgataacactacctttttatttgttatacataggatgatataaattcgtcaatcatacagtaattagcatttacttccccctctcaaatatatgactagcctaaaattgcaccaaaagaaacacaaacaataattaaaaggctagcatatctatcttctccatttctcatactcaaaactagttggtggtctaccctaagccttagattttgttacctagactctcgttgtaatatacagatttatgtctagatgaaaaaacaggtcttttatcctagtatgagaaagttttttttttcttattttctttttcaaaaatatattgtagggtcataaccggatttagttactcgtgatcaatctccacaaaactatatttgttgaaatgagctacataaacacgacatgtttttcacatgcaaaatttagacacttcttagataattcgttcgtgagcataatagcctttgcccacgatttcttgaaataaacacccacttaacacaaactaaacatcttccctagctaaggctaacttatgccttttatcattttgttggtcatgatgtctctataacaagctataattggcctcgaaactaaaccttggtgaggtcagcttttaagcaaatgacccccataggatcatagtctctcatgctatgtactgtagatgacagcaacaaattatatgagcgtgtgctttcaatagaattttagcaaaggttaaggagctgctgctagtctccatctatttgaccttatgttcgggcacatattcccggagcgcgagtatagtgatatatgtgccttcactcttatcttgaaaaaaaaagagacaaaatttaagactttatttaaaaaggatggtcatttataaaatttgaaaagtataaaaaaactacttctgccttactttcactacacgaaacaaatgaaggatcatgctgcatgaaataccacattccacaggcacctcccgcaaaaacaccgaaggtccccgtatgaggaggcagctcgtgctcgggcggcgagactgagacgagacgcgagaccaaaccctcccctccccgaccgcgccccgcccagatctcgccgccgacgagatgcatcgccgcggcggccaccacctccacctcctcctcgccgccgccgtcgtcctcctcctcaccgtcgcggggctgcccctcgcttccgcctccgagtccgaccacaaggtgcgttgtcgcccgctcccccaccccctctctctctctctctctctctctctctctctctctcttccttccttcctttcttccttcccttaaccctagatccgaacccccgacgtgttcctcacgctggatccgccgagtcgccgcgctggatctaggagcggcggcgcggtttcggtagctttgggttccgtggcctctttgctttgggcgagtgctgcgtggttcgaggtgcaaggttgatcttagcaatatgataggaagggctggacagctaggaatacggaagctatgggctggaggattggttcgaaggctgttctaaaggcttgctacttgatgatcttgtttgccatgagagtgaagaaaaaaatcattagtggaaacacatttggtagaaaaaacgtttttggtgctgtagtgcttcgattagcttgttatttgagcagacaagccactgcaattgtattgctgttcaaataatctgtatcatgctaggcctttgaataagattatgacagcagacttttcctgccttagcttcacatcatcaaaattttgaccttttggtggcgcatcaaaatgctgagatgcgaagcatttcatgcttgggatacatgaagcgcacactgttgtgggcttgttacagttgatttattatcctttggcgccttgacggggcagttatccttgtccttgctgcgtcttgaatgttttcattaattcttttttcctattttggcaaagcttcccaatgtcggggagcttactagttgaacgtgtaataatggcatgcaggggtggacctgggaacatacattctgggtcaatgccaatgagcaaaaaaggagctcctgtaacacggtgttcacgaatctcgaaatcccactctcacatgcagccatcgaaagagacaagagaaataactaatatttaatattacctttatggctgttttttaggtccgctattctatttcccttatgctttgttggatttgaaattaagttactagttctagattatatggctatgcaaatcccaaaaagactttttatattggttgaaccattgaagccaaactttgtgaggtgatcctggaatacttatagcaatatttttgtcaggtgttctaatgcattttagcagtcgacgaattttcatgtgatcgaataagacttggttgacattgtggtctctgtacaagaacttttggcacactagatttggataaaattatcattcttagaatcataatggtagaattctgttagataaggtaagtatactctgtagtgtaattacatggctctctagtttgatgtggaaatctgaaactgagtgtgagtctatgtctctctttgattgtgttctgttatgctgcactcatgaactgtgatatgggaaaaatttttttaccgaaagtctatgcttcttctagtaagtattactgttactattctaaaaggaaatttccaaataagcaataacatatggaacttgcatcctggaatccacctaagaggcaaacagagactaaggatgcagttttctagctgaaagctgaaatactgatttctgtcaagtctatgttacatatctacattaaaaaaaactcaggtatctaattatcaatttaaaggatgatttaataatcatctctaaaaatgagaaaattgcatgagaactttggctatagttttttatagaacacatttcatcgtggttgatattgaatgtattgaacagtctaaattcttcgtgaagcatggaagagcctgcaaaataagcaagttaggaacttaggatgaaccttaaggcgttattttcaatttggtcattcttcttaacactatcacaaactggtcatgatctttgttattctctataacttagaaaattgcacttcgtaccagtatacagattcagaagttttgagtgttactgtttaactttattgtcgcttagttgccatttctaaaaactaagcctactgatttgtaatcacactgagaacaacttttgtatgttagtaatcacttcatctacctgttatttaattttatgcagtacaaagctgaagaaacggttaaactctgggtaaacaaggttggcccgtacaataacccgcaagaaacttacaactattacagcctcccattttgtcagccatctgaaaaccccgcacacaaatggggtggtctcggagaggtccttggcggcaatgagctgatcgatagtcaggttgatataaagtttttaagtaagttgatcttttcataccctccttgattttatttacttttggaatgtgcatcaatgtatgttccttgcaactaaccgatttccctgaccattttacattaaacttctttgttttagaaaatgtggagaagggtcccatttgcacaattgaacttgatgacaacaagattcaacaatttactgatgccattgaaaggtcatattggtttgaactcttcataggtatgaatctgcatttaattgggcattgttttcttattttgtatgctatttctcatttctgagtactgacattctttttatccaactttctctgcattgctttctattgtccaaccgcctagatgatcttccattatggggtaacaaattctaaacctaaatgacatttcttttgctttaacactttctaccctctacctctcttgaataacatgcaagttgcctctgagcaggttttgttggtgagactgacaaaaacaacgaaaataagcactacctctacacacacaagaacattgttgttaaatacaatggtaacagggtatgtgctggtctgctttaagaccttaaaatattagctgaaacctattatactggctaattatttttttttgcagataattcatgtcaatcttactcaagagtcacctaagcttcttgaagctggcaaaaaattggacatgacctattcagtgaagtgggtgcaaacaaacgttgcatttgcacgacgttttgaagtttacttggactacccgttctttgaacatcaggtaatctttgttcgaaccaacattactttttatgtcttttgctggacagtttttgtgctataatttactttgctctgtggtggttttgacaaagtggtagactttattttctttaaaactctcgaggaattgaaatttacaagaaaactaagttctgctgcaaccttccatgttcagatccattggttctccatcttcaattcgttcatgatggttattttcttgactggattggtatcaatgatattgatgaggacgctgagaaatgattatgcgaaatatgctcgtgaagatgatgatctggagtcgcttgtaagtactgaacgtgaagcctcacgcttacaatcacttgtgtattccctctggtagcaggagtcattttttgtttactttaatggtctttgagatgtaatcttatttttgaatttcataatggattttacagtgaatctactcatcattttcatgcaagcaatctaatattcaacaaaagtaaactagtcaaacatcaagttttacagtaccctcccgataatgataacttttgtgtgtgtgtgtgtgtgtgtgactggacgaattatttgaatattcatagcaaatcattttgcattattttcatctaatctcttgatagttttgttaacttatatttttcttttatcaggaaagagatgttagtgaggaatctggttggaagcttgtccatggagatgttttccggcctcctcgtagcttggtgtttctttctgcttttgttggtattggcactcagctggcggctcttattctgctcgtgattgtattggccattgttggcatgttatatgttgggtaagctctaaatcagctttcttagtatcctttttttctgcatcgcatgtgcacatgtattaggcatagaatacgcaccctttggattgaaaaatggaaatatgggcaatacgagtggagtctttggtagggcaatatgaaaggccccaagtgacaatacagttgaaggtacttttggagccattaatatgcttgtctggaacatcactaattgcacaaccctaatttctacaaggtgacggatactcgaatagatggacaatgacacaatagtataagcatggtatattttatacctagagatgcctttgaccccattattaattttgatttcaacctcattgctatataatatggcttatttgtttagtccgattacaacctctgttaaaactcatccacgctgccttctggagcagtggtctctttatatcagcgggctcaactctatctaccataagacattggtgaaataagtgtactgctttcattaccatatggaataatgttatagtcagataatatgactatgaatttccaatgtcatttttcctaactaaaatatcatactcaacttgccagacgtagcttaccattacatctgtattgtgtactacactgttttatctttcatttctggattgacaataatcagtaatgtttgttcagctagctagtatttctttgcaccctactaaatgctgtacttcttatttgtcagacgaggagctatcatcacgaccttcatcgtgtgctacgcccttacatctttcatttctggatatgttagtggtggcctctactcaaggaatggcggtatgtttctatatatatagtttttgttgttggacttgcccgttttattctactatcctgaaatagattattcagttttgaaatgtttcaatttctgtgtttcttatctactgttcactgaatccatttctgatccatggcaggcaaaaactggataaagtctatgatccttactgcatccctttttccgttcttgtgcttttcgattggattggtgttgaacaccattgctatcttctaccgttcactggcagccataccatttggcacaatggttgtcatatttgtcctgtgggctttcatctcttttcctttggttctattgggaactgtagttggtagaaattggagtggtgctcccaacaatccctgtcgtgttaagacaattccacgtcctattcctgagaagaagtggtatcttacaccctctgttatctcattgatgggtggactactccccttcggcagcatcttcatcgagatgtactttgtgtttacttcattctggaactacaaggtaaagaaaacatatcagtgaacactaatgtgcttctcattctcacttctcaacaaattattttgctagaacagatggcatttacagtagatgtgtaccaacctaaaactctttttaatttgatggatagatagtaaccctatttctttggtatttggcaggtttattatgtatatggtttcatgctgctggtttttgttatcctcataatagtcaccatatgtgtcactattgtgggtacttatttcttgttgaatgctgagaattaccattggcaatggacatcattcttctccgctgcatctactgccttgtatgtctacctatactcaatatactattatcacgtgaagacaaagatgtctggcttcttccagacaagcttctactttggctacaccttgatgttctgcctcggactaggaattctttgcggtgagcatttaaacttgtattcattgtatttcaaattgccacttggtctgttttgacaccacgtctttggtttaggtgctgttggctatctaggatctactctctttgtgaggagaatctacagaaacatcaaatgcgactaaattgctactctgaacatcaaatgtgaccaaagggctactccgttgccgatagatcctatcagcgaagtgtgtgttgctggcgcaggtccattgtggagtaatgctcataagattctgatcaacttttggaagctatacaggagattgttctccctttgttttaccttttctttttatgtttttcttttacttcatttttcttcttggagctggcctcataaatgtatacctcattagttcaggaattagtctcagtaccgggaagtacatttagattctcattttgtggtggcctcttttggccagtagtaggatatcattgatgaatattggtgcagtgtggatccaatccagtggctagaattgcccctcttatgaatcgctatacatccaattttggcatagccttgtagtatatgcaaactaatacattcaagttagatatatatggcctgaatgggtgaagttctatttcttcccctgcaggtactgttgaaacatgaattcgacatgattattatttagcctttggtctgagttttcatccttgctgaattgtctctgtgtttacagcatcagaaatcaagcgtacactgaaaatagacaaatgtgtcatccacatctgtaatgttttgcttgtttaggtaccttgctttatgatagtatcagcaaatgatttaagataagataaagatatgctgctaaccagatggacatcgtaacgtcgtatatctgcaggtttcattgtacaggtgtacagaatttatatacatattcgagtatataggtatatagacacactggtgttgaagacatcaacttattaagttattatgtttatctctacgcacattgagagcatatcaacgtgtcatatcactggacactggatgaccggccatagtagcactttctagcgatcaagcttagttgacgtttacgaagcaggcacgacgctccaagccactaagctactcccacgtgaccagctcacgtgtcaccatcctgcacgttcacggccccatccacagcacacgtggcacggcctcacgagccacctggacggccgaccagccggccggcgagctttaaaaagcagccccatgtcatttgctgatcgatcaactcatcaacccgtgcagcaatccatccatccatagccgatctcagcttttccattcgcatttctgcttaattagcttagcaagcaacgaattaactgcaagagagagcgatgccgtcgctgacgacggggaggtcgccgtggcggaggaggaagagggggacggcgacgacggcgaggaggaggaggacgccgacgtcgctccgggcgctgtggcgccggatagtgcccaggacgtcgacgacgacggcgccgcgcgtgcgcacgaggaagcccgggctgctgtcgcgcgcgttacgggtgctctcctgcggcggcgggaggaggtcgcgcgccgcacggcggtcgtgatcatgatatcatcgtcgccggcgccggcgaggttaactgctcctctagtcgcttgcgatactacgtggagtacgtgagactagtggtgactgtgccgtgtgtgtataatttactgcagtaacaagtgtgttctgtgttctgctttgctttaccgggagcaattacgtgttgtatgttgtacactactatcttcttgtttaatatgtgtatgttgtactatttcatcaagtgacaactatatgaaaccagtttgttttctctacacaccatgtatgtgtgtcgagttttcgctcgaaaaaaaattgaacttctatgtttttcggtgaaccaatttgagtataatttttaacaccgaggcgaaccctgaaagaattcacgctatattttcgtatctagcaaaagaaatacataaaagaaaagataatagtaggttaaaattaagcaagaataatataatagtgggctaaagtaaggataataataagctataaatttatgtggataagagataaaaaaatatggagtattgtaaagctagctaggagtgttgtagggctagctatacacgtgtatatgtttgaagatattttcattaaatttatagtgcgagtagttaacctattcataagggcgcgagaggaaacagagaagagaaaacctattcatagtggcgcaagagaaaacctattcatagtggcgcgcgaggaaaagagaagagagaaatagggttaataaatggttcgaccgcgaatgctaagtagcgcgcaccagctggtggcggtccctcctcagctggtttcgttctctcttcttttatctctttttctgatttttttttaattttcagcacacgtgtttttaaatattttgcattaaaaatttttaaatcatgatttgaaaattttcaaatattaactaaaaaattttaaatgtgaaattgaaaatatttatatctcaagttgaaagttttaaatctgagttaaaattttccaaaacttgagttgaaaattttaaatttaagttgaaagtttttaaatctgggtcaaaattttttccaaagttgagttaaaagtttttcaaatttgagtgcaaatttaaaggtttttaaaatttaacttaaaaaattaaaattttgagttgaaagttttcaaatctagatttaaatttttgaaaatttgtcttaagatatattttcctttttattattctttagttaaagaaaatatcgcggaaaaaatctcttatcttctaccattattatcttaaactattattatctaatacttcctccatcccaaaatatttaagtcgttgttttttttaaatgttcgaccagcggcgcgtacttgcgaactagcgatcgcgattcgcgcggccactccgttgggggatatgctacagtatcgggccgatgtggggctgtccatcatccaaccgacggtccaactgtccaactgtccagcccataacgatcccgaggcccatggactatctcacttctcacgactcccgatgcctccggcttccacgggttcttcctcgatgccttctccggcgccgtccggtcgctccggcgccgtccgacgacggaatccctcagctccggcggcgccggcacgccggcgccgcaggagctttccggcgcgtgggggaggggagcaattaattaattaattaattaattaatacaagttggcaacagcagaagcacaccacgagcgccccacgtggtcagtggtcggcctcactgactcctcctcacttcgcattgattcgatcactctgctctactctctactactactagcttctgctgcttcttctccgatgcttcgatcccgcgccgacctcgatccgcattaactgcccctcttccgtacggaggagagcgatcgagcgatcgatcgatgctcgccgtcgtcgcgggcggcgggttgaggaggtgtgctagctagcggcggcggcggcggcagtggaggaggatggtggaggaagggaggtcactggcggagacgccgacgtggtcggtggccaccgtcaccacgctcatggtcgccgcctgcttcctcgtcgagcgcggcatctcgcgcttcgccaaggtaaggtatcccaaacacacacactcgcttcgctttccccccggcttgatccgatgcattgcaagtaatcgcacgattgattggcttagagtactacttttctcgatcaccaaatttttctcccttcgcttgcttcatgtgttgtccagtggctgcgcaagacgaagcggaaggccatgctcgccgcgctcgagaagatccgcgaaggttagtatagtaacttagtaaccagccaatcaccaccttcagttgttcatctgcgtaaaagtaattcatgtaattttgcagactctgtaactgtcgtcttgatttagtaatttagtcgttcattcatgtgtgcttcctctagatttgcctgcccatcatagttgccatttcccttaattttatcctcatagtggagcaatgccatatttggaatggtaaaagtcttgcttcttgcaaggtgtttgattgtattcctcaccaagggaaacccatgcctgattgcagagctgatgctgctcggcgtcatctcgctgctgctgagccagacggcccgctggatatcggaaatctgcgtgccgtcgtcgctcttcacgagccgattctacatttgctcggagacagattacgaggatctggtggtaggagggaagcgctctaccatggagatgaaccagactgttgtgcctaatggcctgtttggtattcagtcacagaatgtttgcagtgaggtagtcggtctggttctattccatccaaggatggtcgattggacgttcgaggcatggcactttttggtgattcagctggtgttttctctgcttgcagggtcatgagccttttgtttcatatgaaggccttgaacagctgcatcggttcttgtttatccttggtatcacccatgtgttgtacacttttgtaactgttgttctgtccatgattaaggtaggtgtgttgattatcggtcaaacatcttggcacatgtttgtgtgttaatgcgtttcctttctgtctttgaagatatatagctggaggaaatttgaaacccaagcatgtcagctccctactgagcagttgcaaggttaggccgtcaattaaaccatatgcttgcattagcttggtacagttagtttgctctacctgaataacgttcatatctctcagctaggagaactaaggtgatgcagaggcagtctacctttgtgttccatcacacatctcatccatggagcaaaaataaaatacttatttggatggtaagtactattttcttcacaggcaagctgctgtttgctgcattgattcacattgcactgttttttagcttatcagcatattcaaaagtagaggattgaaaattactgttttcattcactggttgcttcacctagccatttctataaccttgagtgagttttctgttttctctaatttgtgttctacaaactgtgacaatggtgcagctatgctttctgcgtcaatttaggcgttccatcaagaagtcagactatatggcattaagattgggttttatcacagttagaactctgacttctattgattgtttcaattttccgttcagatgcatatttattttgagaaagtgtttaaatgcttttgatttcctacattcctctgcattgtgcttacttgtcaattttctcatcagtaccataagttgccacactcgtataatttccacaaatacatggtacggagcatggaagatgattataatggaagtgttggcatcaggtaaaacatattattttcctctgatgaattaggcattgaaatgagcttattaattccgaacagtgtgttcctgctctttccagtgactatataatatttgttctttttttttttcatttttttgactccctgtactgtataaatgtgtcaaactgcatattgaagccaaattaaccatttgcttgtcatcaagagatgtgatctgtttttaagccacacaacttcttttacattttgttctatgttttgctggcatatttctccatgttcttaacattttgtttgttgagcagttggccactgtgggcatatgcaataatatgcatttttgtcaatattcatggtactctttctctctctgtcagtcacatacacacatacagagtttttgttagcagctttgatcattgtttgatacacttaacccttttttgttatttgaaggtcttaatatatatttctggatatcctttgcccctgctattgtaagtatttcctgtatttcttgacctaacaacaagattaagttaaatgccctcttgtttcttgttatgtcttgtcataattttgtgtattgaatattttgaagctggtcctgctagtgggcactgagctgcagcatgtcattgctcagttggccttagaagttgttggggcaacagcaccatatgttgggacacaactgaagttgcgtgatgatctcttttggtttggaaaacctcgggtcctgtggtggcttatacaattcatttcatttcaggtgatattcttttgcttcactccatatgttatattttttttgaagacactccatatgttatattatgatgtttgtatgaacatcatcttcatcctaaccttactgttgctttcagaatgcttttgagatggcaacgtttgtgtggtctctggtgagaattgcctccttctatttatgattagtcctagatttaatttggttcatagtaacaaatattgcattagggcaagtctataaggagaatgagatggctcctgtattatgtaatattttcttgattagtatgttttcagcatgttaccactaaaacatgaatataactgtaaacttaagctatcaactagatgacttggtagtccacacagaaatgagccagttgtcatcagtcctctcttcctaatgaaaatttcctatggattattagatggatattttcatgtttatcctatagttatttacatagttgccttcatctttttcagttggaactgagtgcgcaatcctgtttcatgaagaaccattacatgattgttctccgtttgacttctgggtgagttttagacatcataggaaggtggcatctaaatacgttttatcattttcattttgagaaaaaagctggcacaaagaagcgaatttcagtatgaactatattagtcgacttgggactcaatgaacttcttccgatctttcaggattctagttcagttctggtgcagctacaacacattgccacttaatgtaatcattactcaggtattctggttattgaaccaacacatctcagagaatcccttgcctaatttctcagaactttttactactaatttcttgaacggaagggggtaaaatcatcttgtcttactgattaagagtcccttagtttgaatagtcttaatcttaccccctccgacacatcctatactagttttgtttttttatgggatggagagagtatctgactatgcagattcactatgtcattcatacatgaaaaattcttatcatatgctgtagaattgggaggatagctttattcacatttccttctctttctttttctttttttgaatctcagatgggatccaagttcaagaaatcactggtctcagagagtgtgagggagtcactccacagctggtgcaagagggtgaaagacaagaacaggcacaacctggcatcgagatccgtctgctccctcgacaccacatacgaggagactgatcatgagactgctacggttggcaccctgtcgagaaccgtgtctgcgacgtccctggacgaggagctgacggtggccaccgtcgaggacaacgacgacgacgaggagatgtctcgcatcgagcaagagattgatcgatcgttgtagctctcgtgaacttgtttgttaatcctcgttcacagaactacacctgtgcagaatgactgaagaggattctggtagagcacacgacacgctaacaatgacaaaatcgaagcccatctcgtggagttgtaaaatatagcaaactacagaattcgtaagatcgaattataagacatgttcagttgatgtaaaatggacatttgccataacttcgatgtgctgtgatctttgcactcgatgaaggtttttacaaagtgattttccggtctgattgcttgacgctaatccaaaaagtgaacggttatgcaaggtaccgttcctcctattgttcaatggcgagtcttttactactcccttcgtttcacaatgtaagtcattctagcatttctcacattcatatggattttaatgaatctagatagatatatatgtctagatttattaatatcgatatgaatgtggaaaatgctagaatgacttgtattgtgaaacggagggagtagtaagcaaaactttgtttctttctcatttcttcatgtaaattgtagtgctaatgagatgctcatctgttggctagaacgagggagtgtgtttcttatttaacttttcgacagtgtgttactggttttatccaggatattgtaatctctaaatgtttatgcaatgaatgagccagcctttgttataaaggaatataaactcatgaggtagccctttctattggaccgaaaaaggcccggcctactaggaatcaagcagcccaaaggaataagacgccaacacgcgtgcggtgcacgcgactgtatccagtttgcggctcaaactccggtaggctaccacccgaagccaagagaggaaccacgaaatttccacgaacaaacaccccaaattccaggcagtaatttttccggaatcaaaaatcgaatggaaaaacaaaaattaaaacaagagaaaaacaaggcgtaggcaaagtggcaaaccacgaatcgaagaagagcttctccttccctttcctcctccattccaaccttccaacccaacaacctcaaccctcctccctcagtatccccccaagaacgcgaggagccgagtccgtactaggcccaggtcatcttttgttgtagaggcgatgcagacggcggcggcggcggcggtggcgtgggcgccgagcccatcgccgtccacctccacctcatcgccgccccccttcaaggttagggttacgcctttttgctgtttgttgtttcagggggggaacccgatttccttggttctgccaagctgacgagttcttgatttggggtttatttacaggtggggatcgcgtcgccgtgtgggacggctgctcacgcctcctccgcgccgaggttggttgctgcggccactcaccgggggcggcggcggcagcagcaaggtgagagcaatttcttggtgtgtgtgtgttcttttcatgcttttcttcattttttgttaccttattgagaacttttggattggtaggggggctattagagctttaggaacatgagtgacagcttttttattgcctgttgtgcccactaatacatggttaattgattcgtatctttaagatgtgtcggggcaatgaattgtaagctacaagcacttacttactgatgaattcagtaatcgctaattagctgcaaacacttacttagtgatgaattcagtatttgctaagtagttatccataggccatagcgcacctcgcgtttagtaccaatccagcatggtttattctaatatgttctccaatctcaatgggattttattatactccagaaccaatttagtgggagcttagttttcatattgtctccagatggtgatgctctagcatacgaacatctcaaatcaattataagcaacaccaggtcggtaagtttggaccaagtaggatgtaggaacaccatctactgttgctataggttagacataggtacagtctagaccttttgcttgctgtactgttttttcaggggtaattaagatgctgggtgaattgggattcagtatgatgctaattctgtttggatgctgctcttgcagtggttaaggctattgccaacccagacccagcagttgagctgccattgacagctgaaaatgttgagattgtattggatgaagttcgaccataccttatggcagacggaggaaatgttgcattgcatgaaattgatgggaatgtggtgaggttgaagctgcaaggagcatgtggatcatgcccagcttcagtaacaacaatgaagatgggtattgagcgacgcttgatggagaaaattcctgaaattgttgctgtcgagcccattgctgatgaggagactggccttgagttgaaccaggagaatattgaaaaggtacttgcttatatttctggctaaataaaattatacgcaaaaggtctcttgtagagtacatcatgtcgaagtagcttaagctttaccgtggctaattgattaacttacataatagaagataaaaattcttctgaaaaatctttttgtgccacactaattactttaatagtgcaattgaaaaggatgttgggaacaataactgtatggcatttgctgatgtcctgctttatagttcatatttaaacaatttgcttctgatttcttgctctctggttctgttttatttaatttctgtattgtgataatcttctttgaaaatagctttgaagatgacaatttcctttgatccctagtcactgtataatgttccatcttttgagtctattttggttgggaaaaaaattgctgtgatggaaactaaactgctggagcatgctaaatttctttttacctttattaggtactcgatgagattaggccatacctttctggcacaggaggtggtgagcttgaattcgttgcgatcgaggaacctatcgtcaaggttaggcttacgggcccagctgctggtgtgatgacagttcgcgttgccctaactcagaagctcagagaaaagatacctaaaatcgcagctgtccagctattgtcgtaagcctgaaaacatttagaaaacaacccctgcaatgtaaatgtgccgctacaataatcgccaggaaagattgtaatgggcttaaagctttgtaacctgttactctattctacttgaactacgaatagtgatcatcaatatgaaatgttgtaagggtgttcctactggatttatttacaaaaggttttgggcttctatgattttgtctgtacaatttgtgaatatcactcttttatttggaagttcgttgaaatagaaaagggcactacaattttaatttcacttgatctcttattgagtatgaggccttcaagtatgggattagtggtagctggtgaggattgtattatcttctgtcaattcataattttggtttactagtgaacaagcacatgcatgaccaatcggaatgaaattcaacatggtagtagctgtaatgaggcatattaatgactgataatttcttctttattgtcacataagcagcacatagaagtcgtccttaccgtatgctgaacagtgacaccatttcagttaggctctgtttagttcgtgaaaagaaaattttttgtgttatatcggacgtttcaccggatgccgaaaggggttttcggacacgaatgaaaaaactaatttcataactcacttggaaaccgcgagacgaatcttttgagcctaattaagccatcattagcacatgtgggttactgtagcactttatagctaatcatggactaattaggtttaaaatattcgtctcgtgatttccatgcaaactgtgcaaatagtttttgtttttatctatatttagtgttttatgcatgtgtcaaaagattcgatataacgttttgggaaaaaaattttgaactaaaccggccttaagtctgacggtgagtttactgggtgtcaatcaccttattaaactaatacatatatcgatagtaaattccgaaattacatgaggcgcctgtggcctaatggataaggcgtctgacttctaatcagacgattgtgggttcgagtcccaccaggcgtgttttgttttttcttcttcttttttttctctacaagatcggagacagatggacggtcagggacaacgagcctattcaatatcagccgtccacgtgtctgatcgttggtcaccaagcacccactggccactcgtctctctatagtgaatagtctatcctcgcatcgcatactcgtgcaacacggcttgcgagcggcggcgcggatggggctctgggagtggccgtgggatcgccggcggcgaggcccgtcgggcttaggccccacctccaccgccgaagaggtcaccgccggcgtagacgccacccacctcaccgccatcgtcacaggcaaccaaccacaccttcccattgcagcagcagaatcctcttgatttggtgatttttatttattgatttggtgatggaaagaagaaaaaaacgaaatgcaggagcgacgaacgggatcgggagggagacggcccgagttctggcgaggaggggggcggaggtgatcatcccggcgaggacgatggagagcggcaacgcggtgaagcagagcatcgcggaggaggtcccggggtccaggctccacgtcatggagatggatctcgcctcgctcgactccgtccgccgcttcgccaccgcgttcgactcctcccacacccacctcaacatcctcatgtatgccacactcactcactcactcacatgattgcagtttgcaaaatgttcagaagatgaacagtttcgtgcaggggaaactcttttggtagctgggatatcagttcatttattgcatgtcaaatactacctccatattttaatgtatgacgccgttcacttttcgaccaacggacaaaaatacagagggagtaaatggttatggaaaaaaaatcaaaacaataagatagattagtacttaatatattatttaaaaaatgcaagtttaaatttgacttttaccggttgttataaaaaataataaatttgactgtaaatatgcatctactagttagagtttagttcgttattttcgttacaatttataaaaatcaaatttaaaattgcgcgtttgtggagtgataaattttatttataactatttagttaacatgtaataaatgggtagacgtctagccgggtgattgaaatccctctcctttggtgcagcacttatctgaaactgaactcccttacaaaagtctttttttcttttgctgtgcttgtctgaagaaacaatgcagggataatggggtgccctttcaagctatccaaggatgggattgagctgcagttcgcaacgaatcatgtcggtgagaatgacgcgtgaacactagttcgttgcaagtttgttacttattttttgagcatatgctgaattttacttacaagtacaggtcatttcttgcttacaaatcttctgctcgacaagatgaaatcgacggctaggaagaccggcgtgcagggcaggatcgtgaacgtatcgtctattgcgcacaagagaagtgatggttcttgctttgatctgaacaagctaaacgataagtctaggtcagcaatgtgttcatttttattgttaccgcgtacattatcacaatgtaagtatctaaaagtattgttcttgtcctgttccgaaatttataggtacaaaccactcattgcatatgcacattccaaattagctaatattcttcatgcaaatgagctagcaaagcgttttcaggtacacatttttttggccttttctcgtttatcttgttcatgatgattgatgactttgatcgttgaagaaagaattagagtttctgagaatgtcgaaaaacccgactagtagtattagcaacaattaagacaaaatgttagtgcaagcacagttgttcagtgcttgtacttgtgtggtagctaacccatttgatttactcttcattttttagtgatgaaataacagtgtggatatatcaccccttgggaaataacaatcttgattccattcaggaagaaggatgtaatttgactgcaaattccctgcatcctggagtgatcctcaccaatatcactcgttatgtcgtcacaaacagtaatgtcaacacaaacctttcttcagttattattacctgttccaacctccaaatcccatatcctctgaatatttcgcaggcgtgatggtttcaatcctttctgtgggaaacctctttctgaagaacacacaacaggtaatcgattccaatcttgttaccactcaacaatccaactgtaaaatcttcagtaactagctagtgtcacaaataagatatattttagctggcatgatgaacttcaatctaattttttacagggagctgcaaccacatgctatctggcactgcatcctgaactgaaggatgtctccggcaaatacttcgcggactgcaaggaagccacgccgaggcctgctgcgagagacgcagagctagcgaagaggctatgggatttcagcgaacagctcgtggatactaatcgtcgtggagaattcaacagacaaaaatgacactgtttagactgtctgaaattctgaacctgaccatgtctcaacctgagatccttcagatacagaattttattttttatttctattttttattttttttcaatggaatgatacagcttatataatatgaccatagagctgtttgtcagtactgttgtttgcatgtgtaaacaaattcaaatgcattaataatcagcctgctttttttgccatttcgtttcagaagaaaataattggtcaacctgtttttcttgaccgttctcgagctccatccatggatatggctaaggctcttccaagaatcgacgaaatggactaaacggagaagaaatgtcgctgccaatgataccaataactctggagtctgtagtacgaattgtctgctcacgtcagtgtcatttttgtccaatcaatcaatctagacacctctgaaaagtgaaaaccggttttccacaggtgatctctgaaaattccaagtgtgagatccttctgaacctgttgaaaaatcatctgatcagaaattcagaatcttcttcgccaaacaaaagcatcttcagacaaaaattcagaacactgcgaccggtgttgtcatgtgtgaagttgtgttacactgtgcgccacacaagtcactgtctcctcccagatggagaacggcaacaaatacttctgcttctgcacaattctgatttctctgaaacttcggctgctgaccagtttgtagttcaggagaacaaggaggaggaggaatggggtttagctggggatggctgtgtggacggcgcaatgggccatcgggcttcggcggggcatccactgccgacgaggtcaccgccggcgtcgacgccagccgcctgacggtcgtcgtcacaggtttgctcggcctgtcgccgtttcatgtctttgacaatgttcttgatttcctttttcccttcattttatcagcgtccgtatatataggactccgggattttgtccaacagtttattggataaatatgagtatgaaacttgaatttagaggtgaatttgtatagtttgtagattcatccggtaagaatgtagtgcagcactggtacacaccattctgaatttctgaaagcatggtgccaattccactcaaggttcagaaaacaattgaaaagaaaacaattcaatgaatcttcgcgctgtctgctgcggatcgttcaaaaaaaaaaaacaactgaaaactagctggtagcccaaacctggtaaactccattctcaatcagcttttgtaccaatagaattctagctgataccacaaattcaaatatctgagagaagaagaaaatcgaaaattcaaataccctgatcctacaaattttcatctttatttcattctttcttccatcatgtgatccatttggtacataccaggtgcaacaaatggcataggaaaggagacagctagggtccttgcactaaggggagcagaggtgatcttaccagcaaggacactggagagtggcatgaaggtgaaacagagccttgcagaggaaatccccagctcaaagctccatgtcatggagatggatcttagctccctcgactccgttcgcagcttcgcaaaatcgttcaactcgtcttataggcatctgaacgtcctcatgtatgtgtgaacagttcggcatcactgactgaattgcaaagtttcagtaatggaaaattgtgttactgaattcactgacaagtcattttttgttctgtgtttctctgaagaaataatgcaggggtaatgtcctgcccttttggactatccaaagatgggattgagcttcaatttgcaacgaatcatgttggtaagtatgttgtatagaagcttggcaacctgagataccgatttcttggagcaaagcgaagagataccggatgaattaatcacttctgaaattttactttgtaaacagggcatttcttgctgacaaatctccttctcgacaagatgaaagccacggctaaagagactggtttgcagggcaggatcataaacgtgtcttctatttcgcatcgaggaagcgatggttcatgctttgatctagataagctgaacgacaagtcgaagttagtaatttgcatttgtgttcttcaggctgactcagtacagcaaattgaaccaacgttcttactattttataaaactaggaaggtagcatgtatcgtaagttgtgttcaagaaatttataagattggaatattaaccagacagtatatgctacgcttcaaatttcaaaaaaagtatttctctacgattgtttttcaacgatattctttgataatttttataagctatttgttagttttatacaacaaaatatttaattcatccctatgagtaattatccatccagttatcgagaaagaaagtagacttatttttgttaataaatcatgtttaataaattaaattcaaattaaaattgaagtgttattaacaaaacaaacattatacactgatgatttgattcatcttcaccttggcaaatcagtattgctgcgacactcgtgatgaccttggtaaatcaccttagctgtcttaggtgtggtggttcatctcggatgttttacttttctctcagaatttcttggatttttctaatttattagagcgccacgttatggcttaggagcatttgtagaaagtttaatagacttttagtactgcctctgtcctagaatgtaacaacctaggataggatgagacccatcctatattctgggacgtaaagagtatatgatagatagatagatagatatagtattatgaaatttactctttttatttatataatgagttgctagctacaaaatagggaggagaaagtgagcaaggagagaggagcgaagatcatatatatgttattaatttaatatttaattactttttatttttcatgtaaaagataggatttttttccaaaagatatattcttgtatatccaaacatggccaatgtagataaataaaatataatataaaaattataatcatttagagaatttacttttatttacatattgaattttgctaggtagaaaattggtagattgaatggaaaatggcaagacaaaaggaagtacaggagaggaagagacgtatgtacgtacgtacgtcaggggagaggaggtctcgtacgtacttgagggccacctgagaggtggtgggttaggggtgggaggagattatggattgggttttaggatattttttaagataagatctaatggtgaagaataatgggtctaccatcttaaatgaaaattaacggtcggatgttttgcttttttcttagaatttcttggatttctctaatttattagagcgccacgtggcggtttggaagtgtttgtaggaagtttaatggatatataatagatatattttcaggtaccgtccgttcaaggcatatggacattccaaattagcgaatattctccatgcaaatgaactatccaggcgttttcaggtctgtaatctcggacatttcaatgattcatgaagaaaagaagcctccagaaaatttatattcattaaagcaaaccttcattaaaagtagtattagaaatgcactttccaacaattttctgcatcttgatttgctgctccagccgaacacaacttggcactcttattatctataactcagggagttcttgttatatttcaggaagaaggatgcaatctgactgcaaattccctgcatcctggagtaatcgccaccaacctccctcgccacatcctgacaaacagtaatgcaatcaaaaactcaacaaaaacttccatcaaccaactgtttgacacaccacaatgctccctctgcaggtctgattatatcaatcttctcagtcatgaaaccttttctgaagagcatacctcaggtaacgatagaaaagcaagcctgactaaacgaacaacagcattctctgcccaaatgatcaatgccaagaaatgatcaatatttcagggagctgcgacgaactgttatctagcattgcatcctggattgaaggacgtgtccggcaaatactttgccgactgcaacgaagctacgccgacggctgttgcaagagatgcagagctagcaaagaagctgtgggagttcagtgaagaacttaccagtggagatcagaagctgaaggagaagtgaaggtagcgacctgaacctgaagtcggcggcgacattggaaggagcgcagtgcgcagagtttggtggactggagctggagggatgcgacgcaatggaagtacgaaaccatgaaagcaatggcatcggttttaggctagactgaatatgtcactgaaaattttgcttgtcctaagtatactattagtatatgtcttgttctaaacttgttcggttgttcctttaggcaagactgaatatgtcttgttctaaactattagctatgtgagtgtgactatgtcatccgatgacgattgtacccctacattcaggggcgaatccacagggtataacactgttctaaactttataatcccattggtgttagctcatgttagcacgtaaagagtgtaatatactactccctccgtttcactatgtaagtcattttagcatttctcacatttatattgatgtcaatgaatgtgagaaatgcaacttacattgtgaaacggaggaagtatatatttgataggtatatgacacccggtatttttgtatttttcgttctagattcgccgccgcctacatttgtattcttttttttttctgacattaggtgtgaggtttgaggctttaagcagtgatatttattgtttttttaagagggcaagcatccttgaggctttaaaaaaaatactgtacataagtttttgggaaggttcatacaatggtatagtataccatagaattaaactagtatactcaccagttctgtagaattaaactttccttcaaaattttagaagttttatgagcctggtcatatgaaaggaagttacgagatatatctattctaagtattaatatgaaaataaactattaatttgtaattttacgcacaaaccttaccactatgagcatcttcaaagactaggccagcaaatccatcctgtagattgacgaagttacaataagcaccatcctagagattgcgatacattgcctaccactaaaagcacaaccatcctagagattgacgatacgttgcctaccactaaaagcacaaagccgttaaatcctggaaaattcgctcccatgaggagtcaaacccaggacctatggtgctactgaggctcttataaccattaggctacaggcattttcgctattaatttgtaattaatattgaataacgctgcgtgagtattattttaagatatgtaatataagtaaaccatcatagtaatcacttgcattatacttccttcaaatatttatatatggcaattttttaaaaaatatttaagattataccttttttttcaattatactttgctattgattcatcataaaatttttttattagatatactttgaaatatagacctattagcataattttttttacactaaataaaagtttgtatcggagtacaatttaaataatcattgctaaaatacactactattttcaaacttgtaaatttcctagcacaagattgtaatcctacttgtgagtaagaataaaaaataataataatacaatgaagaggtctttttctttctctctctctttcttataaaaaaaacttatcatcagttctgttatagagggtccaatgggcctccagtgggtgtaaaaaaaaaaaggccctccagtgggcctggggcatctgacgtgtcaaaaagtgcaacactaaccgcattgttttgtattagtagttaattaccgcgctctctaatacgcctgggaccgggactccgggagagagcaacactaagcactgggcactaagaacatggattaagcgcaagtaatcctgtaattaagctaagctagttaattaagcaatttggattctacgaagcagcggcgcggccaaaatcccccaaatcctctcggagcccgaggtcgcttggagtcggcgcggcggcgcacgcaatgcccgccctgcagcctccaccggcgtcgtctccggggcgggagcgggagcggggcgacgcggctgcttcctccgccggtgggcgccgccgctctcgctcgccgccttggagccctcgcgcgcggtccccgtccctctcgcggtcgccgccctcgtcgtcgtcgtcgtcctccgaggatgaacggtttgtgtgtgctgtctccgctgctcgctccattccttcctcccctcctcttcgccgatcctcgtatcgatcgtcttggggttttggtgggggtttcgtgcgggttttggttgggatttcgtgcacatcgtgctattgattctccattttttttaaccctgcagtgagaattgcgagacccaaactgaaactgcatggatggaattgggattctcaaattcagggcctcgaggtgtaactgagatcacttatcttctgaggtcccacgagctcaagatcagtgagttggagtcaaaagagcagatttactgcaacagcctggttcaactcgaagagagaatcgcatcactagaatattacaaggtctcttcttgtgttcagcaagaggatttctgaaacctagtttcatattgtacttttgtttcttatacatgagcatgagaaaaaacatattgcaggagaaattgcttacaagactttcatggacagaagaggccaattcgactttgagatctgacaattccaaattgaagaatttggcatacagtcttaaggaaagggtggacgagttagaaaaagacaacttcatgctagggctgaagatgaatgagtttgctcaagagatggaacgatttcagatgcaggtaagctagcgttgtagcttatgcttttatagttactagtaatcagttgcacgtattgataaatatgaactaattaaaccacttaaaaaaatgcccatatttaacatttaccttttcacatgcacagttagcagctatgactatcaatctgtagcttcaaggaacgcataatacatagacagtggagaaaccagaaaattgagaaccataggatatccttgaagagaaatctgtcagccttgcggtgatctttcctttgctatataagagtagcaatgtaccttagaaatctgtcagcattgtgctgatctttccattgctgtataagagtagcagtgtaccttagaaatctgccaatgaaaaaagtgaaaattatatgggagctgtatctctattatcaatttatcataaatttataagataccgttgtaacaatattattttgacaatatggtgcatctccaaggtgaacaaacgcaggtcctgttaagtactttgaaaactgagggctgatcatcttcagaaaattgcttctgcttaagaaaaaaaaggctgattatatgcaagttctttgattggggcactaatgcatgcatattgaaggggttttccgagaatcaaattgtaaacaaataaattgtggatttgaaaccacaaacatgatctcgtggaaattttgttagggataggccgcagattgaagtcgcactggtgatgtcacgtttctgttgccggtgacctcctaaagctgcatccaaattctagagctgcaatggtgtagttgtagcacacaagcaagaacctaaccctaggatccagaattcttattgactactgcatgtgacaatatcaaattcattatgtcatgaatctagaaaaaaaagaagaaagggtggttaattggatctcctcacaacctgacaatatataattagttcatagcttaggtttccctggtgagtataacagtgaatagcaaaaacatctatgaattttcttcattaactaagttattgattgtacacatagaatatttaggacatctgttcatgtagataaaagcaaaggaaagagtgacatcgccaatgtcacaatgagaaaaggctggaaataaaattcatatatgcgataccataggagctggaatgcacggggatttgaatcaatcgcaagatatctgaactgtgatcttcgaaattcagagcaaatgaattgtgcgagtcctgatggctgatacctctaattgccatacttttcagtccaggacagagcatttatggctagatgaagggcaaggatgtaatgctaatatgttatgtatcacttttatcttgttgttcccatgaaaatgcacttgctacttggctacttgcaacaaaaaatgtacttacaagttcagccatcaacccattgttagggtttgggtcacttagcagcaaaccaatgcttgtcaaaacagtagcaattttgagcaacggttgccaggcaccatgcacattagtacttgtacaatataacataaactaatgctggatatttatggttatttgttgaatacttgaatatgctgat

SEQ ID NO: 16364 - DNA, 6264 bp, Oryza sativa
  unsure (1)..(6264): unsure at all n locations
tcattattcggcatattttaatccaagaaattgaaacaatgatcatggcataagcagtgtagggtgatcttaacgtaaccagtagcatactatgcgcatcatgaatgtcagaaacatgaacataccagtaacgcgataacatgctagaggcatcatgtagaacaggaacaagaacatagcgcacatagtatagcgctaacaatgggaacaggaatagcgctaacagcagtagcaggaggagaagattataccccgagaatggccctccgctggatggtgaggcagaattgcctccgttgttgtagtcgttcacggcacctcctcctggcgcagcagctccggatctagatccagctcctgtcggtggcggcgtaccacctccgccagcagtggcggcagcaactccagacatggcgatgagcagtcgtgcgggaggcactccccaaaaacatgatcacccgcctacccggtgcagatctcaggcgaaggtgtggtttcggaggcactgctccttccaatctctcgtgcgcgcaagagatcagaagcggggaagcgagagcaactcaggcacggagaaggagaaactaacaccgggggagaagcgaagaagtcggatcggactcgcggcctccttatctatcaggagaaagaacgtggacgcgctgttgcggagggaatcgtgggaacgtgggttagtggctgcaaaaggatagtgacgtgacgcctcgcctcgcccacgcccacgcccacgcccacggcccggcgcgcgcgcgcgcgtgtggcattccgacccccacctcaactggtcaacagggagcctccaataactccctatttaggttgagatatttctcgcttaaatccagaggtggtattattatcctcaacatttattatgggcctttgagatttaatattataagttgggcctagcccaattattctaacaaaaacaagtggtgataggccttggtgatagcaacaacaagctagtgtgtcataaactgtactataagacctttcacttttttatctcttgctggatatgctgatccttattttcttggcaggtacaactgcaaaccaataatatgaagctcatttgcttgagaataggattcaagttttggaatcagcagaacggcagaacgcttctagattggtgaaaatggaagattctattatccatcagcatgaaagaatcataggagtagagcaagacatgagtgcaaatataactcaacatggtcagcaagttcaaacgctccagaacaaagtaagtaaattctgtttattatgcagataattttgcattatattcttttagaaattcactatattataaaattacatctcttgactgtcaatattgaaaataatcctttattttcgccaatctaaaaaataattatgtttttctcttaatttaactttgtagtggtaaaggataaatacatgttatttttataagtcaagaaaaaataataatttacactcttaattaaatttcaggaaaatgatgttcttatgaagtcttttcagtcgctgctcacttgtatggtaccatttattgttgcgtttctgctatcaatgcttagcagccaatctgatttcggtgaatatgagaaggatcttgtgattcaagtttcgttggtgtgtggattacctggcgtaatggctatggtctttgctcacttagcaagtggaccattttggacttctatcgtagcaagcttgacattatactttgtcatttatagcatcacattagtgtattatgcattcataagacttctaccatggagtccatggacaagattgcagttttatgctactgtcattcttcttgcaatattcctgatcgtggtccttaccatgctgattgtttgggggagttttgttaaaaaaccaaaggtacaactattgctggtgttctataatctattcaaatttatatgttatactaattatatgtttaattttcaacaatagttcacgcgttggattgcaagttacttttcatgttgtccagggcctgaatgatagatgtctattacaggaggtatgtacctctcaaacacaattagaagtctccaccctatatgcttaacatcgttaaatattatttatggctgtaggtaaacaagtgactactctggtgccttgcaaagtttatcattgaagacaagttgccaatgaagattcagaagcttgattgtgtcacatttgttgtacagatgttactactatgtctagaagttttacatacttaggataacgttgaagaacttttgctcatagctaatagaaagcgagagatatgctaacttggataaagtctagatatttctactgccttcaattccttttttttaatcaaccgtaaacgaagttatgcatggttaggaaatacttcacattattttttttttaaaaaaaacttatttcacagaattaaaacactgaagaaatttctcttttattagagaacttgagatgctaatatggatgatgctatgtttaaaagggaaataataccaagacaacgaagaagtaaaatataacatttccattgttttggtataatgtaacatttcgcttgtatatatggaatgtaaagattaatgtttgcacttagcagatgcgatgatatttttactccttggtgcgtgcgaatttcctataatagaactatccttcccaatgagtattgacatggatttattctatacctattaaaatttttagttaatccctttcttattgggattaactgaacaatctacttacctgaacctgggatttcagtaattcataacccatcaacaaaccagcgtcgttggatctccaatcccttttgcataaggattaaccgaacaatccccttactagagggtaggatttcagcaattaatcaacccaccaacaaccagcgtagttaatctccaatccctttatactcttttttatctcactatacaagacgtgcatgcattcactaccatagaacacctgataggcgtcggttgggaaacccccttagcccttattcggttaatcccatgagtgagggattgaaggggatttattctacacctattgcggtgtggagttattccccccaatcccctccaaaccgaacaaagccttagttgccgactttcctaactggtgccacggaggcggcaccgatgactcgagtgattggtgtcggtttcaaaaccgacacctttgagacgtacgcgagccaaaagaaaaaggctcgatacaccgagtgcatccaccccgcgttgccccgaaatctcaatccacaacatcatagaactccacatcacatatctataaacattgcagaacaagaccgacacggaaggagagaaggttgactccaccactgcttaccgtcgctgtacgccagatccgccgcgggaaaagccgacgccgccgccaccgtcggatccgccgactcctctattgctggcgagtgagaagagagggggaggggacgggggcgagagggagtgagagggagagagngnngagngngnaggnggggnggagggggggcgtccttatctacgcagtattttatctcgatgcccgccccgtgcgctaaaagaaaaaaaatggctctaagctcggctcagtttgttttatagggtgtcgttttttttaaaaaaacccagcacctataatatattatggatgttggtttttaattaactgacacctataatacgtcaaagatactgattttttttaaaacccggcacatatagtaaaggtgtatgtttttctctagaaccgatacctatagtatattcaaggtgtcttttttcttattttcagcctgtggaggtgggaataacactataggtgccggttttagctgttccggcacctttagtgccgacttgtattaggggttatggggtagtgattttaagatttaacatttaaaacatttgactaaaaaatataatataaattaaattttatttgctgaaaataatatcattgaattgatatttgaatttaatttacactagcaaaagtgccggtgcattgcaacgggaagtgtaaagacaagaaaattaaggaaaagttgaaatagatttacattatgtaattaattgaaatacaaatttccttaaaaatttggatattttttaagttggtaagtgtataattaaattatacaaacttgtataattaaattataattacactctttggaattttattgaaattttcagagcttaattgctaattttgataatacaaacatagttttagcatttattcttcagcctttttttttgacgggaaacagaaggagagactcctactgtgctatattataataataaataatttacaggggtatgtacaaatttacaagggaaaattaaagaaagttgtcaatccatgattgccagtttggaagatatgttacttttgctctgtacatatgcagggcaaattcttgatgaaagtcatgtttccacttgtcaaagctgtaggcgatgtttttgaatatttgttcatttcttctgttccaaatgtgtcagcatccaaatgctagaacttcaaagaaaaagctatgaggaaactggttgtgtgctgaggtgatcatgttcatgatgtctgactgcaagttccaatggattccaattttttgccaacattgttgagcagtcgggcatttgaaaaataagtgtatcatatcttcagtgaggctggcattacacatgacgcactgtatcccccctgaatgttaaaatttttcttctggagcatctccttagtgttaagtctgttcataagcaaaagccagaggaacacctttaatttcattacacacttgcttttccatatcaaagtaagaggtcgttcatgttgcagatggacaaagaacattttataaactttgttggcatgaaatcgatcagaattccagggtaagtccatttatccatattactgccattgtataagttctgcagtctgtctgtgagagtttcccattcctgcgttgcttggcttgaaagaggtatgtgaaagttttgactgagctctgatgcttgtaagaaactttgaatcgtggaatcttcgttccttgcaaaggaaaatagaatgggaaattcggattccagataactgtcagtccatttatctttccaaaacagagcagtatccccttgccccagggtgcattgagcgaacgctctaaagaagggaatcaatctgaagatatctttccaccaaaaagatcctttttccttgtgagcctgaggtggtttgtctgaattagaataatgtttgttccaaattaactgtacccaaggcaggttctttttgttaaaaaaatttgtccaaatgcttgagaagaagagctatgtactgaaactccagattgattactcccataccccctttcttttttggcctacagactagatcccaagctgccagggagtgagtttttgtttccatattagaattttttctccataaacaatgtcttctggctcgatcgatgtgttggataaccttttttggcaatttcagagtgcacatgtaataggttggaagtgatgagaactgaattaaccattgtaagtctttgtccatagtttaagtgaattgctatagatgggagtcttctttgtccatagtttcaattcttcagcctgcgaattgaaatttcccgttcgttctcttctgggtaaccgaagttgaagtgctatttgatgcggactctgtatgatttgttgtgtgttggactgcggatgttgcggacaaaaataggtgaggacgggcaaaaatttcactggaagattaggtataggtatatagaatgttagattagaggtagataacgtataaacgatgaaaccaaatagaaatcgaaattttttcgttcttttttttattttagacggaagatggaaacattttcaattttttgaagtatataagtagagatagagattagccattttcgttttcttagagagtactatcacgaaaaacgtggtagtttattaatctataattaattaagtattagtaaaaaatagattaatatgttttctaaaacaactttcgtatagataatttttgcgaaaaatgcgccttttagtagtcttagaaggaaacaacagccttaagggacctaaactgaacttattccgtgtggagcatacacgcggcccaagaggcggcatgggaatcgcggcccgacgcaggagcagccacagc

SEQ ID NO: 16365 - DNA, 22495 bp, Oryza sativa
tcccccaccggcggcggggccgttcccctttcccctctccctcccacggtgccgggcagggacagcgccctcccccccgccggatccagtgggaggggaggcagcggcggcccggtgtccctgcgacgacggtggcatcctcctcttccggcgtcggtgtttttatgcttttatgcttgtgatgttcttgtgttatagttgttgttgatgaaatatgttcttgtgatcttgtagtagtgttcttgtgatcttgtagtagtgttttctctaggattttgtgatgattctgatttgtatttggattgagattgagattttgttttttgggttggatgtgggatttggagaggaggtgcgcgtgaggttacagacggacgaaaaatagcagtacggatgaaaaagcggtgtgacaattggaaaaatacgtacgaatcttttaattatttatatggttataattttttactataaatcttaaaatatatgagaaattataatctatagattagttttggagaccgtactgagtttgatcgtgccttatattatagttaactagaaaaactgcccgtgcgttgcaacgggtaaagacgctgagcaataaattgaaatattgggatctctatacattataatttaaaaagttaatgaaaatcttgatattgggatggctatagattataattaaaaaagttaatgaaaatatttcctgagttttgggccgaaagccatccttccttttcagccctaggccagtccactacctcccttcgtttggcctgccagtctgctacctccctgtttgggctgcttgcttcaaggcttcaatccagccatgactgaagtcgtttcagttctaggctagtttgctacctccctcagtttggtctgcttccttcgacctatcaaatcccaaatctttctcgattacccaaaattggttgatggtttttatccactcgatcttctctttccgttttcccaaaatcagagcataaaacttgggataaaagcgatccgggaagatcgccgtcatcatcgacaactgttagattaaatccggccaaataaagccgggaaaatcatggaaaaaatagcgagggaggagtgggaattgatttttttaatccagttggagtagaaaacacacaatcaatatgcaccggcgcggcgctagagttcaactcgggagacgtgtagcaagtagatatgattaaaaaaccggatgagaaaaaccaaaagcgcacgggagaaaaaacatgtgacaaaaaaattgacaaaaaccaaaagcgctcgggaggcgcgcggtgaatagattggatttaaaaagccggataaaaaaataatagcgcttgtgaaaaaaaaactctttcgcgtgaaaaaaaagtcgaaaaaataccggtgccaaaaaaccaacggatttttttttactggccagacttttttttccctttctttacttgagtcggacaattttttttacgatgagatttttttttcttgtttttaccgacgacaccagcttttttttatagtttttgagtcggacttttttttttacctttttagtcggacttttttttttacctttttagtgggactctttttcttttttttttactatagaaatttcttgttctttttaagtagagatagagatagagattaaaatcgaaacatcaaattaaacctactgaaacacggatgacgtaccaaagtaccagaaaaacatctttaatttttataatagtagagataaagggagtacaattaaccatacaatctgttagaatatatggataaaatcgtattgtattatcataggatatgattagtttccatctctatctctctgagtttacttagatctaatccatgtactcctatatatatcggtccctaatggcatgtttaatagtaaagacaagtatggtctcttaaacaataaattttatttagagaccgtatctttacaatagttgaaacgataaaggctctaatcattaactcaaaataatttcttttgttaatattcttttcatttttttaccctcatacaaccatatttccatattatagtgactaagagtcgttgttaagccgttgttatgcataacaacgatgttttgtctctcctctttatctttcttccatgtcaataagcattcctaattagcaacgctaagatatcactattgacaatcattgtacatgccctgaggctcaatacagtgtatcatattcgcagtatttctcccctcatctgctatccaacacaatccccttatctctgtacgataggatttcatcaattaatcaacacatccacaaccagcgtcgtcgtcgaacacaactcagttgagtttttatgtcccgaaaatataatcgtgacgagtccgatcgaactcggacgcacactccaatacgagttgcaaacaccaaacttgcataatcggacgtacgctagctcaaaccgtttcgtacatgctcaataattaataataataatacctgaacgctccgacctcgatttgatctctctctctatataatagacacacacacacacatatatgcgcgcacgacgaacgttaaagtggacgtgagatatatatacatacaattgaaccctaacaaaaagtagcaaatcaatcaatttaagcgcaggcgatcgatggaatcaagccgccatacgtgcgctttctttagtggcgctcaaccgggcttctgttcgcggttttgcagatctgcggtgagcaccctatattttgcattggtaaatcaaaaccttgcggattcgctccttgatatcgtgactcctttttttttctcttcggatttgctagtgtaaaaattaggcggcaaaatatttacaaatttccgaccatttatctggattgatgggctgtttatatagcaataaaagtgggataaaatctggattgttaaattagtaaacaatttacaaaatttaggttgttcggttcgtagcaataggttgccacgctgaatatatattgggcttgggcgtgccatagtttgttagacaagcttttgattggttgacgtcatatactcagtttgtgctaaggtttaccatacatgtagctaataatttattgcctgcactttgtgtgagcttccacttgcttggtaagttaatatgtggtgaagttagtcaacatgcttaccttctatcttattcttattctagtacctctcttttttaatatatgatgccgttagtttttctacatcatatttaactattcgtctcgttcaaagaatttaagtaaatattttttcttttgttgtggcttgacttatatcactaaattaagaaactttaagcattacttatattgctaagattaatataaagttattttgaatggtcacacgttataacaaaagccaatactattatatatacattagaaaatgaagggagtactaattttcttatatacacaaacttcatatatagatcctcacttttttaataccacttttgctatcgtttggttaattattgcttatctatcaactaatgaattgaagtttatacttcctatgtcccacaatataagggattttgagtttttgtttgtaacatttgatcactcgtcttatttaaaatttttttacaaatataaaagacgaaaagttgtacttaaactactgtagataataaagtaagtcacaaataaaataaataataattttaaaaaaatctcttatattatgagacggagggagtatttcttatttttcaactaattaattaaactaattcattgctttttgatgatttgggggtgattttgtttgttgcatgcagtgcatcacgggggccgtgttgggcacggcattcgtcgcctcgacgatcgttgcgttggtggtgtacggggggggccttccggcgtcgtgtcggcgttcttcatactaacttcaatcggcattattgcgtcgacttgttacggcatctgctaccatccgccggaagattgttaatttaatttggccatacttcctccgtcccacgatacaagggattttaagttttacttgcaacgtttgaccactcgtcttattcaaaatttttttgcaaatataaaaaacaaaaagttgtgcttaaagtactgtagataataaactaagtcacaaataaaataaataataatttcaaaatttttcgaataagacgagtggtcaaacttgcaagcgaaaactcaaaatcccttatattatgagacggagggagtatattatacctacatgtgtattacatatatatatatatatagtgaatctattctacaccccctcccatgggtcaaactcacctcccccaccctccctagggcccaaaatccccctcccacctcggtcaaagcgtcctcccgccggtcaaacccgcccaccactcccacccccacccaccactttgctgctctcgtcttgcaagaatcgtgtagtaacaggacggttatcgtgcagtaacaagaaaacattatcgcagtaacaacgtcaaaaagtagccatgatggatcttgtttcgttaagcgtttttttatgaacttcatggtgcaaatggattggaaatacaagatatgatgtgagagatattactctctaaagattgagatttacctcttttttagttctcgtctcactgaaacagcgtagtaacatgatggccaatatgcagtaacatctctgcttttcgcagtaacaacgttaaaaaatagttatgatggttctagtttcgttaagcacttttttttacgaacgccatgatgcaaatgtgttagaaaaataagacataatgtgtacgttagtactctctaaagattgagatttaaaatactctagatctaaaaacattactactatagggccactgttactatgcatgttctctgttactgcaaatttcgtcatattgttactgccaaaagtgcagtaacaacctataaagtttacagtaacaacctatacatttttgcagtaacatatgatgttactactcttctgggataatgttactgccgaatcataataataaggtatgattgttataggtacataactgatttgttcacaaattagaagtgcttgccattaactatgagattatgggttcaagtcttgaatttaccaatttatttttaattttttctaaaaaagagagaagaaggagggagagagaaaaaaaaggggaatcggagggagagaggagcgacaggcgggacggggatgggaggtggaagggggtgtagaatagttattctaagggaggggtgtataatagagctaatatatatatatatatatatatatatatatatatatatatatatatatatatatatatatatatatatatatattctttactattaaaaaattgaagatatttttgtctagtactttggtacatcattcgtgtttaagtcgatctttaattttaattttatgttatctccactacttcaatttccattgtctgttaaaaaaaataagtccgactcaaagaggtaaaaaaaagtccgactcaaaagccataaaaaaatatctgtcgtcactcgtcagtatcgtccgacttaaaaggaaaaaaaaaaggtctggccagttaaaaaagaaaaaaattccgtttggatttttggcacgggttttttttcccatctttttgcacgtgaaagagttttttacgtgcacgcgtttaggctcttgttttttcgtccgtttttttaatccgatcgcgcctctgggtgcttttgttttttttcgtcaattttttttatcgccgttttttttttctcctgtgtggttttggtttttctgtttttaatccgattgttcgctgcacgccttctgagttgaaccctgacgctgcgccgccaccgtaccgattgtgcgttttctcctccaatttgattaaaaaaacttccccactactctctcatcattttcttcattattttccttttcgattcggctttaattcgtcaaatttaatctacgtttaacaattgccgatgatgacggcgatcttccccggttgtttttatcccgagctgattttggaaaaaaacggaaatagaagattgagaaccaattttgggtgatcgagaaagattcggctggatttgatggggaacaaagagttttacactctgattttggaaaaaacagaaagagaagatcgagtggataaaaactctcaaccaattttgggtgaacgagaaagattcgaccagatttgatggtgagatttgctcctctggggagatttacttcgacaacggtacggccacgggactatcttcgggaggttgaagatagtagtagactctgcgagctgtgcttacggctctacttgtggctgggtcgaagggaagcaggccaaacggagggagacaacagtctgaccgaagatggtagtagactgtgtgaactgcggttatggctcaacttgtggctgggttgaagtgaagcaggccaaacggagggaggtagctggcctagggctaaaaaggaaggaggctatcgaccctaaacccaggaaagattttcattaacttttttaattataatctatagcgatccctgtcgacgtttgatgtcgcgattccggtatttgcatagtatggggatcgttggtactaggatatatgcgagattgtaataaaagaaatggggacgaggatttttatacaggttcgggcccctgaattgtctggtaataaccctactcctattggccgaagccggtcgttgctcttattcaccataatcacaccagtacaatatttggggtagcctatctaactgttgtcgacttaaggtctgaagtgctgactcgtagtcgacaacaggatagccttcctcctcgaatccgcatctggcgagatcaaagacaacgctatgtctctcctgacagtatccgtagacaccgtagggcactagccatgtttatctctgaagtcgatatctagtgtcttgtcttggcacatgttggcttatatgttgatcttatgtcttgatctattgtttcgtgtcccctctcctcctcctatggggccttgtatttatatccataggtgtccccttgtccaagtagaactagggaaattaatatggatacaatccaagtagtctttgtcatttctatgtagaactctattcatccttccttatgcagaactcctcctatatccgaaggttgttttcgtataagacatggtatgtggtggatcctgccgagatttagtcgactactattaggtatgtggtatctataacactgacaatcccaatgttaggattcccatcaactttttcaattataatgtatatagcgattccaatattttaatttattgcttaactcttaatatattagtgaaaaaatgtctttacccgtgcaacgcacgggtattttttatagtatatatatatatatagttagttcttcctcttgctatatttttcaatgttgatgttgaagcagatatattattgctgattttttctgttgataataaaaatttggtggtaatattgttgatggtgatgagtgaactaactcactgaggatgtgtggagaaatttccccctactctgaaatataccctgtaccctgaaatataccccgtaccgtagtgaactaatgccaactttgtggtgggctggtggcacgtccggatttcttcttctttttgaagtggtgaatctaattaacaaatttaagtaatgcatattttcatggttgtttatgggatgattattagcaaatttaaatatataattttccaactagttgccaaatttcactttggtaagtaattaaaaaagaaggctttctctgaactggcaccatgcatgcctatctaaacgcgcacatgtgcaatattcggaattagttatgacgtggtcactgatatatgagcctatgagtgtgatgggttctacatgtcaatgaccatgttttctcttaactttacatcggaggatctcaatgtgtaatcttgacggttaatgcactagtttaacagcaacatatagagtggactctccactaaaatgaaatgcaatggagtatgtaaactgttcatgtctatcttctttacacatgacacacacaaacagccaccagtctgatgtaatcgatcgaactgggctctctcatcctcaccacgcaacaaaacgcaaaaattaaagctgctaattcctttaatttctcctagctaataaatccttcacaactttaacttgatcaaatcaacaatggcgacatgatgatcagaagaaccagctgccactggccgcctccacctcctcctgctgcctcgctccggcggcgagcctgatccggttgccgccgccgcgagcgaaggagaaagacgacgacgccgaccgccgcagcccaccgcccggctcgccgtccgacctgaagctgccggaggagctcgagccgccggagccggacgaatacccgccgccgccgcgtttcttgctgctgcctttcctccggagcaacgggagcaggaagcacccgtacgccggcgccgccgcgggctcgtcgtgatcagcttcgtgggcggcgccgtacaagtccggcgccgtggtggctcggggagcgaggtcgaggaaggcggtggggcgggggcggtactcgctgccgccgccggcgtacctgctccggcacggcgaggccgacgccgccgacctgcacgcggcggcggaggagaggcgcggggagtggtagtacggcgacggcgaggcgcgcggcgacgtcatgcagggaggcagcgccagctgctgcctcgtcgccaccttggccagcgccggcggcaccggcgacaccaccgccgccgacgccgcggaggcgctcgcgctcctggcgtgcttgggcgtccccgggcagatctcccacttgaacggtatcgcccccgccctcctgaacgagtcatccattgccgccgccgccatctctacggagattacagcttcgatcctctcgatctcttcttgatttctctcttgatctttcaattcaaatgcaaatgagctgagcacgatgatcgccatggctcacaactgctgcttttataggaggacacaaggctgtcttcgttaacgtgggttgggaactaattcttcacgcgcataaaacaagcaatagattaacacattattaattaaataatcccttcataacaattagtataatatgaattgaatttatttgtttaaaataatatcattggattgccatttgaatttagtttcatatggttataattttgttactataaatcttgtgctatataagaaactataagtcaaagagtatcgagtttgaccatatcttaaattatgagatagagggagtgttaacttttaaaacttaaaaattaatcaatataattttaaaacaacttttatatacctatatttttttaaaataacagcatttaccgattaacacagaaaataagagattagaaaaactgatacatttcaactcagtccaaaaagctgtgattcaggagtgattggaggagatagtggcaacttatctaaactttttttgtttagtggttggagagattgcacacactactggccggccgtttaccactgagcacacacacaaacatgcatgcgcggcgcccatgttcatcttgacttggtgcctctgaacaagacaaaacggcgacgaaattcaggttaattttttctatggagggtttcagtagtgggtcggcgaattcagatagatttcagttcggcgcatttttggggggacgtcgctgtcaggtttgaccgtaccgcacgtcgatgatggcgggaggagcactactttctccggtgattgggtcggcggccgatttgatccttttggtcgtgggctcgtcagatcgatggtgtgatgatgcagagtacaagtaatgctccctcagttattaaatatttgataccgttgattttttaacacatatttaatcgttcgtcttattcaaaatttttttatgaaatatgtaaaactatatgtatacatgaaagtatatttaacaatgaatcaaatgataggaaaagaattaagaattatttaattttttaataagacgagtagtatttgttttctcttgttcagattgtggtggtaggaattatggtcatgagagatcagatagcgggatgctgccgatttggtgtgagtggctgagtgctctggtctaagcaaggttggcttggcacaagtagcagattgtgtgttttttccttgggcatcgatgtataaattggttgaagtgttttgggaatgtaaattttattcaccaaaactctaaaaactcagtagaattgttttttgggtgcggttgagaggattggtagttgtatattcggttgttccgttctccgttgggtatttatatccagacgtcaacttatcgataatgagaaaaaaagtatgaagtacctttgggatgttaattaatttataaactcgattttaaacatcggattataaaactgagagcaccaacagaagaaaaaaaagaggtgaaatccgtgtaataatctataaggcaaacgtggatattgaatagcaaaatggctgagcacaacatgtcgtgtgctgagattcctgcgaccagagataaccatgtttcatatcaatcaagatgattgctaaccacgtctaccacgcggtgccacagggagttcttgttacgcttatgaccgtgtagaccccgacttgggtaagcgatgtggtactaaagcaaattaaagaaaggacgtcaagatccacattagtacgtagttctattcctggattaatttggtctaggcccaacgtaattggaaattcagtcccataatagaacatgcttccgaacgaaattaatggggaaaaaggcaaaatgttaattggttcttgagaagagcaagcacgccatgtatctaatgccaaagataatcagattgacgcacatattttgttagtatctttcttaatttaacgtgaattcatgtagtaaattctttaggttaattaactcaatgcttcaatcaagtgttgaagtgatcaactacatccaacttgttgcgctcattttcttgtatcttctacaacaatccaatatgccaagggtcctatgcttgtttaattcgggacggagggagtaagcgcttacacaacatagagactccaactccagccaagacaatctattaatttgatacatctcaaagatcacgtagttaaaaaaaaaaccatcatatatatcattgacgtatcaatctagttctcatatgaaatagtatattataactcagtatttttatgaggatagtttcaaaattttgtcattttataacaattatgatgatgctcatttaatattataaatatcattattttctctataaacctagtttaattttggataatgtgacttaagataaaatttaaaatgattatattttgagacaaataaagtatatatttttttagaattacacggtacaacgcagatactcacaacatgcacacacacactcatcttcatgaacacacatataaaccctactcctatgagcgtctttgaagactgggtcagcaaattctacccctactacataaaaaggatgtggtgttcatctatcgtattaacgttcctaactttttccaggttactacttgtaggcctattctaatttgtgcggctaaagctcaccatatgttaattagatcactataatgttagcaacccaactcgaccggcccgttagaattcgaagttcgaaccaccagcattatattgcaagaggtcggttcggctcggattggataggttgaggaacgagagaccaacgaacacggcacgatatttattttcgaaaggttttaatggcaaggaacacgacatcgttccgcatttctggtgaatgttttactctgttttttaccgcaaaacatatgggaaatgccccaaatcaggcgcccgcaatcctccacggccacgtgcgccgcccccgccatgtgtccccaccacgcatgccgttgcaataaatcacccatagaaccatctattaagagaatccgttttattttttattccacaaaaaatgcttcacctagtatactcataatgttttactatgtacagatcaaatgttgcagtgaattgaaatattcttttgtaacaaatcacccacatattataaaaaccctctattaagggaatccgtttcattttttgttccaccaaaaatgtttcagctagtgtactcgtgatgtttcactatgtatggattaaatgttacagtgaattgaaacatccttttgctatttgctgaaacattgttttcatataaggtgaaacaacgttcgatgaaacattttcgatctacttagtgaaacaattccgatatacttagtgcaatagcgtgcaacatttaaaaataatttaataataaaactatttttttcgtcggattatatccatgtgtggtcttgttttaaatatttaattgtaacagatttaatggtgcaatcggatcatgatttggataaataatttaagagaaaaatagtttaaagttcgcttagatacatacatgtaggatgacttcatcatgacttgggcgtccgatccgtagtcgcctcaaaaacatatgcaaccaatctacaaattatcaatcatttgattattatatatccgtgtgtgctggcagggagaaaacacaagcagctaagaatcaaatataaatatcggatctactaaatggcatgcaacagaaattagggatgaaattttacagattttggatcatcggattcgcaccaagatttatacctgggctcctccaactcctgtgagctctagtaaagtgcccaactcctgtgagctctagtaaagtacatgtaaattagggtttgggtaggagggggagttggagggtttagctagggcttagaggactgacagtggacacaggcaagcggcgaggcaccggtggttccatcagagccacgaggtcggtgacgggcggtgggacggtgttggtggttggggcaaataaatcaagtggttggttgtggatttggtgacggggagccatcagagacggggaagacactgctactcttgaggagaagacgctgttatcggtgctcggcagccctagaggtgagctcatcgggcttgagtgtgcgtgcatacggtagtgagggaaagtaaaaggggatggctagtgcgtgcatacgcgccagcaattttgctggcgcgcacgccagctgtcccctccccctgggcccttttatttttttcgtactttttttcttgatcttaggcgcgtttttctttttcttttttttcgtttctttccgatttttcttctaatctttcgtacacctctttacaaatgtagaattgaaaagttttttattttgatttaaaagttttcaaatattgacttgaaagtttttaaattttgtgttgaaaattttcaaattttgagttgaaagtttgcaaattggggttgaaagtttttaaatctgagttgaaagtttttaaatctttcaattcaaaatttgaaaactttcaactcgaatttaaaaactttcaattcaaattttgaaaacttttaaatcaaaatttgaaaactttcaactcaaatatgaaaacttccaacttgaatttgaaagcttccaactcgaatttcaaaactgtcaactcgaaaattcaactttgaaggcaattttttgaaaactttcaacaaaaattttaaaaatgttcatcatatctctgaaacttttcaacttagctatttatatattattttgataataaaatctttaattagattaatccatacgcttagcatggttattagcgttaatgacacgtgattatagtggcccacgtgcgacgagaaacagaaaaaacggaaacaagaagaaaaaaaaggagcgccagaagctacggactcgaaacgcgcgcgacttgctaatccggcgcgtctgcgcggattagcaatcctgaaagtaaaacgataaggttacagtacacacgaatcttaaagccaacccaacggtctagaatttcaagatgcaacgtgggattttctgtcataaattgtgtagctagtcccaataaatatgcgcttacacaacacagagaagagagactccaacaaagccaaccgacacatgctaaatcaaatcctcgggtacacaaacttggcacgaagcaatcgctcgaactcctccacatttgcagcctccatacacatgagcacccgcacggcggcggcgtccccgccgtcaccatccgctgccccgccgtccatcacgtagaagaaccctccgcgcaatgactccgcacgggacatcgcccatggcttcccccacccgaagtccaccgcgtcgtacagcggaatgcccagccagctcaccacccgcagctccgtctccggcaggctgccattgtccggacgatcgggcatccccgccatctcgttgtagtcgatcgccgaccgcagcatctcgtcgtcgtttaggcggccaatcacgcccttaattcgggcggcgatggcggccagcgtccccgatacgatgtcctccaccgcggcggcggcgaacacctcgacgagcgcgttgccgaagtagcggtccgggaggggtggcctcatgcgccggcggatgttcacggggaagcggacgagcgtctgggagcacagcggcagccggcgtgcgacgcaggcgcactgccacacaagggcggtcacggcgctgaaggtgctcgcgccgccgccgcagatccgcttgagggtggcgatctggtcgttggagatggagaagatcttggcggagatgaggcccgagcccgacgccgacggcggacggaggtttagcttggggcagaacacggaggaggcgtcagggtggatggcgagccgggggcgcgcgcggaggagggcgcggtcgtggcagggcagctccaccacggcggcgtcgccgtcccggcagaaagcagcccatgtttgcaagaagtggaacatgctatggccgtcgacggcggcatggtgcatcgccgtccctaacactataccgccccatctcaagaaggtcacctgcaagaaaaataaatgctgaaacctacgtattctaacttcgatccaagcaaatcaaattgaatactacttcattagtttcacaatgtaagtcattctaacatttctcatgtttatattgatgttaataaatttatatagatatatatgtctagatttattaacatcaatatgaatatagaaaatgctagaatcaatatataaaatatataagttattctaacatttaccacgttcgaatctatatagatatatatgtctagatttattaatatcaatataaatataaaaaatgctagaatgtcttacatcgtaaaatggagagagtaccttcgtttttaatagataatactgttaacgtttagatcatttattaaaaaaatataattattatttattttattgtgagttattttattactaaaagtattttaagcatgatttatatctaatccgtttacacaaaatttttaaataaaaaaaacaatcaggtccaaaattaacggcgtcatcaagtaggaacgaactagcgaaacgaaacactgacctgtacggcgagcacggcagacggcggctcagtacgggggatgaacagcctcttcaactccggcgacggcttgagatcagtcaagatgtcatcgacggcgagctccgaccgagccaccgcaaagaagacgccatcggcgttgcagtcaatctcgggccggccgtcgccgccgacgcggaagcggccggcgagggggtagaaggccaccagcgccttggccagagcctccttgagcctgcccacgtcgaagaagccgccgccgccgccggcggcatcatggcggcggcggtagaagtgcacgagcggggtgagggctcctctgttggccaagacgatgtcgaggggagaaagccagaggacatgcttcggcgtcttctcgctgggcactacgaagcaacactccatctcttgcgtcccatggccggccataggtgaactgaactactactactactcatcgtctttatagatagtactccctccgtcccataatatagcaatctagcaccgaacgagacactttatagtacaacgaatccagacatgttttttttcagattcgttgtattataaagtatcttatatctgttaaatttttaggagaaaatttatcgataaatgtattggtggtccctatacccaacgggaaatgcatacgtcatttgagatgtcagcattcagtgggctgattcagtggttcagcccttgcatgcagatctttgacacctactccgcaggcaggccacgtgaaatccaatcattgcttacgacaaaatctgcccttatctctttggtctctatgagggcatccactgaaaaacgcacatagtagtatcatcaagtgaactataggtggacttaggtactcaggccctgtttagttcgcgaaaagaaaatttttaggtgttatatatatcgaacgtttgaccgaatgtcagaagagatttttgacacgaataaaaaaactaatttcataactcgcctagaaaccgcgagatgaatcttttgagtctaattaatctatcattagcacatgtgggttactgtagcacttatgattaatcatgaactgattaggctcaaaagattcgtctcgctttttccccctaactgcgcaaatagtttttattttatctatatttaatacttcatgcatgtatccaaagattcgatgtgatgtttttgggaaaaactttttggaaactaaactgggcctcattagacacgcatctttcaatggagggtactccaaccagccctaaccagccctaccaaatctaaggtaacagtggaggtattctagtccacaacggtcgtgctctagcccacgaagccacatgtatgtttttccttccctacccctagcccaccgactgcccagcttctccctcatcatccctttttgtttgctgctccgaccccatcgtcgcccctccacccgtcgcctccggttcctcctcctgcttatctctctctccgttcgtcgttgacccaattgtcaccacccgccccttcacccgtctccgcctgcccctccttccgctcctctctctctcccttgtcgttgttgacgaagctcctcttcaccgcctctctctcctagatctagcacgccggcagccagatctagtgggccagcgccgtccccaggtcgccaccgcctctctctcccactgcccattgttgtccatcatgctggaagctggatctagtgggctgcgtcgtccccagctcgtcgccacttctctctcccaccgcccgtcgccgtccacgacacaagctagatctccccaccacgtcgccgactcgttccatggagctccaccaccctgccgtctccaactcctccccaccgcaccgccggctcggagcttcaccaccgtgccgtctactccggctcctccccacggatgagaccgagggtagaaggagaaaatgcatgtgccggaacaaggaccatggctcacagctccacgaaaaggagcggaggagcacagggaggcgcgtgcctcgcagaggagtcacgaccttctgctgggagatggctccggccggaaaagcgacgtttgctcgatggggtgaacagggctatgctccagggacatgtattggggatggcctgagtgctcacagtacatcgtttccaaaggcagattttttccgagacatttaaccatttgccacttttaagatatggtgattaaggatttgccactcgttgtctatgatatgtggcccctcatgtgtctatgacatgtgggtttagtggcaaatcctttagaagcactagtaaaaatagtaaaagtggtaaatagttaattattccgatttttcatgtctaggctattctttcgtactttactttcccttaattttcttcgtactaggcatctggtcttgcgcttatcttcgtaactctcaagcaacactcgatctcttgggtcccatggccggcccccggccataggtgaactactcttcgtcttgatcatgagcgaaaaaacactcttggcagcatgcatcgaccgatgcaattcacatgcatgcagtatacgtagaacctgggctttttgaggagctactgtggtaattaaacacccgttggaggggtccctgcagggtttcaaatctctcactatagctgccctatcttatgtaattatttgagaaggattctaattatttgttctcatatataatttagctgctatagttttatttagcccgctatagctgtttgaggagctatccgctaaatgttttagcccgctatttaaaacattgggtccctgccgtccgtgtccgtttgttggaggaggttagggaggtgttgtcggttctgcaaggagaggggaacaaggagcgacgccaggaagaggactagaggagggctcgagttaggggctggggtgtggatgggcgacaccagaaggacgacattgagggcgacgccagaggtagacaatggagtcgggggcgatgccactggcaaagggccgcagcatcagcgaaggacagcgccgagggtgagcggtgaaggacgacggcgacagaggcatggatgggagcgagatttttctggtctcgagggagagatagacagcccagcaggtggtgtgattaatgtgtttttttcgggagtagctatgtttgtggcgccatattttttaccaaaaattagtcggtatgtatttacattgtaagtccctaaattacatatgtaattttagtgtatttacaatgtaagttctaaaattacatatgtaaatcctaaaattacatactaattgcatatataagtggtgtgtaagtggggtgtaactaccatgtaaatttataaatttaaatcttacattgtaaaagataaaatgcaaaagcatatgcagtcctaacgttctagctaggagatgatcaagagaagaaatcgaacggtccgaacaggcacagccgaagacgtttagcgatcagacggatagcaaagccgactgagatcagccccaaaaagtgtcgacatctttttagcaagtccgtttttttctaagaatgatacttttcgcgattacagtgcagtcctcaaaaacaaatttttttcttcgcattgtattttcataaatataaagatttttatgtaaactttataatcgtgagataaatcttttgagcttaattagtccatgattagccataaagtgctacttactacccacgtgtgctaatgacggcttaattaggctcaaaagattcgtctcctagttttcaggcgagttatgaaattagtttttttcattcgtgtccgaaaaccccctctaacatccaatcaaacatctgatgtgacaccaaaaattttctttttgcaaattaaacagggccttaacacgagaagacatagacataaagaaaaaaagacgtgtcgccactctgagtagccagaaaaaaattttaaaaactgtgaaaagagatgagggtagaggggttatcagctgatgattatgttatttccacgagattagtattttatttccacgggttagataagataacagatctcttctgttaggtatatatgaatcaggccagcctagggaatgagtacgtaggcagtgcggcaatagtgtgagctagcaagcaggaggaagttgatgaaatagggatcaaatgaaatggataatctacttgacacgatatattaatatttaaaaaacaaacttagcatatatcttaacatcatgatcatataatcaatacaatgcagtaggaaaaagtcttttgagaaatcgtactgttagtgtggcaagccaccagttaaggaaccttctaatcctccactcaaaatgaaaaaaagaacctgctaatattgatatttgagtgcacctacaacttgagtatcctgtgagaactgaaacaaccaacaataatttgtaaaggtatgagattaattcaacataactcctgatacaacaaatatttttgcacaacacaacagcatggcatactatctggcattgacagatgcagaacatattttcgtctaattttacaaaaaggggggtcgttaagcatcataacaaagtgtctggctccggatgatcattctaagaactcttcgggcgaaacttccagacacggatgtagttttcgccatgtgtggtcacaattttcttcatgcctactgccaggcaagtgatctgagggcgcaggcgtgtggggatgttgtcaagccgcgcatttggagcaacctggcggacgcttttcttttcgacttgctgatgggaactggatgctgctgggcggtctgcattaactatgaaacttcggatggtttcaccggttctttggcatatcaagcgaagcacaccgtcaataccgccgactgccagtgttgctgtgtcacctggcaagtgatgtgcgctgtagatgacatttgggctaactctcttttcccagagaggcctcagggtcctgagcacgaataacagagaatataagtatggctctaatggagatcacagctatgacttactgtggtacaccattagcagtttagtactataagtgtgccaatattcttgccatgcacgaactaaaagcaatgtaaaataattacagactccataagcatcacgaaagtgaaaatgagaaaagattctaaaaatgataaacttcatagtatatttcaaaagataacttaataattgtcagttgttctagaatgttaaagtaatctgaactctttaactaatctcttctgtgataaataatgacaggtaggatgtaaactaatacttgtaaactaatagaagttttgcacacacatactcctgaaagatcatggcaggtatggactatggagtacagacaaaggcaaatggtttatataggccatgcatctctctattcaagttcactctactgaaagtctcaaactaaataaaatgtttaaaaaacaatacttcaatgttcatgatttgttctataactccagaggagagagcttcagttattacacagaccagacagctcaatgatagtaaattactaaattctatcatcttacgataccgacctcaagtcccagcagtgcgcataaccagcagatgagcccgcgaatatcaaatggccacttgtgctgaatgacaagcatcttattgctgaaatcattagaaaacatgaaattagcttagtattgattaagctcacagcactaaatatctaacatactgaaatggatcatcattggtgccttttatttacaaagatttaacaaggacaaatactgccagtaaaatcttagatatagttcttcatcgaactgagacgagattataaggcatgatttttataaagaacaacataactaaagaaattgccaaacaagaaaaaaagagttggataagattgtcactcagcatcctgccatttttctagaacaatgctattctttttaatggaagccaaccttttagagggaagaaaggggacactgcataaccatgcattaacttaatatgcaagtcatcatttctgttcaaacttctgttgaacaagcattatgctgcaggtgtattattctctttatggtaaatgaaaatgttttttgtcatggtatgtcaattcatttggactttttttttttgaaactgatacatttgaacattttcaacatggaaagagatgaagagaccaagaacatccccaatccccatcaatcatcagcaattggcagtccatcatgcttattcaggatcagctgaggggttggttacctgttggtgcaaaagctgatttcagaacacctaacttttgtccagaggtttgatctgcaatagctacatttccaaatgtagaaccagcagcaatgagctggtcatctgttattgtcaagcatgtcaagggagaagagtgaagcctgtataacacagttaaataggcatcagctgcaggacatactaatatagaatgcagaactgtacatcacaggggcaaaattgtctctttttttctgcatttgtaattattaatccttcaaaaatttcttaaatatgtacactatgtcattctcaaagatcaattgtatccaaataagtgttgcttctcaacttttctgcatccatagaggcccatataaatatcaaattagatacacctttagaaggaagattctaaacctcagcacaatctcatttgactttaaaactatgtaaaacattcaaggggaaacaacttcatgaggtgcagacatgcattgataaacaagacgaaattataccagctgaaatggttattagggctgcagga

SEQ ID NO: 16366 - DNA, 3082 bp, Oryza sativa
caaagttgaccagcattttagaacttggaacaatgtactcattcatgtatttgcaactttcagcagaccaaagtcggagagtctggcaaaaatcaaatgccaagatgatcagcatgattataagatctgtgacggtattaaacaaaattaaaaaaaaaagcagtaagcactaaaaatcttcaatcatgctttcaattatctaaaaacttcgcaatgtactcaggcagccatggtttccacaatcatgtcatgtcatgtttcatctggcattctgcactactatagcatcacctgaatagcgagagtggaaggccattgaccatacccctattttttaaaaaacaaatataaatataactttttttttgtatactacatcactacatttctttttgctaaaaggacctaccaaaaaggtctaaagcacaaaaattattattgtactagtacaaacattaattatttgtgcctgttacatcttacttttttatttcaaaaaacagccatttcacattgatgaaggataataagaacggcacatgatgcaaggctcaccttatctccaactccagttaagattgaaccactcttcatgcggcatatggtggccctgaaacaagaaatagaaaactgaaagaaaaaaatgtggatattgagccacaatcccaacagtgcagctccagaaaagaagatacttgatcaaatcgaacaatatgaaaaaactaaaaagaaaatgtttgagaacacgagaactcttttagttgatataactaattcactatgcacaagaaacagcctaaatacagaagctcagcatagtacagggctacaggcttactggttaggatgaccaatccactgataaacttcagcaggacctctagagaaagacgatgcatgttcatcaagtgcaagctccttgaagtaactctttattgaagtattagaccctgaacttcttgcttgtggattcctcttgtaatatagatccctcatcagatgagctgtgtcaataactctattcctataaaccaagcagagtagaataagtacgtacaaattttaataacaactgataaattgcttggtaactttggaattttcacaaggaagatctggcggcatagacgagaaacatgcatgaataaaattaccaaatgaaactaaaatgattagcaccataaatgtatttgtcagtatggaaaatggtagctggaaaccagaataacactgaatcactgaattaatagtcaagtcacgaactactggacagagtatgaataatatccaaactaaaatgattagcagcataattggcatagttgtcaggacagaaaatggtagctggaaaccagaaacagcgctaatttagcagtcaagtcacaaaccactggacagagtatgaatatccaaagaagaaacacacaacactgattagctccccagaggtacatggttaagatgcagataacaaacaaatgagaggttaaatgcatcttcaacaaatgttaccatgacgaaaactcatcaatttgactagtcattcagtgttctaagcaacagttactttgaagcatatatatataccatttaaggaaaaaaggaaaaccgcagacccggagtattgggacatgcttcatagttatccacttatcctgcaacctctaggcataaaatccaggcagcagagttcaatgcaatgcgacagcagagtagtaattgaggctatttcttctaatctcgtagtagtagatacctgccgtattgtactgtaaattagagcaaaaaataaacatccccagcgaaacccaaacacaaacacacagcgtgcgtggtagcagtaggagggggaacatgggagtgaggaggggagaggagacgattcgcgcggcggatgggacgaaccatgagttgcagacggtggagcagcgggcgaggtcgaagtggtcgtcgaggcgggagaagacggagcggagggtgtcgtcgttcagcgcctgcgccgtcgaccccgacccgccgccgccgccgccggggcccctgcggcgcttcaatcccgcgctcccgctccgtccccggctgctgctcgtctccatggccgaacccctctctctctctctctctctctctctctctcccgatctctctggaggcgccgccgtttgctcgttggtttcacggtggccggtggccggtggccggcggcgactattcggtccttccgccgattgtgtggtggataacggcgtgttgacccagcaaagtcccgagtcgatctggcccaatggcccattacactgacaactaactcggtacatttaggcccatcaaattttggatcgctccatggtagtaacccaactcggcccaacttaattttgaatatgtaccatgtcagctatcgaacataaccacccgaattttgtagggaaaagtgcactttacagattataattcgtagccctcaatcacaaaacctggtatagcgtgtcccctaacttttaaaataagtgacatatgaatctcttggcagttttagacgatggtttcattctaagtgacatccagatggtattttgactttgtcatcattaacgtggcatgtgcatagcatttataataattaataaaagaacagtgtgatccacatgtcaatggcatcaccccttattcctcatctgcctcctttgtctctctcgcgatcctcatctcttcttctttggcaacgtcggcatgggaaagggagcagcggtcacaagagagaggagaaggttgaggccattgcagtggcaagagaaagacagttgaaggtagagcagtggcgcatctgccacgacctatagcaatcactgcggtgtagcctctgtaacgtggccgcagggttctcctttccttcgccggtgcagcaaattaaacgacgagttggatgaggaggtgaagaacctccatgaattgatccgttgactcgctcattcctgccggttcccctcaacgctctcccatgttaatgcgccgagcaacgcactgactctggttttgggtacagctacaaatgtgtgaggatgatggggagttcctaaaggtt

SEQ ID NO: 16367 - DNA, 2640 bp, Oryza sativa
cggcggcggcgacgatgccgcgctgttcaaggggtccgccatgacgcggcgcgcgcggtcgccgcgctctcctacatggcctgctccggtacgttcccccgatccgcgccgcttcttcttcttcttcttctctgatgcgtcggctgggtctcgggatgcggtcgtcgttagcgagaatttgagggtggcgtctcgtgatgcggctgcgaatttggggggtagcgcgtggttggggttcctgcgggttcagctcacgaatttgtactactactaggtgacttttggtttcagttttggtcgttaattcagttggattcgattatctttgggaagagggccggttggttgacttgtgtccaacaacttcagaaaaaaaagttcatccattttggcattacacgcaaagtacatgctgcgtggtgcttggaaattcgtgggggtttcacttgacggatgtgttccgggggtctgggaggctgcttgcatcttcaacattaaatactaggacaggaggtgctaagtggtcagcggctgtacaaacatcattatgtagtaattactgtcagcgtttcagtgaaaatctacaaggataataaccttttagaagagaaaaactgcgtttggtgaaaattctgaaacttttgtttcgggtttggccatgatgcagatctgcgaagcaatcaaaatcgatagagatctctgagatgcagatagcatgtcgatgataggttgaaaacctggtgatgattgagttgagaatccaatattatgccacttagttgtccaacacagatagtcagctaggtggtgttcttatgaaacagggattagtcacttaatttcacatacggacatcttgttttcgttctttctacatttgttttcatttttcagatctcaggtatcattttactaactttggcaacttttctatcagcagtgttggtagtgatgtagaacaaagcagcactgtgttcatatgatttcccctgtgcaaatgtcattacgctccttcaggtacttctcatgtccccttggactggactctggaaagtctggctttgctgttatgttgtgcaagtgtgcattacacatttacacatgaataacttgcttgtagtctaggagataaactgtaggatagcataatcaaaacattacatattcgattttatctaatcaaagaacattctgaacttccgacccttacttgagcatctgcttagcaatggatattgctaaaggtcttttcatacctttatttgatatcactgttgatgaacttcttgatgcatatatgtaatctgctgctcgcatctcctgcctctttttttttttgacacttaataaacatgtgcagatggtgtgctcaacaggccttctttatgttctgaggcggctaaagataatttcatttacaaatagcgagccatccgtgccttctgatgcgttattcttcgttccgttcagaatactgttgcgtactacacctctttctttggcttatttactctatatggtatgcttctttcttcacttataatacatttattaaatacacttagtcgcatgtattctatttgaattgaatcctgagtaatgttttccatcatggtaaaagttagcttcaatggaatctgtgcgtggagtcaatgttccgatgtatacaacactgaggcgcacaacagtagtctttacaatgacaatggagtatttcttggcaaaacagaagcatacgccacctataatcggcaggtacatgtctataaaaatgatttttccttttttttactgtattataaattcgtaatattctcagaatagtctgacgtgctagtaactaatgtaagcttccttttgtcatatgctttcttatttatttctatatattatttccatcttttggaaaccctgaaattattagtctatcccagtgaactagcaattagtatctgttgctgttttttgttttctgtagcctattgctaactgttgtacctgtatttttgtagcttgaaataaggttgcagttgtagcacttgttttcttacgctaaaaatttccagaacattgttatgttctgaatatgccatattttactttctgattttttttaccatgggtttgtcagcgtggctttgattgtatttggagcatttatcgctggagctcgagacctgtcgtttgatgctcgtgggtatgctattgtctttgtggccaacattacaacagctgtttaccttgctactataaaccgtataggtaacatttcattttcagttttgccacatacaatcccattctaaactacatagctttctaaccagcagttttgttttgttttaggaaaatctagtggtctaaatagcttcggcctgatgtggtgcaacggtattattttgatgacctgtttcatattcataatatccagataaaccatatttgccttagcattcatatcctatccatttggattccaggacttgtctgtgggccttcagtactttttctgacatatattcagggtgacctgaagaaggctatagaatttccctacctctattcccctgggtttcaggtacagatttcacagaaccatggtcatcactgatcttatttgtgcaatatctaccctccttt

SEQ ID NO: 16368 - DNA, 659 bp, Oryza sativa
tgaagctcaatgaaggccttgagcaaggcaagtgacctttgatcatcttgcacctataatttaaatctaagtatttcttttccgcaaatattgcatgaataggattaacacgagtatttcggccgcggcttgcgagatagcctaccggccccaatcctaattgctgcaattaccctccttgaattattgaacacttaaacctcctttgtcaactgttgtgctttgatgcacgggccttcgggcatgcgcatcggaacacctcccctcaattttaaaatatccaatgatgggtaaaacttggggttttacaaaaaaacttggaaaacccgacaccagggttggtgtttgcaaactaaatgaatttccaataccacagaccgggggacctaccgggagtacggtttcccgctcttgcacttaaggaccgtttcccttggaatttcatccgaacataagtctcaagtgcgaccacatgggtggaatgggacacccctagctgagtaatttgctaatcgggagaaccatgatgccaagagacatgtggattcaacggggtggtgccggggagaaccctcgggcttcctggcacagtatggtctgggacctaacctgttgtcggtctgggacccctctcgttggcatatggtgaacctgtgtcg

SEQ ID NO: 16369 - DNA, 1605 bp, Oryza sativa
aaaaaattatgttcatatttgtggtttgttttcataacgcaaactgataaaattgtatccaaagctcaaatgtctgaggttaaattgatgaactgataagcaattgagatgttgagtttcatctagcaaccaacaaccactaatcatggttgctttagaaattagaataccagagaaagaaaactcctttagaagagcttgacactagagtcatgtcagctttagaaattagaatactagagaaagaaaactcttttaaaactctttttataaattacaaaacccacttagaatgaggcatgtcatctttctaggattagtgtcatctactcatcttggtacaaactgattgtgtatatttgtatgttctgtacttgtgtatggatattgtcgcaacaccctacgtctgcactatgctcaactaataagctactagtgtaaccaaatacattgtagttcactctgagttacaactttttcgaaagaatgctatgtgcataagatgattcagagactaggatacttattccatgatctaaaaaagatactccctccgtttcacaacgtaagtcattctaacatttctcacatttatattgaagttaatgaatctagacatatataacttcaatatgaatgtataaaatgctaaaatgacttacattgtaaaacggatgaagtaattttaatatttaagacttgaatgctccatcatttgcttttcagctcatcaaccgcggccaaaatttaaattaaaaaacttaaattcagagttgttttttatgttttatcgtagttatattggcttttaaatcacgaggaacacgtttaaaaaatttacacataaattattgttttcactaataagtgttacggtttataatcagcagtggacgaaacgatgaaacttgaagtgaagaactgaagatcctgttgagttggtggttggtacatttcaagtgaagaactgaagaatcgtagagggaacaatgtcggagatggaaggagctctgagatcctgcatggagcagctgctcatcgccagggaggagcgggagcagatcatcgtggaggcggccagcgagatctcctcggagaagaagaaagcgcgggagctccagcggaagctcgacgccgcgaccaagaaggccgcgaagctcgccgccgagaacagcagcctcgccaaggccctcgacgccaaggacgcggcgatcggcgagctgagggagtccaagtcggcctccgacggcgagctcgccggcgcgagggcgaggctggacgcggcgcataagcaggcggcgtcgctgcagtacgaggtgcggatgctgcagaaggagctggagatcaggggccaggagcgggagtacgacctccagtccgtcgacgcgtcgcgccggcagcaggcggagagccagaagaagatcgcgctgctggagggcgagtgccagcggctgcgcgccatggtgcggaagcgcctcccgggccccgccgccatcgccaagatgagggacgaggtggaccagccggcgacacccgaaggtcgcgctccgtggcgcctatgtcgccgcggtccgtggcgccggcggcgccgatgacacccatgtc

SEQ ID NO: 16370 - DNA, 2629 bp, Oryza sativa
  unsure (1)..(2629): unsure at all n locations
agaaagataaaaagaagctgaccataataggaaactttaagtcataccctggaagcctggtcagagccttcatcttctagcaaatcagcaccagatacttcagggggagaacaggactgttctaaaactctggcaggaatatcatttgtacacttatctgtgttttgtacagaaagcctatgatggatatcatcattgccaggtttcagcctttcatacttattactgaaagcacattctgtcagttcaccttcaacattgagctctggtggagagctagccccattcgagtcaggagaagttttggaacttgctgaggatgagacatatgctggtctttcttctgaaggttggcagcactcaaccattatatcaagaagcaagtctatgatagcctgcttcaagacactaactcccatcagcaaactgatgaggcttgtggaactcgagtcgcactttgaaacatctttctttccaccagccctggtggatactttggtaggaagtagcatgcgctttacttttgctgggttatcgaggtaaacacgcagaccagtaagaaatccagcaattgcactagcatctgttagaattttctctcttaaagtaacctgcggctgagtatagttttcaccatatgtaagagaaaacccagctctcgagaggaggtttcggaacatatcttcctcatcaccactcatatcctcgctgtcttcagactcaataaagtcatcaggatctgttgacaaatcatcctggtcgtcatctgacgccaaaacctgcaattgtgtgactactataagagatgcagagagcttttctaccagnnnnnncagcaacagttatccaagtacaatactacagtataggaaaagactagaaggccataatgttatgctaccacccgaatacaggaaaacgaatagaagaacacctggactgctactcatgcttatgtccttaaatctagtgaatattgactaaggctgagttctttccccaactttcccaactcggctcccttgtgttccgcgcgcacgcttttcaaactactaaacggtgtgtgttttgcaaaaagtttctatacgaaagttgcttaaaaaaatcatattgatccatttttgaaaaaaaaagttagctaatacttaattaatcacgtgctaatggtccgctccgttttccgtgcgcagcaaatgggttcccaacccaaacaaacgagcacagcctaatagtgcccagaacctggcatcttcttaaggactttgaaattgacatgtcagtaatgccaccagactttgaaatccattggcatggaatactgtcgtgctttagtcctgttgtctacaatggatttgaagaaatcatttttttgatttcctaggatttttgggtagttcaatgaagaatgtacatataaatggaaaatggacacaatattcgatctgaccagtgttgcaatttatttttttctgtaaaaatgcttaaaagaacatttcacctatgcacctttgtagttgtgtgttgttccaactaaatagatacacctaattatcaaatgatatagcactagttcttcacagaagtttaaattatagcctatgtctatatatgattcccgtcacaaaaaattgagcactatagttgttacatgttgtcaacttccattattaatctcttatcataatgtatccactaaattaaaaatatatatatgcagcttgtgcaatccctgttatttactaatctcagctatactatacaaaaaaggtgtgttagcatttcaagacttgtgtcactatactcccaaacattccaaaagcaaactaatccaatatgacccaaatcaccaaaaaatatgagtatcctaggctttttcaacttattattcttttgatctctgtcatatgttatatcaaatgtcaagctgcataatcacattcgatatgaacaattggattttactgtactgcaacaacatttggttagaagcatgcatgctatacaacacgaaggcaatttggatgtatttggagtaactataatagtatcatgactatcatcaatatttaccccaacccagcacaggaagcaaaaaggaacaagccacatgaaaaacagcaaatccaatctcacctcaagatcagagaaatcaaaccatggacagcagtctatgatttcacaaacaaaaacaacagtgtcccggacaagaaaaccagcatcagtgtccaacaggtctgagaccttcatgaactgaagaactgaattgttccatgtttttgtgcagattgatgattccttacacaccgtttttgcagaattcttctggttaattatagccatcttatagtgtacccaaaagttcttatcaggatcaaacccagatggctggtcactttccaggtatatgcagatcgtatcaaacgactcatatacacctgcaaattgtgataagatgagcacaaaaggcaagaaatgtatggcacaagacatgaaaagtaacttcctttacctatacgcaactcacaaccaccagcctggaaatatttactaaaaatctttcttgtctccataatatccttgaaggataagaaattttccaccttccacgtgaatgatggacgttttggca

SEQ ID NO: 16371 - DNA, 1551 bp, Oryza sativa
agtgtacttaacaaaaattgaggcatctatagtttttaaaagatgagttcaaatgaccatatgctgcatctaagagaggagaattggcacgatttatgcaacaaaccaattcatttgtatcatttaattaataaacaggatttgatcatatattaaaacgaaaaatgtgaaacccaagctgcttaatttatttagtggcatactagccagtagctaaactagtttttttttaatcttttgggatttacctcatttccatttccaggttccaatttacacaggccacttaaccttgattccaaaattttcaaacagttaaaagcaccccacacatttagctatgttatagttctgattaaatcaatcaggtgtgtgatgtgtgtgcctgggtatgttaccaaagtttagcctctataagcagtatatgtacttatgtagcagaaatccacaagttgatcttgcaaactaccagatgagtatggagaaaacatttgctagaatgcttaccccgtggatacacaataaggcggcagtctcgattcccgacctgaaactttctgcttttgatgcacagacccgtgatctttcgcttcttgagcagctccttcaatcttgtgaagttctcaatcctccacacaaactttccaaagtgtccatccgactttctagccccagctcgtccactgccagcaccactcatgcctgctatcatcggtaagctgcgagtgaacgagtttgactccttgatcacatgcactgaagcactaaacaccacagcaccatcaagcaggtaacccccatccgcagccaaaaaatcatccatttttatgtaatctccccacccaaggctggcattgtcagccccaaaccggccatacgagtctttgtggatgtgactcccacctggcttctgattgaggatcgaaacacgaaaaagacaccagcacccacggtcaccatcgggcacgccgctgcccccggcactcgacggcaatgctgatgccgaggaccctgatgttgcctgcaccaggggctccttgctctccagacacaccgacaaatggtccgcgccagatacattactctgatagacactaatccggagcccgcagtcgctcccaccggcattggccgccgggaagaaggcagggctcatgatcttctgcgtgcggaccatctcccggaaggtgccgaagttgagcaccttccaggtgaagcggctgtcggcctcggcgaacgaggcggcctcggcgagcaccgatatgtcggcggcgatgacgagggagtcgtgcggcgggaagaggtaggcggcggcggcggacggcgcgaagtcgcaccagccgtgcgaccgcttcttggaggagaagcggtgccacgagtcgcgcgccagggacttggagggatcgggggaagggtgggcgacggagaggcggtagctgaagaagcactcccatttggaggaggaggaggtggtggtggcggacgacgacgacgtcggggttttggggtcgagcacctggaggtagagggagaggtagcccgggagcgcct

SEQ ID NO: 16372 - DNA, 2387 bp, Oryza sativa
tcaaacattaaatccttaagccactagtgatgtattcttacttgttcaaagttactttatggtctatagtattttattaaggtaaatctaaacatagatggtaataataaatggtgcttgcatgcaatttaattaatttgcgtaaatctgcaaaatttaagtgaatgacatacatgatcctattgtgttaagaaaatagttttacttgtcttggattgataccagttggtatgtttggctaagctagctaagaaaatggaagtttttttcgaatgcttttctcttttttttatgggaaagccggaaacagggtgaggtatgatattttccaagcattgatgatagtttctggtttgctctaagttgttttatagactatagtttaaatgtttattaaggttgcttattaaggtaattcaagcatgcaatgtaacaatgataagtactaagttgtaagttaattaatatatagaaaactacatgttttgattggatacataaggattttttccgctgaaaaaagttacatatgctaggtcgtcacaaggttggtgctagctcaaacattaaaaccttaagccattagtgatgttgtctcgattgttcaaagtcgctttatgatttacaatattttatttttaagataaaaccaaacatagatagcaacaataattacctctacttagttgtaagctattgatgtgcacaaagctaagctatgagttttgagtgaatggcatatatgatgttagaaaaaatgttgggggttgacccgtgcgtatatttgtatatggttacatcaacgaagaagtgcaatacaattgtcgcaacatctaagaaagaaggttgaaagttggtgctagctgtatttctagtaatacgttcctaaaatatatcccctgtattttcttataggtctttatatgggttattgctaaaaaaagcatcatatccccttaaatctcaatccctacaaataagcaaagataaaatctctattttccaaaggaagaaaacaaattttagtgcattacaaatagaaacaaatcatcgctaccagctacaagtgacgataaaggctaccgctgtgtcctgctcggctgctcgggaagcggtgggatagaggactagcgggacacttggggtcttggggacgaggctgcaatgccacgccctacatctactcatcgacgagaagcctgatcgagttgagccggggaagccacgtcatccctgccgctattggcagagctacgtcggcgtaggatggagggccgctcggctggagatgctcttaatgacattaaaaacttaaacttatatgtgtaatgtatagatggaaatagttaaattctatgtttgtcttttcggtgtttaggtgtatatgtttcaattgtgatcataattgttgtgcaccgaaaattagcaacccatttgtttttaaaagtaatttatttttgtaagaatcatgtactaatttaactttgcttcaagaaaatggtcatatccgataaaactcattctggctaccacatgttttatcggtttatagtagtgtcatagttatagataccacatacctaatagtagtcgactaagctcggcaggacccaccacataccatgtattatacggaatcatacctcgtgtatagaaggagttccggataaggaaggacaaatatagttctatatggaaacggcaagtacggtctccctagttctacatagacagggggaatctatgggtataaatacaagctctcctatgatgtcacgcactgaagttcccctttccagctttaaaatttgttaaataaatcgcctaaagaaattgttgaattaacctagagctaatcctcaattaataaatgcatttaataatcaaattcggcgtggtggaatttttcttgagttccccatgctccaatacattaacaagacttttagtgcaattttcagagctctcgaaataattttaaccaattaaaattgagcacatgcaatttttaaatcccagggaaaatcttttcctccttttctttttcttttccctccttttcctcttcttgggccgtcggcccagtccaccccaccgccacgcgcaccctcctccttgtgggccggcccaagccgcccctccatctctcctcgggacgccgacaggtgggccccacctgtcggggtcgtccccttcctctggccgcctgccccacgtcggcaaccaccgccgaaaccgccgtgcccacctccgccgctcctcccgcacccacgccgcatcgcccacgcgtcctccccacgtcgccgccctctccccgcgtctcccggcacatgcgtgcgctcgaaaaggggcgggattcgcattttgaatccccccatctcctctct

SEQ ID NO: 16373 - DNA, 2171 bp, Oryza sativa
gtcccgcatttctattaaatattgcattgttttacaatatcatgtgggatgagtcctactactcagccatatattgtttaccttatgccattgctaactcgggtattaaaatgactagatgttggtttaggaaatgcttagccatgcttagttctactagtacacaaaaagggaatcacattaaagcatagactttgattattggcatagctttggtttagtgccaccgtaatggtgttggttaattaaaatacactacatggtgggctgtgggtgcatggttttgttagtcatgcccatagcgattaaggaccggttcgcgggataccctggaagaacttaccgtacttaccacaagccagcgtgggcaacggctgggcttgtagtgtagctttcctctagccgacgtacccagacgagggtgggcgtgatggagttggttcagccggggtgtccggttgatcggcttccggattcaccacggcatgaaaggggggctgcccgttgcctgctggggacgggggcgaaccctaaggtgtggtgcgatcggttagagggggttatgcgaagggtcctgtcacggcctctttccggtatgtcgtggtggcatgtcggtgcatgggaatgtgtcgtggggctgtgtcttgtgggtacagttgtacacctctgatcagagtaaaactattcgaatagccgtgcccgcagttatgggcggtcgaccagattcaccgtgattagtctcacatctagttagctaatggaactggttagttcaggtggtggtttgggcctgttgcaacgtggtgtagcgttggacagtgattggttaatattgataaatcactacagctgttttactgctttcaactactgcttttaaatgctagctttatgcaaatgagcctttagcctcctttggatatatcctgcatcatacctcctcttccggtataacttgctgagtacagtgggtagtactcagtcttgctctctttcccccacaccagagctgaagatcttcctagtgggagttgttttgtcgaagttggtttcgtcgctgccgtcaaggattgcctgtggagtggagtcgccccgctgcagaagtcaagtttccaagtctagcttgttttatcttttccgctgcatttgtaatcttttatatttttgtaagacgtggatctgtatgtcaacaattgtcgtttgtgtaccctggctggtcctggataggggtttaatacacattcagcttagaaattctggttcgtgaatttctgggcgtgacatatgaggagagggataagccagaagccaacacacaccgctagatccatcagagattagcctagacatcccccatccggtgcctatggaggccagcaagagggatctagcaccatctctgatctcgatgagttcatattcgaggaggaagactaccccgtcatcgactacgagttggttatccatgctgccaagtcgacgacagctagataggttattccaaatattgtacttgtgtgatctagatgaataaagagcaacaccggctttggccaacaagatttagggctattatttgacaggtaaggagcccgaatctgtataaaaatccttgtccccatctcttttacctcaatctcgcatataacctggtaccgaggatccccatacatacaaataccgtagtcgcgacctcaaacgtcgacaagttgtgtgtctatataacacctaaatcggcagcaggttgacaaatctttaagtgacatagcaatcataaacaaattgaaacttaaaaaatatataaatattcaagttaacttgtcataaacattttcaaacacaaaaataaaaatatatcagctccatcatttacccgttggcttatcagccacaggtcacatgcaaaatttaattttctggaagttaattttagaaatgattttaggattttctttgttgtagtttagttttcaacatgggcttttcaattgctaagaatacatctatgaaagttttatctataagttatatttggttgcttcattcatttttccatggtttatcaaccgttgagcaaacaatgagaggctatatatttcatatcgaatttccttccaaaaaggctcctatgtaaatatattacacaattaattttttttatgtctttgttg

SEQ ID NO: 16374 - DNA, 1718 bp, Oryza sativa
tcacgcatcaacatatcatgagattattagtaaaagctaagtacaccgatccaaccatgcttagcatatcacaagactaatagacaactcatctttaatcgtggtagagaataaaagagtaaattaaagtttgtactatgtattcttcaaagttttcattttatatcattctttaacaattcttttcatttacataacagctaactttacatttcaatttggaccaccccataatatccatctccaagttcagtgactcttcactctgcaaccactccgcacactaactctctctctctcttctttttccatccgatagttagggaaatgccagatccaaaaaggagtagcccggatctagtatgtccgctttccgtcgggtcggttcctacctccctgagtccctgcaagcctagcacccccgacctcaacgacgaccataacaatagtgtgcatgacgatacagaaggtgcaaagacatgtcggaaattagagggtgtgggtgcgcatgcaaagatggagaggaggaacgatggtggctcatggagaaagagcggcggtggcggtgcgtggagcggcaattagtgactactaatgttctaaaaagtttatcaccgacacaatccctaacctagattgttgcattttttttctctaagtattactatacaccggtcatcataaaaaaaagggaattgctaactggtcgcctgctgatttatttttgtttgtcagccctttcttggcctattggattttgttcaagattcgtgcacccaactactgttcatgcatcccggcccagataacacagcccccgcgccgcatgtcacgtcacgtggtcaagcattgtttcaagcaaggaatccggtggcattttttgttgtccacgcatctgagaaaggagaggcagaagcagcgtcatcgacgacgacgccatagctccaacgcagctccactgcgaagtatgtcccccggtcgatggctctgcaagcttcggaccacgagggaggtgagttcccccaatggtcctctgctggagtttgggttatcatcagcgtcggagaagaagaggaggtcgccggagttagaaaagaagcacctagagtacgaattacgaagcatatccggagatccaggatccgcaagatttaggtatgcatttttttcgtcagaagctttatcagttcaaaaaaaaaaaaactagtactagctccttttagagtatcttcaccttccttggcgtaaaagaaaatctgtctcgtctcctccgctccttgcgccatctcgcggctgaacaggggaggggcgccgatttctccatctggcgagcagagcagggggaggggaggggatcctggtgagcatccacatcctcttcctgattcatctctctcccgccgcgactacttttgtctggaatttgctttcgttcgttaaccctagcttctcttcagagccttaacctttgtttgttcccccaaaagtttgggggttcaactgaaccccccatgtcccaagttggatccggcccctggaggaaggtggatgttagattgtagggtttcttacctccttttgtcgaactagatgcattgttgtttgctgtagaatggacccatgagatcagtgtggaagagtggccagtcctcgttctagataaatccggcaaccgaaagcgcgcatcacatatttggagtcatcttttctactagggt

SEQ ID NO: 16375 - DNA, 929 bp, Oryza sativa
tgcaaaaatactcttattagccaaagtactccgctctcaagtttatgcgccaaagcacaattcactatcttgaaatatccattctatgttcatctatggctatatatttcaaatgtctacattatctccaccatctttcatagctcagacgatagtaattcatattttgtacttagtacacaagttctaaaatccaaaggccttttatctagctaggatttatttccttgcacctattgtctgaaagttttcttactttactgtaaccttcaatttacttcctcctgcagagagaagatcaagcttatcagcaccagttcatattgcacgctgcattagatgttgttcaggaccttgcatgggctacaaacacaatgtgagtagccgttgatctgtcactattctgtttgctgcaaccaaagatatcgtcttgtttctcctgtaactcttgtttctcctggcttcacacaacacgttcatgatattctgcattccttttcaggtttctgaagtcagtagacagatttgatgatcttgtggtgtctgtttatgtaactgctggtcatatccttttaaaattaagatatggacatagtgaatcaatactgggaatagaagaatatagaaatctgagaacttggataatgataattctaccagcactattttaataagaatcctgccaggaaatgattaaatgtgtgccgcaacagggatttttttgtttctcacgcctgtttttattccctatgatgatcataaccattagccatgctatctttctagccattcctccatcatctaagtattgttttttttttggtggggaagtattgttatttcttaacttccagtctgatacatactagatttatgttacttcatgactcaaggagcgaggatggaataaaaagtttcttccaggaggt

SEQ ID NO: 16376 - DNA, 2426 bp, Oryza sativa
gttccatcggcattgctgctgccgctgccgctgctattgctgtgttacggatttggaaacatccattgctcaccagttcataggagcagcatcgatctccactcgctgctcgacttcaagcagggcatctctagtgatccaaatgaagccttgaagtcctggaacaccagcacccactactgtaagtggacgggcgtcatgtgcacccaaacgcgaccatggcgcgtctagggcttaacctcactggtctaagcttgggtggccaaattagctcctctctcggaaacctgaccttccttaattatctggacctctcctataataatttctttggcccgttgcctcttcttaaccggctccaacaactgaaaaaccttatcctaggaagcaacagtttgcacggggctattccagtctcacttacaaattcttccagcttgtcatacctggacctctccacaaaccttctagttggtgcgattcctgcgaacataagcttactttcgaacctagagtatttggatcttgatcagaacaatctcaccgggaccgtcctgcaaaccataggagacattacgtcattagaaatactttatctttttcaaaatcaactaagtggaagcattcccgataagatttggcaattgccgaatcttatgcaattggtgctcggtgaaaataatttgtcaggtggaataccacaaaccctccataatatatcttctctacaaagattaggtttggagtacaatatgctaagcaaagcattgccacctaacattggtgatgccctctccaatctcgaagtacttgggtaacaatatgtttgaaggtcaaattccagcttctttaggtaatgcttcagggctacaaataataatgttcttaaacaatgcattcgttgggaaaattcctcctttgggaaagctttccaacctaaatttcttagacctagggagtaacaggcttgaagcaagtgacagtgatagctgggaattcttacatgcactagggaactgtagttatctacaagatttctcactatcacaaaatcagctagaaggacatataccagattcaattggcaacctatcatccaatcttcagagtctcgtatttagtgcaaacaaactatctggcatagttcctctgagtatagggaaccttcaaaacttaacctggctagggctagatttcaacaatctgactggtccaattgacgagtggattgggaagctaacacaactcgtacatttaaatcttggtgagaacgactttattgggccaatccctccatctattggcaatctcaaccaattagcaacactctttctaggagcaaatggattcacgggttacataccgcctagcttgggaaaccttcagtacctagtcaaattggatgttagtttcaataatctccatggtagcatatatacataaggagttattcatcagtgtagcaacaatgatagtatgtgcattgacccataacgatttagatggtaatcttcgacaactctcagagctacacctttcatctaacggggcatattcccgacagtttgggggcaatttcagagatagaaacaattcgcacggaccataactttctcacaggtaaaattccgatatcgttgagcaacatgaagagcttgagcattctcaacctttcccacaacaatttgtcgggtaccatccatatggccatagataatctacaagttctcacccatttctcacccagttagacctatcggacaacaacctcaaaggagaagtaccaactaatggggtattaaaaaattctacggcaataccactcaacggcaattgtacctctgtggaggattgccagatctgcatatgcccccttgctatactgatttccagagaaaacaaatacaataccacttggtcagagtattgatcccagtatttggcatcatatcagttttattgttgtttcactttttactcatagagaggaagatttcaagtggaaaatatttattgcggctctcttttggcaaacatttatctaaagtttatgttgatggaaaatctgacgcaacacatgaaggtctgagagatctgcttaattctaatgctggtcctaaaatcaggtccagaacgtgccagttagtgtgatcctacgactaacaagatagataaattaaatcacaaggccgatcggccaaggggccgatgtgaaatcgtgcgtccagctaatgctgatggaattcggatcaatggctatgtagctgatgggactttagatatgtaatataaaacaaactataatatcatcggctgagactaaataaaatataattgttaataatcctttctttaataaagacaatcttgatagatcgtgctaaaccgagataatataagattgaaactaataatgatagacttaa

SEQ ID NO: 16377 - DNA, 4444 bp, Oryza sativa
ggtcgaaagaaccctcccctccccccatgctgactccgccactgcgtagacacagcaagatcacaacatcgtgatttccccgacacgttttcaagttaaagtgcgcatcctgacccatcaaccatgggtcacctaggtcacagtcacattagatctgttccaccacaggtccaaccggagttataactttagattctaggcctatacaacccaaaagactagtctgatggatgagcatcattcctatcttttaagtcgtgtttctctatcgtcaattatcgatgtgggattacacccaacaccgtcgacggcgaaggccacgtcgtcgcggaagcgagacggcagaccgcccggcgggtggccgcgcctgcagcagcatatgcagcgttcggggatgcctggatggctgggtttgagttgggctagtcacctagtttcaccgtgggcccaattcggttgggatcccatcccacggcggaagcccaagtcgagccgagccgcatgggcggcgccgctgcccaccaccgcaccaggccaccaccacaacacctcggtggctcggtgcgcacgcactcgcgcttgcggccacgcgcgatgcgacgcgacccgactttttcccccctgcgcgtacgcgtgatggcgcgtgaggacggagaagatgagacgggaggaggaggaggaagagaaggggcccatccattccatcgcccgacgcggcccgctgcggagaagaggaggtatcgaagccatagctctctcccgtctcctctcctctcctctcctcccctcctccgccgatggggaggattccttccattccatccgcgcatccgctgcctccgcggaatccgagttccgcgtactgcgctgatctccggcatcggatttcggagagggtggggtgttctctccgctcggggttgttccactcggttctgaactgggagtgtgagtgtgcagggcaaggttgttgggatttcacgtcgggtagagactaccgcgactgtcctagttatgtcagtgccgttgtatttttatacaaagcggtagatctggtggaaggatatgaactgttgcagataattgttgattctgatttgtactggtgtgacatgtgcccccatgtgttcaacttgtgtagtacatgttttctgatgcttggattgtttattcagtctggaattctacttatgtttttctgatttgtacttgctgagtatctgtgcttctagaattacctcccatacaaaaattaaatttggagctctggtttattttggtactagtagcttgttgatggacctcttatttatatctaaactaattgaccgcatcttgtattgaactagtagtttctgatgcttcagatcggattgtactctacatgataagaaagtatggcaccagcaaacaaagcagagagaaaagcagtgctggatgctggagcatggatgttcaacgttgtgacatcagttggtatcatcatggtcaacaaggcattaatggccacacatggttttagttttggtaagacatgctataattcctcactcgtggttgaattgtcaagaatgccttgtccgcacgtcttatggatagttggactaaaccgaactatcgttgtgcagcaaaccagtcagattttttgtgctaatgatgtgttccattgtgtgtttgtgcagctacaacattgactggattgcattttgcaaccacaaccttgatgacattagtaatgaaatggttgggacatattcagccatcctatttaccattgccagaactcgttaaattcgtcttttttgcaaacttatcaattgttgggatgaatgttagtttgatgtggaactctgttggattctatcaggtgggaagagtaattttaaatccttctatattcaatgttagaatggagggcacatactaattttcgtttcatgcctcttcagattgccaagttgtgtattattccagtcttgtgcattctggaaatcctgtttgacaaagtccgttactcaaggaatacaaaactcagtatagtgcttgttttagtaggagttgctgtatgtactgtgactgatgttagtgtgaattcaaaagggctgctagcagctgtaattgcagtttggagcacagcactacagcagcatgtgagtatttgattgtgcacattttgacgtattccatgccctagtgataactgctctgtttggctcctttttaaataccttggcttctgaatgagcagtttcagttcaaattacgtcgcatatggtacattacatttacatattttccaaactgttcgtgtgaattcagtctgatttatctcattctgtaatctggatttctgtcgatatttgcttgcttctaactgctgtactgattactcatgttcaaaggaaatgttcaatagtaacttgtatctaaaagagttgcaaatatttagtcttactcatttatctgctaacagaaattttgtccctcgctgctgttttcacttttaatggtgaggttttggataattagcacttgttttattccagttatttttctttcatgctgcagtacgttcatcaccttcaaaagaagtactcgcttggctcattcaacctattgggtcatactgctccagctcaggcagcatccctgttaatactggggccttttgtggacttctggctgaccaatagaagagttgatactttcaattacacaacaatagttacggtatgtgattcttgttttgaatcagttctctgcttattctcttgtgaacttgttgcattacagtcccatttggctctatgcagctatttcggcattataaactgtacatagctgtagatgaatccgttttgagttagatactgatgaccatgaagagtttaccatatcctgtaaccaccagatttatctcctggatttggtccatgaattacgatttaggctggaaaggaatattttaagttctgttttgatataagtttacagcagctttaaagatattttttttgaacattgtattatccaagtgttattagatattagagtactggcagtgattcttttcaatcccttttgtgcatgttcattacctctctataatggatcaaccacctaactgctagtagttagtaagctaccttgcacattacagttgaaacttgaaatgtgtttttacagtatggtccctccttcaaatagtacagaagtatatgaatagttctttgttgcacaatagcaattttgcttcttatatatacttcatggagattaagagatacctagttgcctacactgtttcttctatctatgaataaaattttatggaatgagcatgacatgtatggttttttatcatagcagtgcagacctgatgttcccttgacttttacatattccttacatgagcaaactgggactaatgctttcttcttcactcacttaatttccagttcttcattgtattgtcgtgcacaattgctgttgggaccaatctaagccagttcatatgcattggaagattcacagctgtctcatttcaagttctaggccatatgaagacgattcttgtattgaccttgggttttcttttctttggaaaagagggccttaattttcacgtagtccttggcatgatgcttgctgtgattggcatgatttggtacgggaatgcttcgtcaaaaccgggaggcaaagagaggcagatttactcggtgcccagcgagaaaactcagaagtcatcacaatcagagcttgaccagaaggtctgaaacaaagttgtttcactatttttacagctccattgcttagcgagcattgagaagaccacgatctgatttattctttttttttctggtaagtttaaagatgtttctgtacaactgaaattcataccagacaaacagaatatggcaggaactaagcgcgacgataatttaatttgtaatattccattgagtaactgcatatatgatggaaagatattttcagctgtgatgttccgtttactaactgcgtacataaaatcgattggtcttcactttgatattagctattccagcttagcctggcagtatcaatgtatcatgttatggcacgtggagtcggtggagaagtggctgagcaacactggtccttttcatgtataccggctccagtaagcccattccacctcataacctcgtactcatagccttatgctgctatggactgcatccaagtaattgcagacatcaaacctcataccacgttattaacaggtcaatatgtcaacaacacaacacagcaacattgaagaggtttaagagaatttcaagggcgcctccaaggataaaaataaaaaaagaaaattccagggctataaaactgaactcacagtcttcaaaatggtcatcctattcaaaatcaaacaaaacacaacctaaacaatatatcaagt

SEQ ID NO: 16378 - DNA, 1142 bp, Oryza sativa
agtactactattttatgcgccatagggcaacatatagaatatctaatcttcagttctacgagacgtacgaagatttcaagaaaaaaggactaaattagtacgggtcgatgacttagatcttggggatataacactatgactagtcattgattagttttaaggatcttcattaggagagcgattaagtttagatgagacaggtctaagatcagtgtagcagcttactgaaggtgcctaagtagaggtccttgtttcctgcaaccctccctatccttgcttgccatctcccatgctgatggtgcctgctcaaaaattatatgttaatctatattacaacattggaacaccaaaatatcactacaaaatttaagcatatacagttaacatgagccgtgtacatatatgttgacatagcttagagattagtagttcataatacatataaataaggacaacaagcacatctagtacattgcgtgcttttttgtatactactagctaggaagaaaacataaatcaattaattacctggttacaccacgatatttcgatgcaccacgagaaaatccactgctattcctgcatatttaattaatgaaatcatatctcagtgtgatagtctgatattctgggagtgataattccatatggtgaaacatcagttaccttcttaggtatgcaatatactcctgcctggtcatatgtttcatttcatctagctctttttcatagttacttatctgcagtgaaattttataataaaaaagggaaaatgcaatcaacaagtgcacaatttaatttttatatactgtattataagtggtgtgtagaaaactatgatctattaacaagctagctagaaaactaaaacgacaaacttatatgtttaatttcttactgggaaatttgttgttgttgttgtgccccaatacttcagagctgccaaatcataagctctcgctgctttatcctccttgtcatagccacctgagtagtcgtgatacaagtataatgattgtgcagtcactaatatagttatatacaatgaaaaaaaaactgaaggcgtttgcatgcataccaagataaactgcgcattgcggagcataacggtgtcattccggatagagtcattaggcgatggg

SEQ ID NO: 16379 - DNA, 4549 bp, Oryza sativa
caagagcaggtaatttactaaagctcatatgcatgctattaagattcaaaatcacgtctgaaaaaaaaatataaacattggttgacatccttgcatgttcgatctaagcgcatatgtgtgcaatagaacattagtgagaaaaattaataagcaaaagtattagcatgtttttgatcttttttcaattggttagaatatgggcaataccagaattagtaatatcgtatctatcaacaattaccaatactagtgtggctcctatttcttgtgaacaaaattatttacttcccaatcgtatatttagcttgttaacgaagttagtctaactccatactaattccgtatcatcaacatctaatttcattgtcctccttttcttagatcaatgaactttctacatatatagcctatacccaattacctttccaaaggatcacataaactatatactaactcaaagttgcatatatagccactgtctcgatcgagcgattgcattattatttatctaaattcgattgcagttagctagctatctagtatagaaccatagatctgatgatagtttatgttctcgatagatcgatcgcgcctcgactcaaaaaggagatcattaattttctaactaacggtgccttccatttgaaaggaatcagcaatccatcatcgatcagtatgtaggcatgtagctagccatagtagcatagacaaaccaatattgttctaaccttgttacacctcgatatatcgaggtcctttgcccgaacgtgtcgatggacttcctcggcacggcctctatcgcgccaccgcccggcgaatccatggcgccgctggcccgcttgttctccgacgatgtgctctcggccgctccgccgctggcgttcccgccgccggcgacgacgataggcagtgcgagtgcgagcccgtgctcatcgagagcgccaggctctgcgagctcgtcccgccggccgccgccgagaccgcgccgccgttgttactcctccccatcgcgtcggaggagcacccgaagctgctcgcgctcgcgtcggtgctcatctccgccgcctcgtgcgcctgctgctgcgcggcggcggccgcggccgccggctgctgctgctgcggctggtggccggcgggcacctggccgttgttccggagccaggtcttgatcatggagagctccatagtgttgctcccgctgttgctgttggtgctgctggccatcgggacgccggagaagaggaagccccccgccgcgtgatgatcttgctcggagacgaacgagttgccgccgaggaagtcctccagcttcggctcggtctcctccaccgccgccgccctcttgccgccgctggagccgacgagcatcgacagctccgaggcgccgccgttgtagtccagccccctcatgttccaatctgcgttaacatcaaatatcaagatcaaacacccatcactccatgtactactagaaaacgagagacacacgcgtgcatgcataccttgtgcctcttgagctcccctattgaaggcctccatgatgccatacgaggcgttgtgatgatgccccgccacgccgaggtgcgcgtcggccgccgtcggctgcgacgtcggcaggccatagaagtcgccggcgccggagacgtcgatggctgccggaggcgagctatcctggtgaggctgcggattctcttggccggagagcgagaagcccagccagttgtttgcagaagccatctcagggggagaagaagctgatagaacagtgggattggttttcttgctgatgatcagagcagcagtgaaaacattggtgaggatgagaggagggatgtactaagttggaagctgatacgggggaggtatagcttttccaggggatgcactacattttgggtcaatgtgaagatggcaggagagagaggccaagaaaaaaaatatcctggccacctgagaggaggggaaatgttctaggaggcctgtatttataagttaagaacagagtatagcagaagactagtcttaggctctgttcgtttcctggagttcccaactcccccatctcattttccgcgcgcacgcttttcaaactgctaaacggtgtgttttttgcaaaaagtttatatacgaaagttgcttaaaaaaattatattgatccatttttgaaaaaaaaattagcaaataattaattaatcacgtgctaatggactgcttcgttttccgtaccggagggatgggttcccaactcaaccaaaagaacagagccttagacgttgtgctggtagctagcaagtagttatgtttcttttgtttcgtcaggattctgaagctgaagggggcaaaaaaatattagaaatgttcacatttgagaacggatggagctagcagttgtttaccgtcagttaatacatatggagagcaatttaactcctaccaaatcaagaaaagttcaggcattcataaaccatacgggatatgacaattgttttgttgaattattgtcatatagtactatatagcatggatcaagttctccttttaattagtatgaatctgaacccaaacaaaagacgacatgcatgacatgtagatcgaggagctcgatcaatccaaatatatataccaatgcaagcagtggcgggaaagagctagctagccgaataaataagcttaacaagaacgagatcgatcagggacgacatatccttggatcttaatcaatctatcttagaccttactcgatcagagcttggatccgatagcgcgcaagcaagcaagttaagatcgccacactactatgtatgtatatacgacgtatgtacgtgcacgcgcacgcgtggatggattcacgctcgggtcctagcgcgcgcggacggttcgtcccgtccaacggcgacgaatccagcgaaagattcccgctcgcgccggagaaaagaagaaaaaaataaccgagagcatagagagagagacgaaacgctcgctgcctcaacaacgccggtcaaaccgccgcgcacgcacacctgtgcagaaaaaaaatcagtccaacccgcctctctcttctctgacatgtcgtgccgccggacgcgcgcgcgcgcgcgtgcgcatcgtcgttcgtctcgcgcccatggcccatctctctcgttctctctccactgcttccgagttccaaccagccattgcagcgcggcgggcaccaccgataatagggcacaaggctagccaagggcgcgcgcctaggcctgcccgctgatctataattatggtgctttcgaggtgaatcgctggattggactggtatgacgaccctgcatgcccagccgcctgattgactgtgtttttgcagcgtccatcgacttctggttttagcaattgcatgcatgcatgcaaaccggccgcccaccttaccttccgctccgatccggcggtgtgtgtgaacatgatcttggaagatgagatgatgggatcacatttggtagttggaatgctaaagtattggagtgtttgaactcgatccacacaagaagggaaatagaaggtcgtgaattcacaatttaattatcttcttttttcccttcacaaatatggagttgattttttttaagatatggtataattttttgaatcttaatgcaccgagatgttagaaaaaaaatgaggatttttggtaaaatatctgtgttgcatttttaactgtgcaggtgaaccagtgatgacatcccctaagagtttagaacatatcaccatgcataaataagtggcttaaattagcatattactcccttcatctacttttgatagtcatatttccaaatctgaaaaatttatttttgataggcatattttaatccaacaacctatcatcttaatgactttctcgtatttaatacgtgactctccattcttccatacaagattggctacatggacatcgagaaatgtaaatattaatgaatcgcttgtttacgaggaataactagtactccctccatctacttttgatagtcatattttcatatctgaaaaatttatttttgataggcatatttcaattcaacaatctatcatcttaataactttctcgtatttaatgcatgactcttcattcttccacacaagattggctacatgagcatcgagaaatgtaaatattaatgaatcgcttatttacgaggaatgactagtatcatgtttaaattgatgatgagtagaattacttatccttggtctgtgcgtcaagatgaaatatgactatcaaaagtagatgaagggagtagcatgtttaaatggatgataataagtagaattacttatccttggtctgtatgtcaagatgaaatatgactatcaaaagtagatggagggagtagcatgtttaaatggatgataataagtagaattacttatccttggtctgtgtgccaagatgaaatatgactatcaaaagtagatggagggagtacaaattaacagaccataagccattaatacaactattaatacctatttaaaatttccagtcacctaaaatctggacactcccttttctata

SEQ ID NO: 16380 - DNA, 5331 bp, Oryza sativa
ttcccatggccctgaagggacaggcgcggggttggctaatgaacctgccacctgcgtcggtccactcttgggaggatttatgccaacagttcactatgaactttcaaggcacttatccgcgcccaggcgaagaagcggacttgcacgcggtacagcgaggggatgatgagtcacttcgctcgtacattcagcggttttgccaagtccgcaataccataccatgcatccctgcacacgcggtgatctacgcgttcagggggggtgtgcggcacaaccgcatgctcgaaaagatcgcttccaaagagccccagactactgcggagctttttcagctcgcagaccgagtggctcgtaaggaggaagcatggacctggaacccctccgattccggtgtggcagcttcggccgcccccggatctgctgctcaaacaaggcggcgagacaggaggaggaagaagaggtcggcctattccgacgatgagggtcatgtccacgtcgtcgagggcgtttcgctggccacccgaaaggggaggcctgcgagcgacaaaaagaaggaagccgacgctccctgacctcggctacttggaagagcgaaggcggcgcgcggcccttcgagccgcgcgctaccagcagagcctgcggcgctaccatcagcgccacgtccgggcccgatcactctacgtcgacgacctcgtcctacgccgcgtccaaacgcgtgctggattgagcaagctctcaccaatgtgggagggtccgtatcgagtgatcggcgtcccccggccgggctccgttcggctggccacgggtgacggcacagagctgcctaacccgtggaacatcgaacaccctcgtcgcttctacccctagtgggggtcgggtgtcaggtcttgggctcgggccaaccccgcgccccccccccccggggcgtgcagggttggccgggggcttatcttttttctcttccgtatttcaataaaagcattttcgatttcctaaggactgtgtctgtgccattgtttccttttgaagaatcttggcttgaattagcacgctcgtgctcgatcctgtcctcgggggctcgggtcggctaaaatcgccaaacggggcccagaaccgagccgtgccccgggacgtggtgaactccgggggggaatcggcaaaaacccacaatcgggtcacccataaccctcggtcaccacgttcccggcctggccagcctcgacatgtggatctccccaggcactagccccgacccgagccatttgaggactaggacctgggcacgagcccttgttcaagccaagacacagaaggaccgaggcatagaccatcctcgtctcatacacacaacaaatagaattgacatagaaatttcctctttatttggttgcagattaaattagtctatacaagaagggggcccgaaggcctcggaagaagaaagaaaaagttattcaagattggcgggggcctgggggctcactctgacgcgcccgggtcaccagccttgtcgtcgctgtcgtccgcaccaccgtcaccgccctcctcgtcggagtcgagggcgaacgcgagccgaggggccgtaccctcgaagctgtggacgatgtggtcggcggcgtcccggacctgcgcgcgtgcgccgtcctcggttccggaagggaactcttccagcgctgcccacggggagaagtcagggtccgagaggcccccaagccgaacggcggcccaaggcccccgacggccggagttggccctccacttgcttgtccgacggtgtcaggatagcctcggggccactgcgggaaggccgcgcctgtcgccctccgaccccgaggtcgtcggcgcagaagccgagggcgccccgcgctgcctctcggaggaagagcgccctggagatgcggcccctagcgaagaggatcggccccgccgaaaggtgcagcggcccgtctactttgttagcgaggccctccgggacgccaaaacccgataccctcaggcccagaagatgctatacgctattctgatggctccgagaaaagcaccatcaccatatctccaggcgaagcaaatcggctcgcccagattcgtgcgctgttcaggtaatgtggcagtcttgaagagaccgcccattattgacagccaagttaccattaccgatgtgcatggtttgagaccgttgggtttttgcccaaccatggagaccggtcccacctgtcaccaggctttaggagtggcgtcatgcccgaccgcttcccttgagaagggcgatcgccctggcataacgccgggggctactgtcggtgacatgggaccgggagtatcatgactagaggcttgaggcagacacaatcgcccacgtggcctggcaccctcgggggacgtcgggcccgagggtgatgtgtgcacccacctcttggtctccccgaggggggggtcggtcggaccactcctgcctcgcccccgagggccgaggcgccccgacccctcgcgggttctactccgcgtgtatgggttaggtgagcacagcggggtctcacctaatcgcatttattgcgcctcggctaaacgtgtcacgccgcatgaaatacagtgcagtgcactcgattatccggtctgtgaccagtcacagaccggtcaaatcacgggttaggtggcgacaggcggtctgacgcacgcttcgccccatcccgtcaagacgagagcttctaggcactcgtccccagctggagctagcgtgttacatcccagagatggcacgttagccccgatcgatatatgccaggcttcatcctaaccattacaggcaagatgttgtgtgaagaagggcaaacatgcacgttgctaggctgacgcgtggtggacaagaatgaccgatttgtgaccggtctgacactgctcatgtcgtcagcgcacagccacgttcccacgacgcgcctgcccccggcagaagtggaggtaggtatgtgccgtcccatcagaaggacgttcggagggcaaccgtgcaaatctccgtccatttatgaagggaagaaaagtccagtttgaaaaggaggggtgcatgtggtatccccttgaagtataaaaggaggaccttgcccatggggaaagaggatgatcttttccagattcggaacctagaacaagtgagaggttggctcacacttggcccacttagataggagaggacttttggacacaaggccttctccagatccgatcccagagcgattgggggctggttgacactttgttacttgttcatacacaaatccaccaaaacacaggagtagggtattacgcttcccagcggcccgaacctgtatacatcgcccgtgtctcgcgtttcttcctagctggcgatctttccacataccgagagagcttgagatttcaccctaagcccccggccgaaccggcaaaggggggcctgtgcggtctcccggtgaggagccacgagctccgtcaagttggctatactattaaacttgctctaacttgtgtatttgtatgccccttggattgcgtgatgtgacacttcaacatatgtgcaatgagtgtttgtaagctactattgtgttttcgtctatgtatctttaaggcatttggtaagttaggcataatatgcaattaatttacatatatgtaggttaaaatacttttttgtttttattaaatattacgataacaaaagaagggagtggaacaaaaaccttcaactcctttcaacaaattgaaagagaaaatcaccatatatctctcataagttttttttatctagatggccacccataatagaaaaagagcccccctgaagggagtggagatggttcttctgccattattgcatggagcgatgtcgctctaagcaaaggtgaattgctaaaaattgtcacaatattttaggtatttttttcaaatataaatatactgcattgtactataactgtattacacagctactacattataactatagtgtaattacattataaattttataaaacttatatgtacaggttatatgaaactaagttataatatatacatttattgtatagttagattgtaattatactacaattaaactacagttatatttgatagttttcaaaaaaaatgaggtgatttattttagatattaaattcttaagcgaataggtgaaaacgtaaaacttcaaggctaatgcaaaagcatcaatgtttcttatagaactctttaaagaaatctatccaatatgcacgtacaggtacatttgaaaacctacttgctatattctgaaaatgcaagactagaacagaaagtgtcaatctggtgtgaatctcactctgagcatattatattcactccactgtttatctttcttgatcattccttggtactataatcaaatgatccaaacccactgtcttccccgcatcactcgggcctctcctctctctctctctctctctcttctctctctccgtatcgagaaacgcccagctaaccccaaagagcgagaaaggttaaccctaaagaaaggtcacggtgaccccgaataaagtaggggagctggggttgcaagctgtgccctctacaaggacacacacccttgtcttccgggcatgcacacacacaccagctggggacggaggaatgaacagtgcctacacgcacgcagcatatgcagagagagagagagagagagagagagagagagagagagagctaggagaggagtgccatgaacgtttctacggaacatgcctgcctgatcagccccagcttcccgtcctctcctcgatccctcatatcacgccccggccggggagctagccgtgcatgtgcagagctccaggaccatgcatatacatgattacagggagaatgttaataatgctatctcgcttgcaactagctatagttagctaatggctaggctggtcattgggatataagtagctacaacaggtgacctcgatcatcataccatctgccaacaacttgctcctctatgagtctatctccgcaggtatagaactacaaattgcatgcttgccgtcatatccaaacccatcatgtgtgtgtgtgtgtattggcaggacttaccaacagtactctgcgcaagctttgtttgtcagccacgctattttcacattcctcgttggttaccaattacgctgggtagctctacacgtacgcagaagaggaataaccatatgcagcaggtctctctacctaccaacttgcgaatctagcattgatcaatgtaaatacacagggctagcttccgtgattctgccctgcagagagaggaaaatgtcggttgctgggcacagcatgcagattgt

SEQ ID NO: 16381 - DNA, 2574 bp, Oryza sativa
gtataaaagtagagtcaggtatgagctctacgctatttagaggctagcatcatactccctccgtttcgaaatatttgacgccgttgactttttagcacaggtttgaccgttcgtctttgtcgacgtttgatgttgcaatcctggtatttcatagtatggggatcgttggtgctaggatatatgcgagacggagacgaggatttttatatagattcgggcccctgaattgtcaggtaataaccctacatcctgttggccggagccggtcgttgctcttattcaccataatcacacaagtacaatatttgggatagcctatctaactgttatcgacatgacggtttgaaggtctgactcgtagtcgacaacatggtagccttcctcctcgaatctgtgcccggcgagatcagagatagcgcttttgtctctcctgacagtatccggagacaccgtagggtactagccgtgcttatccctgaagtcgatatccggcggcgtgtcttggcgtatgtaggcttctatgtcgattgtgttaggtgttgatcctccatggtgggtgttgattctctcgtgtcctctctcctccaaagggggcttggggcttgtatttatacccataggtgtccccttgtccaagtagaactagggaaaccaatatggatacaatccgagtagtcattgtcatttccatgtagaactctggttgtctttccttatccggaactccctcgaggtcagtttccatataagatatggtatgtggtggatcctgccgagatttagtcaagtactattaggtatgtggtatccataaccctgatagtcttattcaaaaaatttaagtaattattaattctttttctatcatttgattcattgttaaatatattttgatgtaggcatataattttacatatttcacaaaagtttttgaataagacgaacggtcaaacatgtgctaaaaagtcaacggtgtcaaacatttcgaaacggagggagtacaatagttggagacaatatggactctaatcattaatgtatcaaaatatttttttactattctttcctttctttcaccactatgtaacaaaatttgctttaataaatgctagagtcgactctaagccgttgtcgtgcataacaaccatatttcttttttctcctttctctttcttccatgtcatcaaatttacttatatgtcaatagagagagaccactaataaagaacattgtacatgccctaagaatagattttaccctgggtgacaaaagcagagcgcacaagcggggagggggaggtaccggaaaacataggcagcaggtttttctccttttgggctggtcctggcttgtgccaacgatctaaaggcacgggacgcgctttgcaaagcgatggatgtactgtaacggccaatgtccagagttgaaaaaggaaagcaaacgtaccaattccaatcgcaccacgcactaataaagcacatgagtcgtcaggggcgaagcaggatttgagattagaggggtgtgggggtaaagataaatcatgagatcgaataactaatattgatagcaaaagatgtcaaatagtcaccatcaataacaagtaatgcgtaaagtagtcctttaagaaaaacttgaattttagctatttaataatatcattggaagtatgaaactactctttattactaaattcttttaatgtaaactattgaataatctcacaaataatattgaataatctcacaaataagtatcatctattttactttgaaaaagacgagaaatcacaaactaattttgtagatcatatttcttgctaatatttttagacttgctaactaactaaactgataatactttcaagctacacaaaataaattagataaatacttatcttagttaaccttaatatagagtaaaaacatggggtgtaatggtggcagtgtttgcatagggggtgttggcaccctttggcacccccctagctgcgccactgtgagtcgtcttcctagtatagactgttttttttacaagagcacagtagaaacacgaacactcgtaacacgtgcatgttcactcttataaatacatacatgcacacccattcaaaagatgattttaacaacggaagtaattaaaaggctctcagcgtcgaccagcccagacttccggtgaggcggtgactacactctggctctgccccctgaaaacaccattttttttaaaataatcccaaacaccaaagttggtaccttgtgaatagggatggcaatttaacccgtttatccatgggtaaaaaccctaatagagttgggtttgttctacatttagtacctatgggttttttattgggtcaaaacctatacccaacgggcatacgggcacgggcatgggtagtcactacccatgcccgcttcgcccgtttacccgcgaaaatcaactgacatgtggtccctcagtcaaattagtataaatgccaccatctagtattgatgaacttgtaatgcttgtattgttgaacttggtacaactctaccctttctttaaattgtgataatgtctctctgcttgtg

SEQ ID NO: 16382 - DNA, 908 bp, Oryza sativa
gtcattcttgtcatgggatttgtttgacttttccgtttgctctttcaggaatgcacatggcttcattccttacaaattgcaagtgagcgctggacggatatcgacaagtctgcggtacattattaaggctaagctagctgctaagtattagaggggaggtgagagagagcgagagagagagagattggtgagtggggagtagttcttgtaggctgagtagtactagttttttcaggggcactgaaaaaagagcttgtagtttctgtcgggaacaccgattactagctgaaacatcatcagttctgttcttcttccattgttgattaaaatttccgtggtttcgatcttccgcgagaacacccagcagcagcggaacagatgagctgatagcttcttcgtcctcttcgctcgtgcatgtcacatctgcatgcctttgttctgctccatgtcagcttcagcgtcgtggtcggcgtcggcgtcggcgtcggcgtcgcaggcgacgtgctgccctgtcaacaagcatgtcgagttcgtcaggttgtcagtcacgcaggcaatcgaggcacgcaggccttgccggtcattgccggagcccggagacaccgacctgcctcgtacggtcgtactgtacactcgtactcgtgaccaggttgccggctcggcagacgacgctctctttctctctcagccaaggagtggtaggatatgctgctgccgctgactcttccggcatcgaaaccggacggggagccggaggacttgggagttggcagcgacgcacgccgctgccacggtaacatgcggtcatacggtgtggcgtcgctgcctcagtgctgcaggggcagcagctggacagatgtgaaagtggcatttgggagttggggaaatagcagcagagttggctggag

SEQ ID NO: 16383 - DNA, 611 bp, Oryza sativa
aggccattacatatgttctcaaggcagcatcacaatgcccgcatattgctcaagctgtatgtttaacatccaagaatatgttaccttcctaatttttaaaaaatatcttctcgcttttcttattagtgtgcctttcttgttctccataggctagagctgtccgatggagactaaaagatctgggtactgaagttcccctgtgtgtgcttgatttcttgtctaaaacagtgcatagctggtcagatgtagctgatgctttgttgaaggatattgattctgactgtgagcctgatagcagttgcctctctatgtcctgtagtactagtagtacagacgagttttcagctgaagggatgcattctttgcaaggtcaagctgtacatggaaaagatcatctatcagatgtttttatactgatagaaatgctgtcgatacccagattatttgttgaagtttctcaggttttgcagagggctttattgcgaggagcctttgggctgcaattagtagccatggtgttggaaagaaggcattctcacaggttaagtcttaagtctgggctgggactatggtgaatgattcacagaacaagcaagttctgttagacgggc

SEQ ID NO: 16384 - DNA, 2081 bp, Oryza sativa
cgcacccacgcatggcacattgtcacaatgtcacgtttaggcacagtcggagaagagtggacacacacacacaatagctagtgatgagagatataggcggtgagggtctctttataaacagagagctgtgagtacagcaagtttaggacctgtttagatcccgccaaaagttttacaccatatcagtagcggagccataaattactaaagagtagggcttaagtagtgagttatttatctttttctaaatttacatggtgatttaacataatttagccatgattttgaaggcaggcctagggtctaagccctagctgccctaggtctacctccacccctgcaccatatcacatcgaacgtttgatcacatgcatgaaatattaaatatagtctaaaaaataactaattgtacatattgcgactaatttgcgagagaaatcttttaagccaaattgcttcataatttgacaatgtggtgctacagtaaatatttgctaatgactgattaattaggcttaataaattcgtcttgcagtttactgataaattctgtaattagttttttttattagtgctcgaacaactcacgtgacaccctatataatatccaatgtgatacgccaaaactttacacccttggatctaaaccaccccttaatagtatagccagctactagctccaattcatatataaccaatccaatagcttattcatacaatagttcctatcatcatatactacaccattaatatttattcacatatcttagaagtctatgctatagtttcctatagaagtctatgctatagttggctataaatctgtaacctctatctcctcttctctcttcttatccgtatgtgtttagagctgacttgtagggtagtattgtactcgctcgtataggccgcgggctgctggtttccaaggataataaacgcacgacgaccccggcctccttttctttcctgctatatatatacctcctcaccccacaggccacacccgtccaccccccgtaacattaactcctttgttcagcttgacactccattgcagagggagggtatagctggtgacagagagaaatgggcgaggaggccaattgcaacgtcgcgatggagtccgctgcgcccaaggagaacggccacaccaccggtggcgccgcggcggaggccaaggccgccgccgcctgggctgagatcgccgtcaccgacgccgcggcggtgccaaagccgacgccgccgcctgcggccgtggccgtcgacccccggcttcagggcatctccgacgccatccgcgtcgtcccccacttccccaagcaaggtccgtctctcccctctcggttcgccagtttgccatatgtgcaaatacctagtggtatctgaatatctgcgcgcgcggcgtgcatgcaggcatcatgttcaacgacatcacgccgctgctgctgcgcccgggggtgttcaaggacgccgtcgacatcttcgtcgagcgctaccgcggcatggccatcgccgccgtcgccggtaaacactttttgatcagtactactctttattgtcatttgattattgtttctgtcgcgcggagccggagaggtgggcagtcaggggcggagaggcggtgttctgagattccgtaatatctttgcgcgagatctcccctggtcctctcctggtccttttgctcccccatgccttgtcgtcgcccgcacgcacatcgcctcccgctgcacttttccgcgtaactaccacccccggcgccgttgctttcctcgggagaataatactagtagtagacgctagtattatcataaccacttcggtgatcctctcacagcgacaggacacacacggcctcacggcacagtgctctggccggccggagccggcaggtaccggctgtgttatttccttgaagttctcaacctctatctcgtttttccgtacgcacgcttatatttttttataaaaagttagtttctatatgaaaattgtttaaaaaaatcaaattaatttatttaaaaaattttagctaatacttaattgatcatgtaacaatatatgcttcgttttgcgtg

SEQ ID NO: 16385 - DNA, 3069 bp, Oryza sativa
tggggggaacccaaggcccggaccatcggacggccccagcatcgcctgcgtgtgatcggacggtggggagggtgggggattcgtggtaggcctaaaattgattttttttattttatttttaccccactggaggggggtggctcactgatgtcatgcatgtgcccgatctgctgtcgttttcactggaaagtactgcttctgagattttgctttgttgtttgttggatactctgtctggctccctgcgattccttgttcctggtttgttttccttctgtttctcctcctccccccctgttttcgcttattattttaacatatatctcattccttgttcttgacttttaatactactatcagcttggcaggttgctagttaatgtttcattcctggttgtgactttggtttgtttgaccagggattgaggctagggggttcatatttggcccggcgatcgcgctggcaattggcgccaaattcataccgttgcgtaagcccaagaaactcccaggtgagtgaggctcgctctctctctgaaaaagtgttgtgcaaatctgtttgctggtgatataagatatgattagctcgcgctggcagcctagttaagtatgcttagttaccttacctgtttataaaagagctgctctgttccattactctgacaacaaagctgtgtcactagtccatccctttttatgctgcccatgatgtaatctgaagagatatgatgtactttctgtctttgcactttccatcacatgttctattagagtatcagatagacacatactgtcgagggtctcttttacacattttgtattggagtatcggataaacacatactgttgttgttttttacatacgctgttgtgttgtgcaccacctttcttgtaaagtatgattgtgtttgccttgcttatcaaatcattttttgcagtaaccgccatccctgacatctgcttttaatttttttctacaaacgtgaaaggcgagtgatttctgagacgtatgttctcgagtacgggaccgattgcttgcagatgcatgttggcgccattgaacctggtgagcgtgtgctgatcgttgatgatctggttgcaactggtgggacactttgtgctgctataaggcttcttggtacgcactacttcttaatctgaaatgcattttaaatgaaacccttgatccattgtgatactatatgcaactagtagtatctcaatagagcttggcaaaaatgctgacaacaatcttgcaatgactatttatttttctatgtggcttctgtgaaatgcagaggtcttttccccgttcgcacattcacaacacgctattcttctggcctgtaacagtgaagctctcgattgtgccttgtgatcccgtgacatgtttgcagcaagcactagtgcttggcagtttgccacaatatcaaattatccagtaccgtgtcttgaaactgtgcccacactccgaacatagtttcttcacactattaatccaaatctatagtactgcaggaatagtgtctgaaataaatcgagtagtcatgaaaagtaataaccaacgacaggcatccgtacctgctagtggtgaccggtggaggaccatgatatcttcgttgcttataggcatactgttgtccttaatgcgatgtgactctataatcaagacaatccttgtttgaagatttttgtttggagagaatcttggctgaagatatgtcctatggagtttgcttgaggacatgatttgattttgacactacatgtttcgagtactcctgtcgtagtgaatccagtaaccccacctcattttctttttcagagagataaccccaccgaattactccaggccagtatgatttgtcaaaacacaacacaggctacatcacaaaaattggtagcggcaattttctctttgttactaacaaacaaagcacaatgataccatactaaaagtttggtagtgtcaaattttcactcttgctggcctagccttggcagttggcactactaaaattttgtagggtcttttcaactgtatatatcgtgtttttttcatgttttaggccatcagcaattgcatttgacatgcttcctttcttttttgtatctaaccaacctgtgcttcaactattaaagaaaaagttgttcttttttttagctttagactgttcgggcacttcactggatgaattataatatctttgtcccaagaacgaataactggattttggcacgactatcttacctagaaatttgctttccagaacgcgctggagctgacgttgttgagtgcgcgtgtctcattgggctcccaaaatttaaggtattcttattgtcacattattcacggttatccatatattctttgacaaacatttccgacatctctctacttagttgtcactttatgtagtattttacatactgctctggagcatggatccacattccaaagatatgaacgcagttccatccaacagttttgcacctgtagtacagtattaactttctcagatgctttctactctacctgacgtagcctgttagtgccatatagattggactcttgagccaatggtttgggtttagatagcggccaggaacaactttgccatactaaatagcaccatgtctattctgctccccacattgagatactcatatcagtaccagctgggcatccatagatttgaacaagaccactcgagaattggtgggtaattgttttttcttccaaagcaggactatagtccttttttaaaaaaaaataaataaataaaagaagccctgtttgtgctatcctaagaacatattcaactgtggctcttctgctgcatttgaagcttactatttgcatcctgcccctcatctgaaagtttgctagggatgaaaaatattcaggtaggagtaaaaccacagcactgtctacactagtttcatctggtcatagtgattattttgtttgagttgacataccttgattcatgttacaacttgcaaaatgagtgctacactgccggcatcttaccgaagtcaggatagatatcatgctggttcagaact

SEQ ID NO: 16386 - DNA, 679 bp, Oryza sativa
ccaggctccagccctacatctttacaccccaaagaaaaagcaaaaagaatgaaaggggagaaaaaaaaaaagaagaacgaatcagaagctctgttctcaaaaaaaataaataaatcagaagctcactatataagacaaccttttccatccttttaatcttttgacctttttacatgtttacatctaggtaacaacatctagaagatacaaacatccatggaaaactgcagccgcgatgtcctaactcctaagcatattgtcagaatcagccattaactgctgctaattcctgtttgacaagtgagccacctgtccctctcatcattgcttatgtcagtctcgtaatgagatctcgaacaggtcggagtcggcgtccgggtcgccggccgacgcgccgccgccgccgccgttctccttcctgctcttgctcatccgcgacgccgtctccagccagccggagtcgacgcggcccatggagaagaggtcgccgctgtcgtcgaagtcgaggcccagcgaaccgccgctccggccgtcgtcccccgccgacgcggcgcggaggaagcacgggttcgccgtgcgccgcgcgttcgccggcgcgtaccggaacttgccctgcccgaggttgaccagcgccatcacgtcgaagctggaggcgaggaccgggtacatcggggtggag

SEQ ID NO: 16387 - DNA, 3665 bp, Oryza sativa
gcatcggcaccaagctcgagcttgccacccaagcgatatagcagcttcgacttcaatgaaacaataccttaatgccaaaatgaacaaatagatccgacatccacgaaggatattagcccaagctaccaaagaaccacttcttacacacagctagcaacaacaaccatataaagagattgtaatgtgttgtcgttgccaagttttgtcacattcctacagtgaagcggcttctactctactcaacagtaaccaaatgacaatgatggtcacccgccgtaaagcaagaaacgaaaccaacgcggcgaaggcctcgtcaaacaccctaggcctgtagagcttcggttccattgcatgagtccaccaatgaccacaattgcatgcgaaaggtttttggtgctaggaggggtcagcgccagaacaatgcctccaaggaggggaatgacgcctaatggcggtggcggcgtcatgccgtcccatggcctggcaaggcttcgctagcgattaccaatcaagaccccacacaaccatcctgcacaacggccattgttggactaccgcgccatcccttcagcgctcaagcccagtccaccaacccgcaactcaagctggctcgcagggctaccggatcagccaccgccatcccatgttgcacgagccagcgtctccccattttctcgaagctccctatgactaaaactaaagcagtcgagcatagaaggggaggagccctttagagaggaggactcttgcctggcaacagagaagatgaactttccaccacctaaccgcttccctgcttgataccaaaagccgttgaggtcaccactggcaactgacaaccaccgctggcgcttgggtaaccatgtgtgacccacgtcagcttcctcctcgtgcaaaccaccgccagccacgacctcacactgtgctagtcatgttgtcaggcatggccgcgtgtcgctccggctaaagcccctctggctcctcaatgcatgctaccggtcatcggagccctcttctgaacagtaccactggctttccctcttcgccgccccgtccgtggcagccgtacgtccccaaggccacgagctccagcctcttacctccagggggggagggggaaggccccgccgtcgtccttgcagccgcgtggttttctggctgcctgcttgggtggcagtgaggcgaagaagggaggaggtgctgggtggcggtgggggagggagacaccacccatgtcgcccaaccctagagcgacacgagggccccattcctggtcactccgcggtagcaataaagttgcagtggaaactgggcattaggacaataatagaaaattggcgtgccatttgacgcgccttattttagttagcccgtttgtgcaactgaagaaaattaaatattttttaacccctagtagataattataaatccattgtttttgtcaacattgtttagggcatgacagaaatttgagaacatgcaaaggcatgaatcagcttatagagcacacaaccatctgtgtaaattgcaaaagtcagtcattctattttgatttctataatgatttgtgattaaatttcgtttgtcttgtcatttgatttttttattattaattattctagtagcatttttgtaacgacaaatctttttggttgcttcaattatctaccacaccaatatttgataatgccaaagctcatagagcagaacatcgtctatctaatttataaaaaaaaatatttttttctatattgatttgtgatttaatttcttttgtatggtcatttgattttttcttttggtgagaagccttttttttaccataaaaattttctgttggttcaattaaatggtacaattttgagagaaacaaaagtcatgtgatgttttttctttgtgagtagccttttttttaccaataaatattttccgttggttcaattaactaccatattgtaatgctacaattttgagagaaacaaaagtcatgtgatgttttgtttgatgccaaacttttacagtgggatttgtgactgataatgtagcacagttgggaggccacttgaatctatataaggtgcttaaatcttcttttgctttattttttttagaaatggatccttggtttgatatccatctatatatttttcattttaaaatggtacttttcaatgtattgatacaacaaatctactactatatgttataaaatagagtatagatctttaacttagaacttgtatttctttgaaatgttgtagacccaaccatctgtttcagatatcagattaggccatcacctccctagtcaacgtgtatgacacggcccagctgccacgttggccggtgggaaccaaacctgtgaatccagattaaccagtcgagaatgggcctggcattatcaactcacaagagctttctagagattctggtaagtagatatcttatcgacacgtggcaaaattttggagttgttcagctaagttatcaggctgccacgtggcccaataacatgctagaattctgaccctaaaatcggtataaagatgagggtggcgatggcggatggcttggatggggagaaagcactagctctcattgttgcctcctactagggctcgagaaggcagagagttctgcgccacctctaccatgaccaggccacatgtcctcaatgccgtcaagtggcatcaccacttgccgaagaggcgataggaaggaagacgtgagaactgtggagccatgggcatttctaacatttaacattatctctcttctattcaatcaaaaatgaatattcaaatagatatacgttgtgagagcgttttccccaaagattgacttttgccatatctagaagttagaactataaattcaaaatgtcctaaacatttttttggaaatatatttgatgtttcgcataaaattaatttgtgcaaacttttgaaagttctaaaatatttagtttaaaaaacatgcatgtatatttgttttgaaaataatcttcacagtctcttagacttagattatataaacttattgtaagatgacttcacatatattattcacaggagagtatatcattactaaaatctagtaaagccacatttttttatgacaataatgttctacaaaaatatacattcattaattttatgtaactccctaattatcaaatatattactttgaaaatgtgtatagtgaaatcttgagggctcttttgaaacatatggttagaaaaaatggaggaatagaaggaacatataattttgacaggaatataagttaaatcagagaattataaaacacaaggaaaacataggatgcttgttgattacgtcacaggaaaatgtaggaatctaatgagagagattgaatcaaagaaaatcttttaagatattagagctcttactaactttctcttttctctaaaatctctataggattgttcattcgataggaatctgaaagaaaatgatagtatgtaattatttgtatcaaagttattcataattttttataggattttaatcctccaaattttatttattttttatacaaatcaaataggccctgatcaaagttactactccttagagcatcttcaacagtctctctaaatttgactctccaaatgtctatttaaccaactctccatttcatt

SEQ ID NO: 16388 - DNA, 635 bp, Oryza sativa
agtactaatagcagacagtttgttccccgtcaaattggggttgaaatgatcatccataccccatctcaggcccgtccctggggaatgcccagctgaattcaatggctcaagttactgcgaccgcgaatgctcgggtgctcggttttcctgccgccagccgccatggtggccctgtaggatcgcgtgctgggccggcgtttctgaatctgcgtgctcccgcacttcgtcatgacagtaaaaagcatcctttgagaggtactgattttcttgcatatgtgtaattttgcattggatgacaatataagctcgttactgcccatacactaacaagtggagaaaaactgaaaattgttatgcatacaggggtgaaatcctggatgatggtctttcaggaaaatgattgttctgagaagttttatttttattgggatacaagtttacaattaccatagttatagtgaacgcacacttgatgtttgtagacttgttactctatcttaaacggtgcatcaattgtgattaagttacttatcagcttcttttttctttttttaaggtgtatgaattcatatttataacatgttatttctttgtttcagttggtgctgcctcttcattattcacaaagtatgatc

SEQ ID NO: 16389 - DNA, 1289 bp, Oryza sativa
ttccccgacgcttttcaacatcacctggcttttttttctctactaacctaatactattgttctgaatatcattattcgccatgctcctctcattcacatcccctctgttcctctgagatcccttttgcctatcaaaagatgtactccttccatcacctgacctctcgtcccctcgccgaacaaccggtgcatcgccatcgcctgtaaacctcctcctcgagctccttccatccgattctgtgctctctaaactcttgctcctgtccaacttcaccgactccatgatcttcacatagtcggtgaagtcgggctaaacgtcagctccttctcgacgtgccgcaactcggacgaaccgggaccagcctcgccgccagccaccgcgcacatagcaccaaaaccatccgctctcgcgtcagaaacccggcctctcctcgccaaaccccaaccaaacggcgccacggagaccctcctcctcctcctcgtcggaaccacgaacccgtggcacgcgctcgaatcaggcgccgaggcggggagcaagaccccgcgccccgccaggttgggaatcagccccaccgtcgcgctcggcggcggcgccgccatcacacacacacacacaccacgaggtttcggccgcggcgtggctaccacattctccgccggcggagcaactccgagcgaggtaaaccccttcccaaccgcaagagaaacgcacggcgagtgctggtcggagcgccggcgaggctcgagctggtgggttgcggggaggaaggagcgcgagtacctggggagtttgcgccgcgaggcctccgcgttatctcctcctccgccggtgcccggtgccgtcgtggcgctccctccggtggagcccactttgtgtagtgtctagtgcagcgaatatatttccgcgtacgggccgggccgggccgacaatctatgcgttgttgggcctccaaagggtaactcaccaaggtgtggccgagccaagccgaagacaaatttgggcttaggctgctcgttcactgaagaagatttatctcgttattcatcagcgttctaaattactatatggtatgtttttacagaaaaagttatataagaaagttactttaaaagatcatacaaattcaattttctaagttaaaatcctcgcagacaaattatagttaaataattaatactaaattaatcacatactaatcgctcatctcattttacacatcttctcttttcccctccccttgaacactcttagtttggcaaaaattgacaggcagaatgtgcaggtgcac

SEQ ID NO: 16390 - DNA, 3532 bp, Oryza sativa
  unsure (1)..(3532): unsure at all n locations
ggtggtggagggggaggacgggcaggcggaggaccaggaggagaggtgggcgcggctgctgccggagctgatgtccgaggtggtgcggcgcgtggaggcgtccgggggcgagcgttggcccgcgcggaaggacgtggtctcctgcgcctgcgtgtgccggcggtggcgggacgctgccgtcgccgtcgtgcggccgcccgcggagtccggcaagatcaccttcccgtcctcgctcaagcaggtgaggaaaggggggggggggggtgatgcccttctgctgttttgctaagagctcctatccctcgattgatgggggcttctggccgctgattcgaagtatggtggtagggagtggaaacccccattacgtcgatttgttttagcaggtgtcgttcctagatgcgatttgttatgtctctggttggtgatttagagagtcctctatgcttttgattgctaaatttggagcctgcgtctttaggttccctcagttctggccataggatgctgagatcacttgctcatgctatttttagaggattatttaatttttgaggtttacaaatttaccttttttattcgcgatgtttcgtgggattagttaatttgtttatgtctagtcctagctatttgtttttggagtaagttaactttcaatcgattttgatactagtatttttttttataagagtttgtggatttaacttaaaactaggctcgggagcaactagatttagttagtacaatggatgatttatatcgcacttgttctttttatggctttggcaaaatcaccacatcgttggtagatagcagtatagcacactggaggcttggaaggaaaaacaaacccgaggagggtcgtccgctatgaatgaatagttggaaaatcttatcaccagcagtttgaattttcatgcttttggctacagatttgatgttaggaccatattccagcatgtatatagtctagctttacttagtcccgttctaagctccaacaacatccagatttttcctcgatttccgttagcacgcttttcaaactgctaaagattgtatttcatgcaaaanctttctatatagaagttgctataaaaaatcaaataaatccattttttaatttttaataattaaaacatcattaaccatgcgctaatgagtctcgttttacatgcgcacttaatcttcatccaataatcagattcgaacggggccatatgtgtttagctatttactatcctatcacacagagggtgatttcacttataagtgggagtttagtggctgaaattccccatgagatgagtagcatagttttgttttgggtgattcgtctacgtaggattttagttgcagtcttgcagaggagtgtcgtagttttgatacacagtatttgtatgcaaattaatcggagttcttacaccttttgtcaagcagccagggccaagggagttcccaatgcaatgtttcattaagcggaataagaagaactctacgttctacctctaccttggtttgacaaatggtaagtgtatgactgtacgtgatgtgatatgagaacttccttgactctcatttattttgtgctgcatatgtgcaggcatcaatttgattatgtgcatctagataatcaatttgatttgccatctcaatgtaaggcatgtgacatgctgttttatgattgctgtgcgggttctgtttttctaggaatttgttacttgtctgtggttgacacttgatgcctagcagtagtcaagttgaatgcttttagatttaactcagattcgttgtggctttaattggagatgcatcgcttgtttctcgtagttgatggcttgatgttgacctatcaacttttggcatgggcagtcccatgcacatttgcttcctggctttcattttttttctatagattcaaattatctgtcaaaccagcagaaatgcacagtatgtttgcattctaggaccatgtgatattttgcatttggatcttttggcataattggtatgggatggtgggaggataaggtggaggattggagcacctaatggattagaacctacagcattttacttgaattaggaactaatattgttttgtacctgcctattttttgtgtagcaactgataagaaattgataagagatgccccttcgggattatgtactatgttatgtcctcatgggccaatgggcctagaatatatgggcccgaatatacttaacactgtttatttatttggattggctagtttggacataattgttgaagggtttagctgaattataccaaagtcttcgtgtcctgcaaatagtgattagggtgactggaagtctacttgttccattacatttgatggcctgcttagtcaagtgttttcaaatttcttttattttgacaatcagatccaacagcactcaaattatgtatctagaagcaacatttttctctccttacaggcttacactcagctgttcaagtgtaacatctaacatgtgcggatatgtgttttttttaaaaaaaagaaaaagaaaaaggatgggggttctgtcagttacaccgtatatttttccttctggtttttgtaccaactgcaatgccatatggactttttcaccatcaaatgtgcttgatgattaatatatactttttgtatatgatagcaactgtggataaagggaagttcctcatggctgctagaaggtttagacgtggtccccataccgagtacatcgtatcccttgatgctgatgacctttcacaaggaagcaatgcatacatggggaaactgaggtgaggttctacatggctgcatgttcactcttaatcattcttgcatattctgttattcatcctgcttagtgctaacaaattggttgcagtaatatatttacaattagggaacatgctaatgcactaaaaatatgtatttagctgatctgcagatgttttttttttaaaaaaaattgggtacccataccataagacaatataagccttctgagttctaaatagtatctgtttctttactatcttgtttttcaatgaggtattggtctgttttatagttcaaatggtactccctcgttttttatatatgacgcttgttagttcaatattgaattaactaacgtcgtatatatataaaaaggagggagtatatccttatgttgtaagattgaaccccttaacatggtggcatgctgtgatgccccaaggtctgaactggttttaagtctataatctaaattctaaccccattttggatagagtacacactcacaccaacacacttgcactttcatcctttgtgttcgtgttcaagggtttggttgataccttggactttttctgttttgagggattgataccttggacctggtaagcctgcaaaagtaggccttgtttgggaaagacccggcccatcccctgggattttagccttgccaaacaaggccacaaggtgggactaattcacaccctcatgtgtggacttactcaaaccaccgtagggtgtcacacatgcct

SEQ ID NO: 16391 - DNA, 2645 bp, Oryza sativa
atcgagtcaaaaggcaattgcagacaagtttactttcaatattttcatggaggcctgtgctgaagcaaagaggtggaatgattttgagtatgcatttcgcaaaatgttatctagtggctaccactttgacgaacgaaggcaccttcgtatggtgcttgatgcatataggaacgggaaggtgcttatctcatattcctaactctttaactatccatgaatctccgtaagatgtagcttataaggatagaatattcattgtgcataatctttcatatctgaagttgaagatgtttggttcataacataggtcatgttattgcaatgaatggaggatgtttgattatgctgtttttcccccatatgtatgggatcataagattgcatggtgactgatcttagtagttctgaaatctatacatgtgggccttttagcttatatttctatgccctcagagagaacaaacctcactagatttaaaaggaaatttcaactacaagcacagcataatagtactagccccagtttggcaacaatttgagccaattccttcagtattttatggcttactgtcaatatgaactatgcttagagttcagattttatggacaatgatagaatgcaagatatatgatcattttcccattaaactgcttcgttaattatttggtgtagctattcttagccttactgcctttcactattcaggagcagttattggaagatgtatgggactacatgtgccaatatggccgagttccgcctgcccccatgataatggaaagattttgcctgaaactgagacaaggggacacagtggcggcgatgtcctgcatcaatacctttcaggagagcaagatacgcaatgtttcatccatgtcctggttcaatctgctgaaccgtaatggggatcgcttgaaggaggatattattatcaagctacttcatgaactcaacaaccttgtaagctcaagtggtcactctgattctttgtatcaaaatattataagtagctgtacagaattcctttctgtttccacctctgtagaaaaggcgtcttctgatcagcagatgcttccctgtacgtcatagctactatatattaatatgccattatctaaaagaaaatcagagtttggtcattggtcatttggttcgtgctccaaaaagtttgatcatcaaatccatcggtttgctcactgcatcatactattctacgaggataagtgatcgtatgcatgtagcttggtgggctagttatttgttgggattgcatatcggcagaagtaactaactctgaattggtcgtcatcctgagatgcatggcacttcgcctcgttttaaacatcacctactccgctactcactacccgtgtttctcatgttgatatcaattttctcatgtcagtatgtcagctgcttggttaggttctctttggttgttccgacaaaactttgatactttcagctggtataccaaagaacacatggagaagagctacaggtgtgaaaatttctgggtcaattacacacatagatgtcctcgcataatgaatttacgcatgcagccgattgggaactatcgagcctgacgagtagtccaacaccaggcacttgtttgctcgcacgttcggacaggtctgaatccatcctcttgtctggactctgaagcctccatcttgcgacagtcgcctgattggcgctaccaaccgcgcgagataaggttagctcaactttggagaagaaaacgttgcatctgatcgtcgtgtcagtctccatgagcagtgtctctgtacccctcttgttcttttgataaagaaagaaatttttgaagcttcgtggatatttctattttccgtcaggctagacatatgttaagattaactataagatttcggtaagaatttcaaataaaacactctaattttgttagatgtttgaaatttttcctggagaatatatacaggtgatcagacagcaggaggaggatggcgcgcacgacgaaggcggctgcgcgacgtgggcgcggcgacggcgtcgtctccccaacagaagaggaagttattattaagctggcaaagtggcaactgatgaataaaacagaaaagaaaaaaaaagaaaagaggaaaactaacagacggacagctaggcccgggcatcaaataaaatcgtcggaaaaaatcaccaggaataaaaaaattccccttcctttgcgcgtcccacctgtccccttcgtgggccccaccaccgcacgtctccaccttcccccacctcgccgccggccaccgcctccgcctccgcctccgccgccgccgcctccacatcccattccccgtgccctcttccccaacccccctcgcgccggggggcctctgcgtgaaggaagagggcgctgcgacgccgaccgcgcgccggtaatgagctacccatccaccaaatgcgatctgttcgttcgtctttagatgaatcgatcgaggcttagagccttagacccggttttgctggccacttcttcgttatggaagagagagtgttttatttttgtttatcgttttcgagtgcaagcatttggcgccgctaagaccccctgattgcaattggtcactaaacaaatgtcaatgtgaggaggaggagggtattaacccta

SEQ ID NO: 16392 - DNA, 539 bp, Oryza sativa
agcgagccaatctattcatacaggtacggagtaaatgtccagccaaaagtaaaaaaggtatcatcacttcatcaagaacttatgtacaacagactgccttctgctttcacttaaaaagcaaaagttttacaacacaatttccttctcggagctaaatccatttggtaaaatggtacatttcccgcacaagaacaggatatgaatagtaccttgatatccagagtaaaaaggaaagaaatgaaagaagaaaaatgccgggaacaaccacaacggcatgcatccacaaccacaaccagatggcaatatgaggacatcaaactatgttgctattcacaagctagcttggtaccaaagctgctgaggctgatagcaaaggcttgaaacgctgagagtggctgccggtaatccatcgtgaagatattgtcatcgaccttaccaaactgcaacagaactgtttcctcatccttcgagctagcaggatcattgggatcagcagcagcaactagttggaaattcttgcagatgcaactgtcacccgc

SEQ ID NO: 16393 - DNA, 851 bp, Oryza sativa
attttttttctctttcctctagacttttgttttgggtactgcttgtgctgctgtttcgagattggttctgggaattctggaagtatttggtccttttgatctgagattgtccttttctagattggtttgagcttaaagctatctcctttgttcctgtccttcctgttttaactatagatctatgatctccatgtgttaatatgttagaatttgggttgcagcgggaaaaaaagtctgaaagttaacgcgtccttcggccgcggattcagaattctgcgaatataagtacattacggtgggccgtgataccaatttgtaccgagcaattaattgaaggttagagtttgagcttataggagatgaagtgattggagctgaatcctgttgctgaaagcagcgatttcgtgtcaaaatttgatgcctttgcttggttcgagagctgtacatgcttgatactgttgcgatcctgcaatgtcccgaaggaatgccggggcaatgcagcgggaggggtcagtcaaggactgggaggaatttgacccctcgccgtctcccaagctggcgtactcgcagtcctatgttgcaatgagggggcttctgacatcggtggcctcgctggaccttgtcctgatgtcgagcagcctcaagtctgcttgggcagctatatcatcccacaagcatgcccggtccttggagaggtcaaggtccaagggaatgagcttgaagagggccatgctgcagttattagtgtgcttcatggttggtatcttcattgggttcacgccacccttttccgtggatctaccaggaaagatagcttctgaaaatgggaggcttccatttgatggggatgc

SEQ ID NO: 16394 - DNA, 1071 bp, Oryza sativa
attctagcatttctcacattcatatagattcattaacatcaatatgaatgtgaaaaatgttagaatgacttacattgtgaaacggaggaagtatgtctttaggctagtattatgtatagctttcttgtttttaatcaatatgcaatttcgtataattcacagtgacttgacctactatctctaataattggctatatcttctttaaattaaagaccggaatgaattatattataaaaagaaatactacaaccagcgagggaaaaaagttggtaaatttagcagaaaaactattgcatgagtcaaagcatatgaggtcaaacatacaagcaaataagctggagagaagacaaggtcgatctggagagaaggctggagagaagacaagggccctatttggatctaagggctattttttagccctccctcaaattgcccaaatagctcaaaagatccaaaagggtgagttatttgagggctatttgaaaaatagcccacccaaaaaaaactatcctacccaagaggtgctaattggagctatttgaaaaatagcccacccaaaaaaaactatcctacccaagaggtgctaattggagctatttgaaaaatagcccacccaaaaaaaactatcctacccaagaggtgctaattggagctattttgagtagggcccactaaaaggtgtcttttctctctcccagcgcacgggatcagaaaacgcgacctcctctctctctccgtacgaccgcgcgcgcaggcgcggggcattttcgccgccgccgcctccaccctcgccggcccccaccagcaccgccgcccccacctcctccccaccaacgccgccgcctcaccccagcagcgccgccgcctccccccaacagcgccgccgccccacctcctccccacgaacgccgtcgaccccgctcctcgccgaccgtcaaccgcgtcgccgccgtcccccactcaagccgccaccggccccccactgctcgatttgttttcttgtccatggagggtggtggcttcgatttcttctccgaagatccaaatcccagcgtctggcacccgtcagc

SEQ ID NO: 16395 - DNA, 1835 bp, Oryza sativa
gtagaagcagcagcctcacccctcacacgatcgatcgatctccagagagtgaaaccgaacaacattttttttttttttgacaaggcctgttcgctcgttggccggctggtaccccgtccttgttagagtttggtatccgcgactacttggcgtagtggtacgtgaacaagatttgtgccgttgccaggtcccctttcacatgcagtctcgatcgatcgatcgatcgatcgaatgcgtactactcgcgagcagtagtagactagtagtagtgcatggctaccaaacaccccctggcccccggcgtgctagctttttctatcgacaacattgtccttttctaccacctaaccacggctgcgttctcgctcgttctcccacgccgcaaggcaacacgggcgccacgaatgtgcgaaaccgccgtatgcatgcgcgcacagagcgtgtgctgcgtgttagcgtgtatagcgacgaaccaaatgcaacttacctgggtggcatgataatgaatgcacgatgatgctttcttttgtcactgttaagcacttatacccgcgataccgtggaacagagatagagccttccatggggtacttccgcgactgctgtactccacacgtcaacaaacattatgctgtactttgagtctttgacaattagtgcgtgatgaaaaaaacgtaaataaaagcatatgtcgaatgcacaacatctttattttggggaaaaaaatgccgagtgtggttaaacttttttacaaacgttaaatgaaaaagaaagggtcggcatgcttgctaattagatactcactccattccagattataagatgttttgaactttggtcaaagtcaaattgttttaagtttgactaagtttgaaaaaaaataacattatcaacctaagataaatttattatgaaaatatattcaattattgatttaataaaactaatttggtattataaatattactatatttgtttataaacttagaaaacttgaagtaacttgaactagtttgactttgattaaaatcaaaacatcttataaacggatggagtctagcgtgtgtttggttgaagggttttcctgggtcgggttgggtcgaacccatttacataggtgtttggttagagtgctagctgggatgggttaggtcaaaaaggaatatacccctcatatacgggttgacctgatccgtgaaaaatcgctcggacggcgccgacccacttcgccagcgctgcaatcgcgtgatcctcacgcgctcctcgcagtgacattatcccttacccgtggtgagggtgtgtttagttcacactaaaattagaagtttgattgaaattagaatgatgtgacggaaaagttggaagtttgtgtgtgtagaaaagttttgatgtgatggaaaagttgtattctctccgtttcacagtgtaagtcattctagcatttcccacatttatattgatgttaatgaatctagacatatatatatttatccaaattcgttaacatcaatatgaatgtgggaaatgttagaatgacttacattgtgaaacggaggaagtaagtttgaagaaaaagtttaaaagtaaacaagactggctctgttcttttggttgagttgggaacccatccctccggtacggaaaacgaagcagtccattagcacgtgattaattaattatttgctaatttttttttcaaaaatggatcaatataatttttttaagcaactttcgtatataaactttttacaaaaaacacaccgtttagcagtttgaaaagcgtgcgcgtggaaaatgagatggggagtcgggaactccaggaaacgaacagagcc

SEQ ID NO: 16396 - DNA, 2930 bp, Oryza sativa
tgtctccaaggcttcggctacgaactgccagttggttgtagggccacagcttgatccacaaaagaggaatttttctagccacattagcagaaaagctacatgttctcgaggagtgacagaaccttggcccatatatgctgctacatagcctgaccaaccgcctatgctcttggtcctgaagtcatattggttcttcgtgttcaagctcatagggttagccgatgaggtgatgtccagacccgtaatcattatgatatctataagagttggagtcatcggcccttgattgaacaagaaggcattgatggtgttggaccaaaaataggaggcagctgccattaggggctcgtctttagctgagttgcctatggtgagatcaagtgcttggccgattccgatttcatcccaatgaactcttttgctagccaacatgcgcttgaaccatgtgatccaacttttctcaggtgaggttttctcgagagatggccaggatttgaaagtgtttctccagtgacctaaatctgggttggtcagtctgaaaggaatcctataggtttcaccaataacgaactcggtgggatcagggttgccaactgggccgagaaagtactaattttcgtgcgacaggttgggaattgcaactaggttggaaagatgctgcaaatccaaaagaaccaagaaggggaaaacaagatgaggtgttggaagatcggtctgatgctgagaaaggggatctagtcgatgggaacttacctagcgtactcagctgacggtgcggcagacgagctggcggaagaagacatcgtcgcgggtggagatctagccggagatgaagtcgcctggggatcgccttgtgcatcggagaaatcgccggagaagaagaggacaaggttggctttggcggtgaaaacggaagtaacgggataaagatttttcagggcggcggttagtatttaaagcattgaggataatggtcggaaaacggcggagtgcgaaacttgctcggagtcgatatgaggcaaatccgaaacattaccgaatattctggacttggggggcatgtgttaacgaccaaatttggtaatatcagtatcggagatgaagattagattgaagcggggtcgaagatgaagattgtcgcgaaaacagagtaagaatcggctgaagtccggattggctatgattggatcggctgagttggagtcagacttggttaggtgatgtacccgattccaacaatacgacttggtgtacgacatcgggttgggttgaggtgcttcaagatgattgccacgcatggatagagtcctgggaaggcaattgtatctattaattaggacattttatgtaatttccttaaagatatgtttgggcaaaagtctgccgtaaagacttgtggtatcttagagtttgttagagataatagtcgtgtccggtatggacatatcttataattctcgggtataaatagaccccgagccctatgtaattaaacacacacacgttcaatacaatttcagcgcatcgccacctttttgctttagttttatttcgacgagttcttgctttcgggttgagctgcatcagtttcgatcttcaacaagaggtaaaacttgttatgatggcttgtgttatcgggattagtgcttccatctttatgatactctaatcttgtttacgtaattcgtcgagttatcatatatcgtacataatctctggcaatatcactatctaacctacaatcggctaacatatgttagtagagggcagccgattaggttagattttgatgttgatttagattatataagatatccaccactctatgaaacttccagcggcttgattgtctagatattgttcttcctttcatacttaatgctgcatcagttgagtttgatctattaagtcgtgcttagaatatcaatctctagcctgccttctggttgccgattagggtagtatcggagtttcagccgatcttatctgatttaaccatattcgctctatatgcttcagtgacatgttaaatccgccatttatgtcaagatcttattgcatttaagtatattaagcttttgtttgatatattatacttgttttaatatcctgatatatagtagtatcggagtattagccgatacatgctcgatctatatgatcggctatgctataaacatatatagtcctgttattaatatatatttcgatccaagtgatttatactgtctcggcacggcgaccgatctatcccaatcacttgatttaaatatatatcgatataagaactatatattggtaatatctacagccgattgagtaggtttagttctttattatctatttatagtcgccgatcgattcacatatgacatcggctcaaagataaatgatatgtcatcggcacttagccgatcggctatcatttatatatttaactgcgatctctttgtttctattttttgttgattgcaggatcaaattaactggcacgttaacacacccgaaggcgagctttagacctgcactggagttaagcagatctcccaagcctcatgttttacgtcaacaccggtcagccgcaaccgcacacactcatcgtgcaccgctaggtacaccacaatccctggcatcaacttctcattgatgccctttgcagcctcgtagatgtccctgcgcaccagcacccttgtatcctgaggggctcatagatggagacgccgcaaaatgagctctacttcaccatatgtattcgttcagtttaagctcttcttcttcttcttcttcttcttcgtcttcttcttctctctctctctctctcttcttcttcttcttcttcttcttcttcttcttcttcttcttcttcttcttctttttcttcttcttcttcttcttcttcttaatatgttcaagagctcgagaagaagaat

SEQ ID NO: 16397 - DNA, 1866 bp, Oryza sativa
cttacacgtggcctccatgtgtttttttttaatttcgttgatgattacgctgctacatggataccatgtcagtgaaaaccactctcaaacacagtgaaaggagtcattttacatggctttaatggttgaaggataggaattagatttgaccaatagtttaagaagtccaatggatcagctcatgtgctggccgtttccccttcccccttgttaagatgtttgcagcctgttttccccttctgccttgttaacatgtgcgcagcgtggtggctaattggcgcgtgcgccacctggcaccacctcccccgcgcaattttttcgctttttcttttttttttgcaatttttttcgatttccttttttgcttttttctgattttttttaatcttcagcacacgtgtcttcaaatgttttgagttgaaagtttttaaatcttgactagaaagttttcaaatcttaacttaaaaattttcacatctggacttgaaagttttcaatctcaactttaaagttttcaaatctcgagttgaaagtttttcaaatatcgagttaaattttttcaaacctaagttgaaagtttttaaaatttgtcttacaaattttaaaattcgagttgaaaattttcaatgtttgagttgaaagttttcaaaattttatttcaaagtttaaatcttaagtcgaaagtttttaaatctaacatggaagttttcaatatgtcagtaaaaaagaatcttacaagaaaagagaattcttaacttaattaccatcattatctaaaactaatttagttagttaggccaaaatgctcccggaaactggtgacgcgcgcgaaaaaaaagagaggaaaatcgagagagaaaaaacgtacatgaaaaagagacatacgcgatacggacatgggtaccgtcatcctaagatgagtgccaactacttcctctatcctataaaagaacaacatctggctatatgtacagatttgtagctagatgttagcttttttttttttttgacagagggacaaattagttctgtcggtgtttatatgccttcattttggaccgtttgaagtcaacctcaatcattttcgagcccagcaagtaacattggggaaaaatattttaactgtacgcgtagaaactttatacatgtaaaaatattccgtgtataattttttacgagcaagataggtatttctgtccagcaagaaattctgggccgacacgtggtaaacctctttatggtatgtccagcaagataggtattaggtatttctcagctctgggccggtttaatgaaagtcaaagagcaatttcttaggtttggttcttttagatgtggcaatgggacaaacataagattttgggaagacacgtggttgggatcgcgtgctttcaaagatcaataccctacattatataatgtggctcgaaagaagcagtctactgtggcagaggtcatgagcacaacgctgctaaatatctcttttagaagagctattgttggccaaaagctaatcgagtggaacgatttgatcctcaggctagctaatataagtctatcaaatgaaaaggactgttttgtatagtcgctccataaaaatggtcaattttccgtcaaatctatgtatgctgcgatcatgaattgtaatgttcggatcaaaaagagaattctgtgggacttgaaaattccactaaagatcaaggtctttatgtggtttcttcacaggaaagtaattctaacgaaagataacctggctaaaagaaaatgggggggcaaacattgttctttctgctatgcacaagagacaatccaacatcttttctttgagcgtcatgtcgctcagtttgtttggagatgtgtgttttt

SEQ ID NO: 16398 - DNA, 1337 bp, Oryza sativa
gccccacctcccaccgccacgaaatccaagacggaggaggctacaccacctcccgatgacgtgaaaccggtggtggcggctgcgcagactcccgacaccaaaatactcagggcggcgaaggaggcggccgcgactggatgcaagaggaaggccgacgtgaagagctctggtgcaagaaggggcaagcggctctgctcccgctgccgggcggagacatcggaatcggacagcgagacggcggtacttgacaggtcgccgtccatcgaagacgaaacggcggactcttcagaaatccatggaagcagtgatggcaaattcatcaggttcttgtgatttagttcgatctggagccccgagggtgctagcctagattggaatcagcgtgtaccaacaaaatggatagagctgctgtagttctcattttgagttcttaagccctagtataatgcctaccccaaatcatgcgttacccgcaaatttcagcatgatacagacaaggtaagcatttattttcagtatcagttgcaccgtatggtgcacttgtagatagaagttactacagcatggagaaatttggagattaacatatagacattagacattttctttcatgtaatatagtagtagaacacacaagaggttcaagcttgaatgattagaaaagcttcttgccatattatccaccatcagttcatgtgtcatgatggataatttttgaactgactaggatttagagaaataagcggacaagagcccgacttgaccttcaatgcaaagaaaagagggggcaacgcacaattgcacgatctgaaaggaacaaattacagacatacaatgcacaggtctgatgaacacattaaactacacagacattgagatatttgggatacttgcgatgaacaattccaaagctgctagatcagttgcctttctcgtccggacgaaggttaatcttatctgctctgccctgactgctctattgatcttggagctgcaaacagatggatgtatttcagatcaaaagcacaactgctagccaaaggtacttcttaatgaagtacacacacatgctgttcaaaatcaggcaaattcattgcgagtggtgtaaagtgttatttgcagagggactccagctaccatcacaataattggcttagatttatgcttcactaagtcagacaagagctaaattatccatacatgaaagcatcatctgagctatataatgtggtactagaaagcagatcttgggctccatccattacagctaacactgatttcttagtttgcgaattaaatttccagtgaagcattcagttcaattgcaggcatattcc

SEQ ID NO: 16399 - DNA, 1701 bp, Oryza sativa
attcctgcagccctaagcaaccacgcactaatgcatttatatacagaaaactgcataacacttgggtcaataatgcttcagttcagctgcttaaatctgcctttaaaacttatggtttatgtacatacctctggttcaaagagtggcaatgtgatgctaggattatgtgtgtaatgtggggcaccatagatagtactgctgcttggtgatctggttgcaatataatgcaatgggaaaatattcagtattaattagagctcggtcacaaaaaacataatgcaaatgaattgtaataatatatcttgtaaggttactgaaactgatctagctgatcatatatgtgtgtgctacctcatgatgggagtttggaattcaccgtatcgtacgtctcctcgttctccatatgccatctacacatgataaagtcggcataacataagagatttttctcagcatgaagttcacacgcatggaaatggaacactgattggtagttatatatataattcatacagtactagctagtgactactactgctagtagacggcaagcacccaaccagatgatttttgaaaaaaaatcatcacgtatactggttcttataattgaaatagtaggaaacgttttcttgagaaactttacagacaaaaagagaacatgatgatggacaagtaacaaataacaaataatgaagaggaaaaattatacatgcgcgtatatgtagagctaacgaaaacagtgcagcaaagatcaaacataaacatgtttttcagggaaaacaaaaacaaaacaaaattaacgagggctaattttctcgcactagtaacttcttatgtagttgagcccaaaaataaaatctcctgtttttactgaacaaattaagaagaaacaattttctcccatgtgtggcacatagttattagtacatgaaaccgcaagtcatccaaagaaaaattcactaaaactttcgctcatatgtgatagctatctctcaattttttagatgccaaattcttcctgaaacaattagtatacatgcagaactcagagaagtttgtccatgtaccgcaagatttggatggattgggaacggagacgagctaacggcggtagcatggaagggagacgatggggacgacgacagcgaggatgtggacgcccgtgcatcctcctgctcgatcgatccatgccaaaaaccacaagaaattagaaacgcctaattctctctagaatggccacacaggaaagacgaaatagatgcatatactctatgttagcagcatatgtatatgcatcgatcccttgacttaccaagttaaggctgccggttctgtggatcaagcttcccggctggccaagagggttgaagtactcggccatttcgctctgtaacctgatcttctccagctgcgccaccccgagccctcgttgcggctgcttcggcttatccgcgccgccactgccgccgcctctcttgcccttcctggaggagccggccggcgacgacctcccgctgttgccccatcccatgctgtctccaaagttgctcccactcatgtccaagaagaagaagacctagctagcttgccaggaggaagacttggaaggacaagatgaacaagctagaaggggaggacaaggaagggaagagagagagagagagagagagagagagagagagagagagagaggagagtgat

SEQ ID NO: 16400 - DNA, 929 bp, Oryza sativa
cgtaacaaattttttaagcccacttaatctataattagcgtatgtttactgtagcatcatataggctaatcatcgattaattaggttttatagattcgtctagcgaattagtttaggattatagaatgagctttattaataatctatatttaatatttataattagtgtccaaaccttgatagggacttgaaagtctacacagtagtacagtaccactcgtatatccgcccaaatttttgggttcacactcggcggcacactcgaagctcccaacaaccaaccaaaccccaaagcatatcacaatcagtggggagggaagggccccttatttattcgcattcctctcctcatcatcactcatctcccttccctgtcgattaccttctctccttcctctgttcctcctctcctccacacatccaggcaggcaacacaagaatcatccgggagagcgacatggccccggttgccgtgggcgacaccctccccgacggccagctggggtggttcgacggggaggacaagctgcagcaggtctccgtccacggcctcgccgccggcaagaaggtcgtcctcttcggcgtccccggtgccttcaccccgacctgcaggtctcttcctccttttttcgatttcctctcccccctctttcttggagacgttatatttccctgaaaaaaaaattccttaaaaaatgggacttctttttatcagatcgagaaattttactgcaaaactgaaatgtgtactagctgatgtccggaccaaatccaagattactgctttattatacagatactcacaatttatgggattgatttgacgagctctgaagtcactcccacttccttgggtgtcagagttagggttaaaaatcttgatgtgggtttatatattgctagttgcatgactaaaaagtagacttcga

SEQ ID NO: 16401 - DNA, 1989 bp, Oryza sativa
attttgcagttaacgacccctttgtcatgaaggcgtgggcaaagtcataccctgagaataagcatgtgaaattccttgccgatggtttgggaacatacaccaaggcacttggtcttgagcttgacctttcggagaaagggcttggtattcgttcgagacggtttgctctccttgctgacaacctcaaggttactgttgcaaacattgaggaaggtggccaattcacaatctctggtgctgaggagatcctcaaggcactgtaagagcttcagctcttaggaacggcagcgatcacttggacctatcgtgtcaatcttgtttaaatttgtctgcaaaatacttgtgcgaataaaattgtcgatgagctgcctagttgtgaggactttatgataatgtttgaatctgtatccactgttgaatcaagtagtaatgttcagtgctcatgttaagttataatcttcagtttatatctccagaaaaaggtttgatctttccgttgacacttagacagtgacttctagagtaaactggattattggtcaagaagagagaattttatggtagaaactgatcggatcgcaacagcaatgcccgttctctgaacaggcatatactgcctctgcacagcttaatactcttttaatagatgacgctgttgactttttctcacacatttgaccattcgtcttattcaaaaattttatgcaaatatataagatataaatcacacttaaagtactatgagtgataaaacaactcataacaaaataaagtataattacgtaaattttttgaataagatgaatggttaaacatgtgagaaaaagtcaacggcgtcatctattaaaaaagaaggtagtatcagcgtgcgaagatggcaataaggaggctgtgcggttatttcatttacaaggtaaatatggtgataaatctaggcttaatgcctgggccatcttgccaattacttatactccgcatagtttacagcaactgtagcttgcatatctttgtgttactgttggtgcgcgcacgtctgcttttgtattccgaaggaaaatatgctagtgtgcattctgttattcagatactagcggtttcacattttgaatttctgatctattcatgcaaaaattttccaaccaaaatgaggccgtgaaatatgcatactgatttcatctcaactgagatgagcagattacaccgccaaatcgccaatacaacccatccagcctctctgaagtttgagctatttacaggtgctccccccggtagcacaaccaagcatgcagctgtctgaccattttttcaggctacagctacctatgagaaaagcttttcaacccaccccccaaattatcaactttctcaatgtgcaaaagtttctttgtgaccatgcggtggactttcctcagcctcgcgcctttgtcctcgtgttcttgctcttgccagtgaatagagttgttggtcacttgtgaattggcatctatgctgttcacagtctcctcttcctccagtgcattgtcaatgatctcggggatgtcaactagactgggccttctccttgatttcgtgcgctttgggtctctagcaatggcatcagcgtgaagaacatcctcgatccgagataaaactgcaaaggctaagctctcaagagtcctggagtagctctccaagatggcatacccaacatcctgaagaaaagaagtagcaaatgcaggtggcatgagtataagtactgtagcaaatccgaaaaaagtaactaaacatgcagctatggttttttttttttgaccttgttgtattgtatcttgctgatgtcaagtgatgactgaggaaccccagggaactggtgcttgaggatgagtaggacagtttgcgcccgctcttcaaactgctctcgcttctccaagctaacaccggggccccaggaaagcttattggaaattttcctctgccaaattacaacggaggcctcaattcggtctttga

SEQ ID NO: 16402 - DNA, 648 bp, Oryza sativa
aagtaatgctggttcagaaaactaatggggaaaagatcaatttggacatttgtatatgctattatgcttacaaggagcatggcgtcgagttttcgcaatgccgggatattgatgagaagatctctgcgctgctgggtacccatcacctggttgacaacaaggacgaaaatgaagcgaattgcacgatgaaatagtaatgaggttgcaacgatcttgtggatggcctacctccatgctggttccatccgtggacgcctgttgcgaagggacgaactcgacgatgtggtcggtgaccgacagcagccagtcgatctccttgttccatcgagctctccggtcggcagacatgggctcgagccggcgctgctccccgaataccgaagctgcagattttgccacggtgaagaacgggaaaaaaaaacatcatgacaggcaagaacacaagagatttgtagtagatagcatgtgatgagtggtgtgatactgacctgcgagatttgtgatggcgttggagagagcaagagcggaggagacacctttgccggtgccggacatgtcctcgccgagcagcagcttggcgaacttctccttcaccagatcaatctctgcaacagagatcgaacgatcgatcaaatcaatggcgaaact

SEQ ID NO: 16403 - DNA, 659 bp, Oryza sativa
tgtttcagtcatttaaattaagtgctttctgatgcagagataaaaatttgttagagccttctagcccaataaatgaaatttatgatgactgctacaaccactgcagttggataaatcaattcagctcaataattatggcttgatagtccccacacaaagatggaattggcagttaacagttcctaatgcttttgtcctatgttctgcaggcgttttggtacatggccagtagcaatacatgttgggacaaagtacagagtggttctagaaggccccgtttgtaagggtaatcaagtcactggatggcatacaaatcagagaaggggtgtatcacgtcgatttccaattggtttctctggatttgcttttaacagcactatactttgggatcctcagagatggaacagccccactttagagtctattatagtccattcaggtggcagaggtggcttgcaggtgagtttttttagtatttatgtgttcaagcagttgaaaatacgttttcaataagctgtggagcttctgttgtctgatataaactgaaaccgacttcctaatttctgctttacaaagttttttatcagaatgtctatcaaactgtattattatgattgttatcctagttaaacacgccctttcaagatctggtaagctcg

SEQ ID NO: 16404 - DNA, 4620 bp, Oryza sativa
cattttttccccatattcatccagctagatatagccatgtacatttcattttttttctcgtttctgtccgttatatacatacatatcacctcacagatgtgaatgttcccctccattggaactgttgaagagcaaagcagatactctctttgatatacatgaacaaaggttaaatcaaaaccatagattgtacacacaatggtgtgcttggtcctaactcgcaagttccttttcaatatttcattctcctcagctgcgttgcaccttgctctgttctgatctctgaattcctgtcaatgcaaatatcgtgttgcgtgctaatgtatcatgtattcactgagaatgttcgtggcttggcttcctataccagctgtagtaccgaaatttccctatgtaaagcctcctttggaacggagaaattcgtggtaattttaagggatttgaactaaaatcctactagtataaaattaatgcattgcaaggtatggtcagagctcagcattttcggaaagcaagcaagctcacctgacgtggaaaggctaacgggcgatcgattgctgtcggcgatcgttttttttttctttttctcttttagtaagtttatacacataaagtttacacatctaaagtttatccatctaaaatttgtaaagcgaatgtttataagttaaaagtttatatacccgattcaaattcaaattcgaattcaaatattttatattttcctcttttagtaagtttatacacctaaaatttatacacctaaagtttacacatctaaagtttatccatttaaagtttttacaacgaatgtttataagtcaaaagtttatgtacccgattcaaattcaaattcgaattcaaatatttgatattttcctattttagtaagtttatacacctaaagtttacacatataaagtttatccacctaaagtttgtaaagcgaatgtttataagtcaaaagtttatatacccgattcaaattcaaattcgaattcaaatattttatatttttctattttagtaagtttatacacctaaagtttacccatctaaagtttatccacctaaagtttgtacaccgaatgtttataagttaaaagtttatgtatccaattcaaattcaaattcggattcaaatattttatatataaaatatttctatacacaaagtttatgcatgcaaagtttacggtataaagtctatgcacatgaatgagagtattagatttttttcctaattttcttttactattttttttaaatttatgatgtaataaaaaagtaaaaaagagagatgaaagataagtattaggagggagggatgggtgatcgctaggaggagagggaagcgatcacccgcccactagcaacctcctttaaaaaccatataaatagttaccaattttttttaataaattgataatattcatataatatacatataccgctctacaaaatattaagttccaactcaaacttatacaccatataaaatagttaccattttttttaaaaaaatgataatattcatataatacatataccactctacgaaatactaggttcaaactcaacttatacattgagatataaaaacacaaattcagatacaatatttttttacgggaattcagatactatacagaatggccatttgtgcttgggcccaggagtaatctgaaccaaacgggccaactccaacgatacgagtgggccctttccttctttcaacccacggaaaccggaaccccaccatctggccatctccaactccaatcaggcgtccaaatgcaaaaatccgttaccaaaattatggaaagcctccttccccacgccggctcattctaacaggctgcgttacccactcaccagtcggtatgccgtatgccaatcgggctgcgccctgactgcttacgacgatactatgacaaaataaaagcgaaaatgattatccagtcggttgcgttgcattccattccgtgtcggacacgatgagtttgccctgcgttcgcagcgatcgccctggactccgatcaggtctcgaggcgcatacgcattcgcgcctataaatccagggcatatgcgccatccaaacccccttccatattgagttcccgagggagaattcgatcgaagaatacgagcaaattaaaatcgatcgcgatacttcggtgttgacgaaacagcgtgatctctctgccccgcaatatgccgccggctgctgcgggctactccgccggcatgaagcggcctctcgccgcggtggcgccgtcgtgcgacgtcgacgggcgcaatgccgctgccgctgccgctgcgaaacggcgggaacgacgacgggaggccaagcgggcgcgcgcggcggcggctgcggcgacgggcgctctggtcccgtacgtggcgcccatcgacgcccggcccatacgcgccgtcccgctcgccgccgccgcggccgcgcggaggaaggaggccgacgaccaggcggcggcggcgccgtccgcggagccggcgtggatccgcaagatactgctcgagcggctggggatgacgtacgaccagccggtggtgttcatcgcgaggaagacggtgaccaggaccgacctcgacccgcaccagaaccggttccgcctcccgatcttcggcgtggagcgccgcctcctcccgatgctcaccgtcgacgaggccaaggaggccaacctggtggagaacgacgaggagaagggggttcctcgcccgaggccgaggcccaagaagaagcgacgcacggagaaaggcagcgtcgtcatcgccgccaccgccgccgccgacggggagctgcagaagccgcagggaacgacgccggagacgaacgtggagggagaggatcaggctcctcctcgcccaaagccggtgccgaagaagaagaagcgacgaacggagaaaggcagcgtcgacgtcgccgacggtgagcagcagcagcagcagaaggggagggagaaggagccgaggaagaaggcgcaggggaaggaccacggcggggtgccggtgacggtgctgcacctgagcggcgccatgaaggagctgcggctggtgctctgggacagcagccatggcaccatcatcaaggggaccggctacatggacttcatcgccggaaccggcctgagggagcacgacgccgtgcagatctgggccttcaagcgccgcgggttccgcctcttcggcgccaccgtgccggagagccgcttctacctggtgatcgtcggcggttcgtggcgcccgctggaagctccaccgccgcagtgcatgctcccgccatctcacgcgcctgtggaagtatgtgcttaggcaggatgggtatagactgaatagagtagtgagatattttacagtgctggcacctcccaatgtactgtacatcccatctctaactcatctctcgagactacgagtatgtaattttttttaaggataataaattgagatttacaaataaactttaataaatgtgtatttcttatcctatatgggttatttttcttcttagtttggtgttcttaattttatttgaacttcgctcgttttagagtgctacatctatctatctatctatctatctatctatctatctatctatctatctatctattatatagtaaaagtccattaaacttcctacaaacgctcctaagccgtcacgtagcaattctataaacactcctaagtcgccatgtggcgttttaatatattagaaacatctggcccttaattttcatttaaattggtgggtccataattttacaccattagattagattaaaaatagaccctcatacgtatgcctccctcaccgcctgcaagtacgtacatatgagtaagaacgtaacataccccacttttttccttttttattccccttcttttattattttgctttacctaatatacctccataatattattggcgtttgaacatatgtttatttactaaagaaatatgtaattatcatttattttgttatacttttccattaaatttcctacaaacgctctcacgtcaccatgtgtcactctacaaacgcttctacgttgctaagtagcgctataataaattaaataaaataatataaattcttagttaaaataaaacatttaattctcgattttcacttaaagctaagagaccattattttagacaattaaattattatatctataaaaaataatctctccctcctaatatcccgttcaaattattaaatctataaaaaataatctctcgctcccaatatcctattcacatagcctagtggttacaagagcttcagtagcacctgaggtcctgggttcgactccccgtgggagcgaattttccaggatttaacggcgttgtgcttttagtggtaggcgacgtacccgtcgacagcgagacgcctacggtgacttcatcaatctctccaggatttgccggcccagtcttcgaagatgctcataggagtagggtttgcgtgcgtgcgttcataggggtgagtgcgcgtgcgttgtgagtgtctgtgttgtactgtgtaattctcaaaaaaaaaaaatcctattcacatacaagagaaaatcgttgcgtacaattcatctggttaaaa

SEQ ID NO: 16405 - DNA, 656 bp, Oryza sativa
atcacaattgagcaatatgaagtactccctagttcgtttgcacaaacactttagttgtaatatcagactacatgtttatgctttcctctaaaccgagtccttttcgcaggtagcagacatgagtgtttggcaagaagtgatttctaaaggaaaaatgcccaagaacgatgacattgttgatcaccatgagcctgtgtctgccgatccagctgggaacgtgtgcagttttggtctactcatgctggaaatcatctcaggaaggcctccatattctgaacacaagggctcccttgcgaacttggtaaggatgacaattaataaatcgagtgtagttactaaagtcgttgcaacttccacaaaatgggatcttgaagcaaatgttgcttcttctttttttccgtctggtgacaggctatggagtgcattaaagatgaccggaatatatcatgtttgcttgatcctaccttgaagactcacaaagaaaacgagctagaaatcatctgtgagttaatccaggagtgcatccaaagcgacccgaagaagagaccaggcatgcgagaggtcaccactagactgagagaagttctagcaatctcaccggacgcagcaacgccgagactgtctccactttggtgggcagagctcgagatcctttc

SEQ ID NO: 16406 - DNA, 2214 bp, Oryza sativa
ctttcctggaacagattataaggagtagaaggatgattccttgaatgacaaaacaagagataacgtcggggccgacgcttattttatcggaatgattccatctacatccagtcaccatatctatgattaatcaaataagcaagagctccgtatggtacttgacttgtgttttctatagataatagttaaatatatggtttaagggaattcgggtttttatgttttactctaaatattccttatgttattcatccaaggagtgggctcgtgatttgcggattggacaataaacgaatctccacctcaccaccaccagaggggagcaaagaaaatccaatggccctcaagaaaggcagcagcagtggcttctctttttggaagcttgcagagtgtgccatggtaggaggcgacggggggcacaatgaggaaggaggatcacgatggcctggagtgaacaggctttttgtgcctggacctaccgacatcgggatggatgagggggaatgtaaagaagtataatatgttagttagagataagagtcaaaaataaattatagagataagatatattttagagatagaatctaagatagagtcctagagatataatcctagagataaatctactcttacttgtattgtactctaagtctctatcccatatgtacttctatatataccagaatgattgtgagtagatttgaaatcttctatttcttcatcttcttcgagtcaccatcatcgattgcatctctggtggacggtcctccacctggtgcctgcgttcccttctgtgtcgtcccttgactctcctctatttcctcccgcagtcatagcgggagtgtcatggacgatagcggtgacacggacgctttgactggagtttccgtagatgattcttgttgtagacattcgtcgatgtaaccgatcatgtagtagccgtggtcgtggtagtcatggtaattgatgtagccgcaaatagccgaaggcgaaaaaaaatatttacactatagtgtgaagacgaaactgcaattgtgagtatcttgcaccctgtagatgtcagaggatgccattggggacgtcttgcatatgtcagaggacgtcgttggtgatgaggccaccacttcggttggtcctttcgcaccgtgtagcagtcatcacaaaagtgatgccgagttgatgcagtcgttgttgtcgtagatgacgtgatcgatgccgtcgtcggtgacgcggtcgttgcggtcgtaaaggacgcggtcgatgtcgtcgatgaagcgtcttgcagattaatctgtcagacgacgtgagatgtccatcttcgtggacgagtcggcggcggcatgttaccatgttgatgaagaccataggagtcgatgtagtcgtacaactgatgatgagtattgtccgtgaagaatccgaagacactgtgttgttggcgcggagggagtcgatctcggcgaccactgatcgcccggccgccgcaaattcatgcatgtgaatcctcctcgggctcggtgcatcgtgctgctgcttgcctgctgctgatgtgtgcacgcgctagatgcctctctgattcttgctgctcgatatgacgcttgaattggcttatacagattgatggacaatggttgcttccgctcaggaggatcgcttttatgttgctaatgaagaaactaatctaatctaatgctaattaatggaattggcgctgattaggcacttgcttcttcggctaatgattgaagaggcatataatggcgttgccacagggggaggcgttgccccagggagagcttatggattcctctagtctccctggggcagcgcgaaggatcggtcgacgctagtctatagctctgataccatgtgaaaaaatctatttgttgtattatgttgtttttatgatatattagatcgaccctctcatggggtatatgtaggagtacatatgggatagagacttagagtacaatacaagtaagagtagatttatctctaggattctatctctaagactctatcttatctttaggattctatctctaggatatattttatctctataatttgttttagagatctctataatttgtttttgactcttatctctaactaacatattatacttctaacagggactgccatattccggcattcttaggtggcatgtggaaaggactttaattaatgacatcggtgacacctgtggacgct

SEQ ID NO: 16407 - DNA, 6905 bp, Oryza sativa
ttcgatgggccgaattcctctcggcccatctctccctccctccccatctctctctctctctcccccgctctgcccgtgcgctgcgcgcgcgtgcgcgtgagccgcgccgagccgagcgccctccaccctcgctgccgcttcccgccgacgccgcccaaatcgccgcgccgcccgttgcttcccccgcgcgcgcgccgtggtggccgaccgcctggtcgccgccgccgtcaacctctgccgcgcctgtccacgcctgccgcccgtgtcgccgctccgttccaaaccgcccccgccgtcatcgccgtcgtcatcgactcagccccgcctctccccgcgcgtgcttccaaggaaaggaggcagggctcctcctcatcgccctctctccctccctcttttctcaaagaggcaaggggcaagccccctttctctcctcctttttcccttttctctcccgccggcgtcattcccctcctccctgtcgccgttttggccgcgagcgccgagcgccagctcgcgccttgaccacccaaggtcggtttccaaaccgacattgccgccctataaacccaggtgccctcccttcctttttccctcccaatcttccccgtttttagcccgcgccattgccgtcccgttgtctctctcgccgaccgccgccgtcgcgtgtgccggaggagccggtgcgtgccaggacgcgggtggggactccgggcgctcgccttcttcctcttccccggcccgaggccggagagatcactcccgtgccgtcggcctttcgtctcagcgccctcctctgcagcggtagtgcatcatccccgttctccctcctcgctcctcctcctccccttagctttgagtagccgctcgagtagtgccccagtagctagctggcgccgccccgactgctgccgccgctcgctgtgtgctcgccgccatcgccgcccgagctcgatagcgcctctcgtcgccggcctcgctgggcgtagctccgcctaatccggcgcaagggatggattcccgtagccgcgtagatgctctcaccaccgggaatcggcccctcgtgacctcgtcgccgtttccccctttcctcgccaccggttgccgccgccgcaatccgccgccgtcgagctccctccggcgaatccaagccgttggctcgctccctctcgttctccctcgtcattccggtgtacaccccatcgccccttgtcgtcgcacggcgtcccggagaaaccgccgccgcccaccgtccattcgcggccggcgccttcgtcttcctctcgccggcccgcgtggctgccacgaaggcgccacgtcggtgccacctcggccgcgaccgggtcgagccgacctcgatcggccgctccctccgttccaccctccccgtgagcgcggtccaccgcgggccgagaggctgcatgtgggcccgccgcaccgcgtcctccgcgaaccgtgcgcatgcgccgagcctaccctccccaaaccctagcacgccccgcgtgcacctcgctcacggtgagccgagcagccgacaagcgggtcccacccaagaccacgcgagatggacccggcccaccggcttcctctctcctccccgcccgcgcgcgccttgggccgccttcttgggccggccggcctattaagctcggccttgccgcccctttctctcgggccgcgccctagccgcccgagggaagtctaattcccctccctccttcttttcttttcttttcctttcaaaaaggatttaaataaatccttttcctttagaccaaaaatccaataatcttagaaattcaatatcttcccaaccgtacgtccgtttgactccattcaatttcgagatctatctaatggcacgcttagaggtcattaatagggctttattttcgccgtttgttgagttgtcccgtttcgcgtgtagtttcggagcccgaagacccgcagtgcgaggatttcgaggatcaagctcaagatctcgagcaagacaagccacccttgaacatattgagcctatatttgaacttaattatattgcttgcaaaatattatgcattgataggaatgcacttaatttgtttgccccgtctacgaggcagaccggtgggcctacctaacttgttgcatctgatccttcgattgttaattgttatatcatgttccgttgtaaccatctagttgcacctcgataattcgtgcactctgtgcgagtatcgacggtcgccttcaaatataaaatttgagtaacatcttgggtaaaacttgggttttacaaaagacttggaaaacccgacacctgggtcggtgcttgcgaactaaatgaatttccaaaatcgtggaccggggaacgtaccaggtgtacggtttcccgctcctgcacttaaggaccgttttcttagaatttcatctgaacataagacaagtgcgaccacatgggtggaatgggacgcccctggctgagtaaatagctaaacaggggagccttgatgccaagagacatgtggattcaacggggtggtgtcggggggaacccccgggcttcctagcacagtatggtctgggacctaacctgttgttggtctgggacccctctcgttggcatatggcaaccctgtgtcagctttggaaatgccttgtcatgaaagcctcaaagtcaccagacgtggctgttctgcacgggctgggtgacccgggttagtaacgtcgtgtgggtaaagtgtaccccctctacagaggttattaaactgttcgaacagccgtgctcacggtcataggcagatgtgaggtgattcctagcgtagttttgtttgactactgctttgtgaaatttgctgttgtggattgggttcgatgcctggaaaatctgcggctgatgggatcagccaggcccgggtggccgtttgagagctgttggccggatgccaaccttgatcaattcaaaagactgataccttgcacatactccgaccggacgagacgcactgtctcatccgtgtcgtttgagaagcacacacttagttgtttcagaaaagagtttaaataaaatcaattgcaaaaacaacagccttttcttgaagcctgcattaaacacttaatctccatggcttgctgagtactctcgtacttacccttgctctatataaataattcccccccagttgctgaagaagatgaagtggatctcgctgacgaggagttcttccaggagcaagtcggctacgatgagttttagggtttcagcctagttcccaagtcgcgcctgtgatgtttggtccaagttttggcttccgcttctcttttgtaatgcagttgtgagctcgggatctgtccgcagcccaacatgactgtactcctactctgtaataaagagaccactgttgctgtgatattctgtcttcctgtgataccagcactgtttcctgggactggtatcgattaacaagttaatttggagcgtcacgggctagttccgctcggggctagttcggggcgtgacaagagatggtatcagagcacaggcttggccctagggcgaaacccgacgtttaggatgaccctaaggatactaagttcaaaactacttgcgaaaagctaaggcttcttttggtttctttttttttaatagtttgttgctaaaatggttactgatcttttctccttctttcaaaattgtagatggcagtgaacgccagcttcagttcccacggttttggtgagggtcaccacgtcgctcagcttcgtgacctcgcccgcttccttggcttctcgtgtcccgagtacacggggtactccgtggaccgtgttccccctcgctgtgagctttcggtgtacctttaccctcgtggaggtatacacggagctggccttcgcccacaccacttcactgtggccaggcccactctccagatcgcgtaccaggacctctcctggacagcgcttcgtcgcttggcccacgactacagccaccgtctcgggggctctgccttccggcagctcccacgccttccttccggccacacagacgccaggtacccttgtccgtacagcgagtctcagccagtgctgactcgcatggttgagctttcggaggctcaggccactcagcacgacctactccttgaggcttaccgctcccttgcccgccgctacgccgctctggaggcccgtctggccgaggagggtgtcaccttagttgacactgtctcttgggactcaggccgcctttgccacgccagccacctgtcctcccacagctctcgcggctcagcccgcactcccccagctcgcgtgcgccatactcaccagtgtacttcccctacccacacccagttagccccttctacaccccggacataccccagttgcttcctcccgccgtggcccacgctttatccgcactgcgcggaagcgtgttgttggttcttccactgtgttccgcttcgactacccagctcccccactgccagcggcccgtgctgctgccggccctcgataggttccgctggtcccttcgcgtcagccgatcgatgtttcttcgactgaggagccgactacaggaggcagccaggcagacgaggagtagaggaggcagtcttcagcagccgtccgtgtgttaggcccttttgttccgccgccaactcttttggaatcgtggcgaggtagtgcgtgcgtgtgattgatgtgggtgttgtttggtagtctggttctcctaggtggtgtgcgtacagtcaagctcggcgtaactttgtgacttgtccacgcccgttgtatcatgtgtttttatgatttgaaaaatccagtttatgcctagtgtgtgctatctgagttgttatttactttgctccttgccctcctaagtgcttatatgattcttacctcgccttcttctgggagtttagatggctagccgcccccgccgtgctgctcatgcaccagcccgcttcggttttgaggaaggtagagttgagccagaagcaaatcatgagtcagctaatcagcagtctcaccacagcaaccgttcgcaccgtactgcttcccgcaatgcagaagttgagcaaccccaccgcagcaaccgctcgcatcacacagcttcccgtaatgcagaggtggaacagtctcactgctctcaccgtgctgccagtcataattctggagaagaacgcatcccctccctacctcatgtggaaaacaacatgcaacacttgatggcagttcagacacagatcttgcaaggattagccgcagccatagccggcttccagcataatgcgcatggaaatgaccaccctcacatgggcaacaatagatccaagctgacagactttctgaggtctcgtccgccagagttctcttagaccgtcgagcccgtcgaggctgacgattggctgaaggatgttgatagaaaactcaacttagtgcagtgtactcctgttgagaagacgctctacgcctctcaccagctaagaggacctgctgcagattggtgggagaattactgcaatgcacaccctaaacccactaacattgcttgggatgagtttgctacggctttccgtgcagctcatgtgcctgaaagcaccattgatatgaagaaagaggaatttaacaggctcaagcaaggcaacaacagtgtcaatgagtacctaagtcagttcaacaagttggctcggtatgcccctgaggaagtggacacagacaagaaaaagatcaggaagttcttgaagggaatcgcagttggaatgagactccagttgcttgctcatgactttcccacttttcagcatatgatcaacaaggcacttctacttgaggatgccagaaaggagaccaccgaagaatacaagaaacgcaggtctaaccatcaggggaattcttcccgaggcgcacctcgccctcgctttggtcaacccatgcaatatcaccagtcggtcactcaggctaactgctagccaggctatgcccctcgtcctcagggttaagcgtgcttggcctggagcaatttgggatgggtgactgaccgggaaattctttccaggtgcacacgagtgaggacaaagtgtgcagaaaagacatgtgttggtctgtgagggcagtctatgacctatgaaagctatcagatgtaagtgggcccggcctgggggaaggcgggacgttacaaaatggtatcagagccgactctcgcggtttcacgggcgcgtgtgtcgcagttgcgcaggcatggtgcgtatggctggtgtagaccgggagtggttacacagcatggcacatgcgctggcactggacacatggacgtggccaagagaggacgttcctggcctggggttgatcgacgggggcgtcgatctctcttaagggggtgagggtgtaacatcccggcctaggacttaataggattaatagaatatttatatcaacaagttgcaacttctttttcggaagccaatctccaaagaactccagggttaagcatgcttggcctggagcaatttgggatgggtgaccgaccgggaaattcttcccgggtgcacacgagtgagacacgagtgaggacaaagtgtgtagaaaagacatatgttggtctgtgagggcagtctatgacctatgaaagctatcagatgtaagtgggctcggcctgggggaaggcgggacattataattacatgcatgttagattgttatcattttgaactttgccaaaaaaattgggaagccaaaagttttagggatgcctcctaggagttgaatccccagatgaacagggttttcatcacaagaactctaagggcattagcagtgcgccacccatattgcggagcttgggactgtcacgtaggacgaagacacaagaagaataatacttgccacaagtttcacattgctatgtagcttcaaacggggtccacaca

SEQ ID NO: 16408 - DNA, 4705 bp, Oryza sativa
  unsure (1)..(4705): unsure at all n locations
agcgaaaatcaagaacgttgtaaacaacaaaggcatctctccctgcaggctgaagcacatatcgtccattcatgatcgggaaagcttcgaactgaaatatatagtgaaattcttttgttaggttagctgtgcagccatcagcgagatgccgacgctacgcacgtgtggctgcagccatcagacgatgatcgatggagtgagcggaaagcgaggcatcacctcgtaaagatccaggcaagaatctcttcaaatctaacttgcagcaaccagcaagaatcccgccgccacttgggtacagaaagctctcgctagatctcaacgtcaggctgggtgatcgaccggcgtggccaccctgtacacatagcggccgcatttgccaaatgccataggcattcggcagatcagggatccagtttctacttgacttaacttacctaattcttcagccttttttcttttactttctttctgacctactcctccttcctttgtctcgttttctttctgaacatcgccttccgcaattgtttaattgagagggccatggaagctcatggccgtggattggccaggttgcctccctaagtattctgctttagcaaatcatcacaagctaagtattctgctttggcaaatcatcacaagcactagttgatggtttcccagctgcatcaatcaccatcctagctttcttgcactagtgttaaatcacacgagcacttctgtacaatcttggcacttacttatatttttcaattataggaaaaggagaagcagataggaagatagtagtaatttatacttttatagtacaagggatttggagaaattcaaagagtccgctaacttgaaacaaaagaaatttggcgtctcaacgatgtttttagcgacattaggctgacataagagcctttgactaaaactagcctaggttcagcattcagatttgagagttcttgtccaattgtctgcatagctagagataattattctgatccttattgatacttccatgaatgaccagtgccaaagtttgattggtgaaacacctgtcgatcagctgttgatgagcggctaatgatttttttttcaaggaactgattgatcacatgtctgaattggcaaggaatacgtcgttatcaaaagttcagaacacagagatggcaaattggcttggcatgcaggcatggcgtggcacacgtgttcatacgacacacgtacgtaagcatggaaataattttacgatgcaaacgttaatggcatggctaatctgatggattattgtgcttgatctttgattctcttgtcgagcgagccttttgtgaattttgctgagtggagcaggaaacgtggatcggttattttggcgcgggacacatgctgagagtgaaacttacttaccacacacagttgatagtatctttacttctttaaaaaaaactttattaccggtgaatatgtcactcacatactcctataaaagattttacatattgcccccttaaacttcttaacattacataacgtgcttttacaatcaccatctgtccattctaatgtttctttgttgatatatattaaggaaagtaattcaaaaattaaaatatttttagtacattccccatttgggtttgtcggacccgtttcttgtcacaaactgtcacatatttcaaatctaaacacctttcgacccatgccgctatatataatttatactgcaatgtaatattgtccaatctatacaaagtaaattgcggtgcggcgaagattaattattaccccatggcaaaaggttattaaaaaatttatgtgctactctttttcgaataaggaaatttctatgctaatcctaaaatagagccagaagaacctcatgttggctgtcgaaggactatatttacctacatgtataaccacagtggatcctggttattaccatgttaatagaacataaaagaattacctacatgtttaaccagaatggatcatatgcattacagcgataaatatgctacaattgtataagaaatgcaattatatttatcaaaataaattaagagttctgtaagaaatacagatccttgtaattgatgagaaattcgatcaattctattcaaaatgttttttttaagaagaaataagttcatcggacatccctcaacttaacagcgagattttttgagatcccttaaccacaaactagaaatgtgtaccctaaactcatacaaaccgtgcactcaaggtccattggcagtatatatgggtggtttcgctgacgtggcatcctagtcagaaaaaaaaatacatgggacccacatgtcagctgcacatttttttcttctccttctcttctctcttctctcttctcttctcaagcgccggagtgcgtccggagtgtggcgtcgcctcgagcgccacgacaggaggagggaaaggggaagcaaccggcgggagatgggggaggggagaggtgcaacgatgtcacgccccgaactagccccgaacggaactagcccgtgacgctccaaattaacctgttaatcgataccagtcccaggaaacagtgctggtatcacaggaagacagaatatcacagcaacagtggtctctttattacagagtaggagtacagtcatgttgggctgcggacagatcccgagctcacaactgcattacaaaaggaaaagcggaagccaagacttggaccaatcatcacaggcgcgacttgggaactaggccgaaaccctaaaactcatcgtaaccgacttactcctggaagaactcctcgtcagcgggatccacatcatcttcttcagcaacttggggaggggttatttatatagagcaagggtgagtataggagtactcagcaagccatgggaattaagtgtttaatgcaggcttcaaggaaaggctgttgtttttgcaattgcttttatttaaactcctttttgaaacaactaagtgagtgcttctcaaacgacacggatgagacagtgcgtcacgcccggtcggagtatgtgcaatgtatcagtctttgaattgattcaaggttggcacccggccaacaactttcaaacggccacccgggcctggctgatcccatcagccgccgattttccaaacatcgaatccattccacagcagcaatttcacaaagtagtagtcaaacaaaactacgctaggaatcacctcacatccgcccatgaccgtggacacggctgttcgaacagtttaataacttctgcagagggggtgcactttacccacatgacattactaacccggatcatccagcccgtgcagaacggccacgtctagacaccttaaggctttcatgacaaggcatttcgaaagccgacacaggttcaccatatgccaacgagaggggtcccagaccaacaccagattaggtcccagaccaaacgttccaggaaaccctggggttctctccggcaccaccccgttgaatccacatatctcttggcatcatggttcccccaattagnagttactcagccaggggtgtcccattccacccatgtggtcgcacttgtcttatgttcggatgaaattccaaggaaacggtccttaagtgcaagagcgggaaaccatactcccggtacgttctccggtccgcgattttggaaattcatttagttcgcaagcaccgacccannnncgggttttccaagtcttttgtaaaacccaagttttacccatcgttggatattttaaattttgaggggggtgttccgatgcgcgtacccgaaggcccgtgcatcgaagcacaacagttgacaaaagaggtttaagtgttcaataattcaaggagggtaattgcagcaattaggattgggggccggcaggctatctcgcaagccgcggccgaattacttgtgtaaatcctattcatgcaatatttgcggaaaagaaatacttagatttaaattataggtgcaagatgatcaaaggtgacttgccttgctcgagaccttgagcttgatcctcgaaatcctcgcactgcgggtcttcgggctccgaaactacacgcgaaacgggacaactcaacaaatggcgaaaataaagctctattattgacctctaagcatgccattagatagatctcgagatttgaggaattttggaagttgaacggagtcaaacggacttacggttgggaagatattgaatttctaagattattggatttttgatctaaaggaaaaaggatttaattaaacccttttgaaaaataaaagaaagagggaggaggaacggacttcgcgggcggcttgagcgcggcccgagaggggttggcacggcccggccttgccattgggccggccggcctgaagggcggcccaagggggctcacggggaggggaggagagagggagccggtgggccgggtccaccttgcgtggtcccgggtgggactcgcttgtcggcggctcggctcaccgtgagcgaggtgcacgcggtgcgtgctagggtttgggaagggaacgcgcggtgcacgcgcggatcgcggtgggcgcggatgcggcgagcccacgcgcagcctcacggctcgcggtggaccgcgcgcgcaagcggggccgaggggagcggctaaccggggtcggcttgacctggtcgcgcccgaggtggcgccaacgtggcgccttcgtggcagccacgcgggccggcgagaggtagacga

SEQ ID NO: 16409 - DNA, 2330 bp, Oryza sativa
attagcttgttaatcgataccagtcccaggaaatagtgctggtatcacaggaagacagaatatcacagcaacagaggtctctttattatagagtagaggtacagtcatgttgggctgcggacagatcccgagctcacaactgcattacaaaagggaaacggaagccaggacttggaccaatcaacacagacgcgacttgggaactaggccgaaaccctaaaactcatcgtagctggcttgctcctagaagaactcctcatcaacaggatccgcttcatcttctacagcaactgagggggggatatttatatagagcaagggtgagtacgggagtactcagcacgccatgggaattaagtgtttaatgcaggcttcaaggaaaggctgttgtttttgcaattgattttatttgaactcttttctgaaagcaactaagtgagtgcttctcaaacgacacggttgagacagtgcgtctcgtccggtcggagtttgtgcaatgtatcagtctttagaattgatcaagatgggcacccggccaacaactttcaaacggccacccgggccaacaactttcaaacggccacccgggcctagctgatcccgtcagctgctgatttttcaaacatcgaacccctttctacaacagcaatttcacaagcagtagtcaaacaaaactacgctaggaatcacctcacatccgcccatgaccgtgggcacggctgttcgaacagtttgttaacctctgcagagggggtacactttacccacacgacattactaacccggatcacccagcccgtggcgatcagccacgtcgggagacctccaaactttcatgacaaggcatttccaaagccgacacaggtttaccatatgccgacgagaggggttccagaccaacaacaggttaggtcccagaccatactgtgccaggaagcccaggggtcctccccgacaccaccccggcgaatccacatgtctctcggcatcaaggctcccctgataagctagttactcagccaggggtgtcccattccacccatgtggtcgtacttgacttatgtttggatgaaattccaaggaatcggtccttaagtgcgagagcgggaaaccgtacacccggtacgttccccggtccgtggttttggaaattcatttagttcgcaagcaccgacccaggtgtcgggttttccaagtcttttgtaaaacccaagttttacccaagttgtttttcagattttaagtttgaaggcgtccgtcgatactcgcacagggtgcacgaatatcgagacgcatctagatggttacaaggggacatgatataacaattaacaaagggagcatcaatgcaacaaattaggtatgtccgccaaactgccttgcaaacgggacaacagattaagtgcgatcctatcagtgcataatatttttcaagcaacataattaaatttcaaatataggctcaagatgttcaaaggtggcttgccttgctcaagatctggagcttgatcctcgaaatcctcgcactgctggtcttcgggctccgaaactacacgcgaaacggatcaactcaacaaacggcgaaaataaagccctattaatgacctctaagcgtgccattagatagatctcgagatttgaggaattttggaagttgaacggagtcaaacggatttacggttgggaaggtattgaatttctaagattattggatttttggtctaaaggaaaaggatttaattaaatcctttttggaaaagaaaagaaaagaaaagaaaagaaaagagggagggaaaatagacttttctcgggcggctagggcgcggccgaagagaattggggcggtccggccgagctaaatgggccggccggcccaagacggtcgcgcgcgcgggagggaggagagagagccggtggaccgggctcaccgcgcgcggtcccgggtgggacccgcttgtcagcggctcggctcaccgtgcggagggagtatgcggcgcacgcgcgcaggcgggggagggacgcggtgcacgcgcacggtctgcggaggaacggatgcggcgggcccacgcgcagcctcacggctcgcggtggaacgcgcgcacgggaggggctgaccggggtcggcccgtcccgacctcggctgagctggcgccgacgtggcgcctatgtggctgccacgtgggctggcgggaggtagacgacgacgccgaccggaacggatggcggacaacagcggcgagcggcggagcgaaccacggcgataccggcgaaaacgagcacaccgggtggttgcacgagacgaggggagacgagccaacggctcggattcg

SEQ ID NO: 16410 - DNA, 2217 bp, Oryza sativa
  unsure (1)..(2217): unsure at all n locations
ggctagcgctcggcggtcgcggccaaagcggcaacagggaggagggaggtggatgacgccggcgggagggaaaaaggggaaaagaggaagagaaaagggggcttgtccccttgcctcttcgggaaaaggaggagggagagggggcgtcgcggcagagggaggagggaggctctgcctccgtcccttggaggctagcgcgggagtggtggggccgaggcgatgacaacggcgatgacggcggggcggtttggagcggcgcgacgtcacgggcgacaggcgcgggctggcgcggcagagggtgacggcggcggcgaccatgcggtcggccactcggcacgcgcgcgtgggaaacaatgggcggcgcggctgggcacgcgcgctggctcgcggggccgagcggctgcaggcgcggcagagcagcggggccgggcgacgcggacggcgcagacgacacggctcgggcggggaaccacgcgggcgcgcgcgcgaacgacggcgcgcgggggccgtcttcgcgagcgggaagctcgccagggagaggagaaggagagcgaggggaaggggcgctcggcgcggcgcttgcgcatgcgcgggcagagcgaggggaaagggagggggcgctcggcgcggcgctcgcgcacacgcgcgcgtggcgcgcgggcggggcggagcggagcggagggagaaggggagagggagcgcgccgggggaggggagggggcgagagagagagagagagagagagagggagagcgggagcgcgccgggggagagtagagggccgggggagaggggnagatgggccnngagaaagnnngncnatnnaccccgggggaggcaaaatagacttttgcggaggaatttgatttggaaagatttggattcggatttgaacttgacgatagatcggggattgagatcttgagatggcacggaccctagacgacaagcgaagaaacaaatttcgcaattagggtttttaagagataattttcccgctaggcgccacgacggaacgggcgctacaaatggcgggcgaaccacggcgatacaggcgaaagcgagcacaccgggtgcttgtacgagacgaggggagacgagtcaatggctcggattcgccggagggagttcgtcggtggaggattgcggcggcctccactagcggcgagagaagaggggaacgacgacgaggcgactagggttcgattcctccggactagagcatctacatgacctcgagattgcattcctagcaccggattgggcggagctacgccgagagaagctggcgacgagcggcggtttgcggcggcgagcggcaacggcggcgaggccgcgccgggcggtggcaaggttttgggcggcgcctgcgagcttctaggggtactacgagtgctaccacacaatctaaggggaggatgaggagcgaagagggagaacggaggagagctctaccgagacgggacggggcgctgtgacgagaggccgacggcacgggagtgatctctccggtctcgggccggggaagaagaagaagacgagctcccggagtccccttccgcgtccacgaacgcgccggctcctccggcacgcgtggcaacgtaaggcggcggcgaacagagcacgggaggcggcgacaatggagtggaggcgatgggacaaacaagaggagaaggaagggagggcgcctgggctttataggatggcaatgtcgattcggaaaccaaccttgggtggtcaaggagcgagctggcgctccgacgctcgcggccaaaatggcggcagagggcatgacgccggcgggaagagaaaagggaaaaaagagggaagaaaggggggcttgccccttgctactttgggaaaagcaggagggagagagagaacgatggggcagtgggaggagggctctgcctccatcccttggaagcttgcgcggaggtggtggggccgggtcgtgacgacggcaatgacggcgggggcggtgtggagcggagcggcgacacgggcggcaggcgcgggcaggcgcggcaggcgctgatggcggcggcgaccaggcgatcggccaccacggtgcgtgcgcgtgggaagcaacggtgcgcggcgatttgagcggcggtggcgggaagcggcagcgagagcggagagggagggcgcttggctcgacgccgctcacgcgcacgcgcgcgcggcgcacgggcagagcgagggagagagaga

SEQ ID NO: 16411 - DNA, 2194 bp, Oryza sativa
cggcttcccattgacataatcatttatatacaatggcttaagatgccgattctctgccccctctggcttctcaaaaaccgcttgctctggcgacaaaatcaatttagccgattcttcttcaacttcatcaacatcggcttgcttgctcccaaactcagccggcaatgtgaaaaccatgttaatcgaagcagttacgacacttttcccttagctaacctttttgcctcatcggctgcggcctcatcggctgcaggaacctgattattaacacgccactcctacctcggctttggtttcttcagccgatggttaatttcctgtttcttgttcaacctcctgaaagcgctccctgttcctcaatctttgaacccttcttttctgattcttcatgaaaataccagaaggacaccactgatttttcctgatttcattgtcctcttggtcatgatcttgattcactggacccaatctttgatgaacaggaactcttgtctgccttagccgactacccctaccatatgatcggcttgaattctcggcaatatcactgcacccaggacagtcttcaatagaaggcagcctcatactttcattccaacaaaatctaaaaaactcgcaactccaatgaggatcaaagccatcatcgtctgctttataatgcttccctactgcttgtcatacttcctctgatatttgttgataatcttagccgaattcatctgaaaaccccttacacggcccctatcggctgtttggccagctgtatgcaccatattaacaggaaaaggattgccatcaaccttcatcggcctcttagagtcgtcaaacttaattttgccctcttcaatagcctcttggatttgctgcctgaagaccttgcaatcattagtcatatgagacccagagttgtgccacttgcaataccttttcttgcccaattcttcagccgatggaattatgtgatcgggaggaaattgaatctgcttctctcgaagtaacaagtcaaaaatcttatcggccttggttatgtcaaagtcatatctctcttcttttccagaactctttacccattggcacgatatgacctttttactcctcacccattcggctgcagctatttcagagtcatcctcatcatcatcatccgacccatatatgtaaggacaaacatgattaaccttcttagagcttttcctagcttccacagacctatgctcgtgcaaggttaccttctgtatcagatatgacaagctatcaaagtcttcagacgagaatttctccttaatcggagcaatcataccctgaaaggccagatcggctaactgggcgtcagttaaactcaagctgaagcatttgttcctcatctccctgaatctctgaatatactcgtgcacaggttcatcatgccactgcttaatcaccgtcaagtcagataatttcatctcatgaaccccactgtagaaatagctgtggaattgcttctccaaatcggcccaactattgatcgacccatacgacaaagaggaaaaccaagaaaaagccgatctagacaaagataactggaacaacctaaccctcagagcgtccacagccgatgcttcaccacactaagctaaaaatcggctaatgtgctcataagttgacacaccatcttgtcctgaaaatttggagaagtctggaactttgaaccgattgggaagaggaactctctcgaaccactcagggtaaggctgccgatacaagtttccagtctcttttggtttaagcccaaattgttccctcattacgtcggcaatcacatcggcccacagtcgttgctgaactgctccctgtgactgttgttgcatgggttagaactgaccgtactaagacgcaaactagggttgagccaatccccctggctgatattgggcttgcggggaaggaggctgatattgataattcaagttgcccccctggtaattatgaaggttcggctgaatattatgtgccaagtgctcgggaacaacttgaggcattactatgccatctggctgtacatggtgaaccaagtgttctgggacaacttgatttaaaaattgttgtacaggctgtccaccaggcgtcgcaaacccggccgatgcgctcatcgagccttggtgctgaatcggctgaacgatttgctgttttaacggcgtctgctgaatcggtcgcg

SEQ ID NO: 16412 - DNA, 4319 bp, Oryza sativa
  unsure (1)..(4319): unsure at all n locations
atgctgtggctgctctcttattaacaaccgagggttcaccagctggcctggtgccaacgctgacggagcagataggggagtcgatgcaggcgccgtcggctgagctgatggtgcaatggggggaactgcctgaatagatggttgagcttcagtgatcaaaggccgataatttggaaagacacctccttgcaaataaactgggcctgcagcctgatgctcacctattgaaccatcggctattgatttcatcatgtttgataaggtattaactagcaccccagactgattgatcaaagcatggtgcacagcatagtcgacccgatcctggaagttattaaaaaattcctgtgatgcatttccatcctgattaaaatttcctccctgcaacccctgagccatcactttgaactccatgcgccccatcaccttgaaccccatggactacctgagaattgtcaccttgacctcctagagaaccgtctgtagcacctttgtcactcggttgagctgagccgtccggagcttgtttcccgtgttcacctttagaagaactggtcccaggatcatcggcaactacctttactttatacttctgaaccaatgttcccttgcgagtctgcatgaatgagttcaagaactgatcccgtgcctgctgcatcatcgcgtcgaaatctttcttctgatcaggtgtgaatttttctggttcaatgggcacgacgtttccttcattgacgtccgtcaatcccaacttctggatcttttccttaacagtgcctggactagcctgggatggcgacagcggtggtttctcaaccatgaggaagaattgcttgctgacttcttatctgtcccactgggcgtgccaaatgcgtgttgacgtaaaacacgaggcctgggagatctgcttaactccattgcaggtccaaagctcaccttcaggtgtgttagcgtgccagttgatttgatcctgcaatcaacaagaaatagaaacaaagagatcgcagttaaatctataaatgattgctgatcggctaagtgccgatgacatatcatttatctttgagtcgatgttatatgtgaatcgatcggcgagtataaatagataataaagaactaaacctactcgatcggctgtagatattaccaatatatagttcttatatcgatatatatttaaatcaagtgattgggatagatcggtcgccatgccaagatagtaaaaatcacttggatcgaaatatatattaataacaggactatatatgtttatagcatagccgatcatatagatctagcatgtattggctaatactccgatactactctatatcaggatattaaaacaagtataatatatcaaacaaaagcttaatatacttaaatgcaataagatcttgacagaaagggcggatttaacatgtcacttaagcatatagagcgaatatggttaaatcagataagatcggctgaaactccgatactaccctaatcggcaaccagaaggcaggctagagattgatattctaagcacgacttaatagatcaaactcaactgatgcagcattaagtatgaaaagaagaacaatatctagacaatcaagccgttggaagtttcatagagtggtggatatcttatataatctaaatcaacatcaaaatctaacctaatcggctgccctctactaacagatgttagccgattgtaggttagataatgatattgccagagattatgtacgatatatgataactcgacgaattacgtaaacaagattagagtatcataaagatggaagcactaatcccgataacacaagccatcataacaagttttacctcttgttgaagatcaaaaccgatgcagctcaacccaaaagtaagaactcgtcgaaataaaactaaagcaaaaaggtggcgatgcgccgaaattgtattgaacattgtgtgtttaattacatagggctcggagtctatttatacccgagaattacaagatatgtccataccggacacgactattatctctaacaaactctaagataccacaagtctttacgacagacttttgcctaagcatatctctgagaaaattacataaaatgtcctaattaatagatacaattgccttcccaggactctatccatgcgtggcaatcatcttgaagcacctcaactcaacccgatgtcgtacaccaagtcgtattgttggaatcggctgtatcacctaaccaagtctgactctaacttagccgatccaatcgtagccgatccggacttcagccgattcttactctgtttccgcgacaatcttcatcttcgaccccgcttcaatctaatcttcatctccgatacagatattaccaaatttgatcgttaccaacgggctactcccttagcagttgcctggcgttgctagcgagcttgttgttggtggcgagcagcattttctgcccgaaggctctgcttcccttgatcacgttcggtgagccatcagtgttctgcagcaggcagcgcgtggtggccgggcttggcgtcggtgagggccatgttctatccgtggtaaattggccccatgcattctcctagcattaccttgccatgccgtcgctctcctcaagcgcctcaacggcgtgctccgcaaccatccttgcctcaacaaccaaccgagccacgtcatcgccaccattgcgtagctagttgtacttgtaaccatagttgtggtctactgccattgcgccatgtgtgagttggttagagttcgcgtgcagcggctgcggcacggttgtgagtgatgctaggctcggaggcgacctcgaggctgtttatgctcgacgcctacctcctccacctcctcatcccggcctcctcctcgtctcatgtgccgatgtcggccatcgcacacgagatacatgcacgtgctggttagcatgtgtttgccgctatcgctgtctcccttcgtgtgtggacaggcggtcgagcgcgagctcgctcggggctcctcctgagtcctgactgtcgtcgccattgttttccttcacgcgcggatgggtggacatacgggatgaggaggaaactgattttttttttttgttttttccccttattacttatagtctttttggcatggctctagctccagctccacctctactgaatctatagtctagccaaatagtttcagctccatctggatggaatattgtcacaaaataaactagatatgtgaagctgagtttgggctctccataactccactctagacccaactcctgaagttaaatttaggagttggagctttaccaaatgatccctaaatatgtggtcatatgcgtatttttttttatttctttgatttgatgactaggtggcacgtaggcgccaagtcagcaaaaactaccgtcaatactaataccaccgaggaagtcattttgcaaggttttaagtattagaggggtagatatacccagttttgcggataaggaatatgaagcatatttagattatggagtatttgagggagtcgtattgcacttttccgcatgtgaagcacaacacgttcacgggccgaacgcgtggcccattagatccaccctgagttggggcttagagaattcgcagtctactttctagaatcggcctgttccttttccattgattttcacagtctttcttgtttttttttcctcttaacaaaaatcccaatcccacaaatatcaatcaatagctttgcggcgacgcccttcctcgcgcggcctttttttaagcttatctctatcactcgctcttnnnccacgcctcatccgccatggccgcctccttcctccgccctctcctccccccgaaacccttcctctccgccactcctaaaccccacatccccgccgctacccccagtgccatcgtgcgctgcaccgcggcgcccaagccggccaccggctctatcgccaagcccagccaagaagaggccaacaacaaccaggagcaagaacccaacgccgccgccgccgccactccggacgaggccggcgccaacccgcaccgcatccccgacgacgagaccccgccgtctgcgacggcgaccacgtcgttcgccgtggcgcggcgcgtgccgtcggccatctcccccgaccgccggcgccggacggcgctgacgcagggggagccgccgaactacgagatcgggtggaagcgcaccaagaagctgccgctggagaagcccaaggggtgggccatcgcggacttcatggagaagctggaggggctgatggcgcgcgggcggtacgggtccggggagctgctgggcacagtggccggcgtgg

SEQ ID NO: 16413 - DNA, 696 bp, Oryza sativa
actgctaccagttgtaataaggggtatccttccagacaatgtccgggcaacaataacaaagctatgtgcattcatgaatgcaatttcgcagaaggtcatcgatccggatagattagaagcccttcagaatgaagtggtgcaatgtctcgtcagttttgagttgatatttccaccttcatttttcaatataatgacgcatctgctttgtcaccttgtgaaagagatccgtattctcgggcctatgtacctacacaacatgtttcctttcgagaggtacatgggcgttctgaagaagtatgttcgtaaccgtgctcgtccagaggcaagcatcgccaagggttatggaacagaggaggtcatcgaattttgcgtagaatttatcgaagaccttcgcccaatcggggtacctgaatcacgccatgaagggagactacggggaaagggaactctcggaaggaaagcaataacgacggtagacaacaatttattccgtaaagcccatttcactgttctgcaacactcttcattggtagctccttacatcgaggagcacttggctctagttcgcgccaggaacatcggtaagtccgatgcatggattacacggcatcacattgatacttttcccgcgtggctgcgacaacatgtgatgggtgacgagtcaatgaaccaacaacttgccttcctggcgagggg

SEQ ID NO: 16414 - DNA, 4808 bp, Oryza sativa
aaagcagcatttagcaaacatttgagaatttgataaaacagttaagtaattaaacaatattaatccaacgctatacaacataccctgttgtataggcccaaccattctgaacaaccatcccggctgcacagttctatctccaaaccaggaatgtaccattccaaaccaggagctaaacaaattattaccagattaagcatcttttattatgatgagaggtgtgagactaatcacgaaagacattgttagacccgcccataaccgcgggcacggctattcgaatagttttactctggccagaggtgtaccactgtacccacaagacacaaccccacatcatgtcaccatgtgcctcaataccaccacggtatctcggaaaggagttgtgacaatacccctcgcataacacaatccattgcagcgcaccttcctggatcataatcacccccttataaacaaggcatggactccccagcgacccccgtgggcttatctccgccacttctcagtctggtgccccgcaatgaaccatgctatacaaaagataaagccgttgcccatgctggcttgtggttggcacgataaatgtttcacaaccgaaactcgtgaaccggtccttaattgtcatgagcacgaccatcaaaaccatgtgctcacaaccaaccattaccaggttttagttggcacattaattaattaactaatcacgattgaccatcgtgaactatcaataagccatcatgaaataatagtgaatcattagttatcccataagtgtactaatgtttctaagcagggctaagcaattatatctaatatctagttgaaccaatataaataaagctcaactagtcaaattgtaataacccaaggtatcaaggaataaggtaatcaatgtacaaaagggccataacaaagaataggtcaattccacccaatgacattcgaaaatagatgcaatagttgaatagaaacaatagctttaaataggatcaacatgctcaaagggttgtttgggatctgtgtgacttgccttgctggccttggaactcttcaaactcttcttctgcgaaaacggactctccggaaacgacggaatctaagcaaaaagaagcaaaatcaccaaaacagcacataaacaagcatgaacagtacatgtggatatttttaatgtgtagatctcaattttagaaaaattagagacttgaaccaactaaatcggagctaagatgaattagttatgaatttttaaagattaaatcggattaaaacacttaaatcggtttaaattgaattatgacgcaataatgaattatttttgaaaaggaaaaggggatttattgcgtcagcgggctagggtttggtggaccggcgcacgggcggcggttcacacgaacggacggctgagattgttccgatccaaatcggacggccgagatcgatcggtccacgaccggctcacgggagaggatcccgatgacgtcaacgatgacatcaccaacgacggcggcggctcggcgaagaagacggctcgggcggcggacactcgccggcgaacggcggcaccacggcaccaacggagggcaccagcacgtagaggacaacgcggcgaacacaccggtgaccaaaacggcggcggagaaggaacggacgacgacggcgacgagaaggaacgggttccgacggctgcgaaggggcggacgaggacggcggcgacttggttagggtttagggtttagggtttagggtttagggtttagggctaccttcgggttgtcgacggcgacgaagctccggcgggttccgacggctgcaaaggggcggacgaggacggcggcgacttggcgatgacgacggcggtcttcccgagcggcggcgacagctggagcgacggcggagcacggctgaagcggcggcggcgaaggcaaagctagggcacacggcgctagggctactccggcgacgagaggcgaaggcgagggtggcgacgggtagaggagacaccgggggtccttttaaaggggctcggaggcggcggcgaaggcccacggcgacggcaacggcgaaggaaaccttcggcttggagagagggaaaaccgatccgaatcgaactcgattccaaagctttccaaagcgatttaaccaaagattccaaaggagaaaaggtagaggagatcccggagatcatttcccctctattgattcggccggagaaggaaaggaacggccggatttggaaagcggcggcgacggcagctcggcggcgcgaaactagggtttcggcccgaggaagacgacgactgacaagcgggacccacctgtcagcgacagcgagggcgcgcgcgcggctgcggactgggccggactgggccgaggagagagagaacggttttgggccgactttcggcccaaagccaaaagaagactttttaaaacctttttcaattaaaattatttcttaaatgcaattccatttattaaaaatactttcttaactcaaataaatcccagaaaaatctaggaattatagaattaagcaaagtatttaatgaaattttatctggcccaattttatattggaatttattaattaaacttagattttcttttcaagacttttaaaataaattctagaaattccatttaaacaacaatttatatattttgaattttcagggtgtgacaaacctaccccccttaaacagaatctcgtcctcgagattcggaagaactggcgaacagatgcggatgagctgacttcaattcatcttctcgttcccaagttgattcttcttccgagtgattactccattggactttgcaaaaacggataactcgattcctggttcttctctcacttgtttccaggatacggattggtttctcaacataagtcaaatcttcttggacttctatctgctcaatattagcttcttcggtaggtacccttaaacactttttcaattgcgacacatggaacacattatgtactcctgccaaagattgaggtaactccaactgataagcaacctctcctcttctactgacaatcttataaggtcccacaaaacgcggtgccaattttcctttggtacgaaaacgatgaactcctcgaaaaggcgtgacacgaagatacacataatctccctcttcaaaactcaaatctctgcggcgattgtcggcataactcttatgacgagactgagccacacgcaatctttcttgaatgatctttaccttttcttctgcttcccttaggatatccgttccgaaaacctgacgttctcccgtttgatcccacaaaagcggagtgcggcacttccgaccatacagtgcttcgtacggagccatctgtagactagcttgataactgttgttgtacgaaaattctgcatagggtagattcttatcccaacttccaccgaaatctagagcacaagctctcaacatgtcttccaaaatttgattcaccctttcggtttgtccatctgtctgcggatgataagcagtactaaagttcagcttagaacccatctcttcctgaagtttcttccaaaaatttgaagtaaactgactgcctcgatcagacactatcttcttagggacgccatgcaaacacacaatccttgccatatacaattctgctaagcgacttccggaataagttgtctttaccggaatgaaatgagccactttggtaagtctgtcgactatcacccaaatagagtcatggcctgatgacgttctgggtaaaccagtaataaaatccataccaatttcttcccatttccattcaggaatcttcaaaggttgcaacaaaccggcgggtttctgatgttctgccttgactcgctgacaaacatcacatactgctacgtattctgcgatttcacgcttcatacttgcccaccaaaatctttccttaagatcctggtacatcttagtactaccaggatgaatggagtataaagtatcatgagcttctttcagaattgcatcctttaaatctttgttgtcggggacacagattctctcacccaaccatacagttccgtgctcatcctccaagaaaccaatagcttttcctcttctcatattcttcttgatcttttgaatatcaggatcattaatttgggcttctctaacttgatcaattagagtgggcttcgcttctaaggctgcaacgaaacctctaccgacaattcccaaatttaatctttcaaattccttgcataattccaatggcaactgtcgtccttctgtagcattgcaatagccttttctgctaagagcgtctgctacaacattagcctttcccggatgataatgaattcccatgtcataatccttaattaattccaaccatctccgttgtctcatgttcagatccggctgagtaaagatatactttaaactcttgtgatcggtgtacacttctgtacgagtaccgaaaagataatgacgccaaatcttcaatgcatgaacgactgcagctaactcaatatcatgagtagggtagttcttctcatgcggacgtaactgtcgagaggcataggcaaccaccttcccatcttgcatcagaacacaacctaacccaagtttggatgcatcacaatacacttgaaaacccttctttggatcaggcaaaatcaaaataggagcggatattaagcgacttttcaactcttgaaaactccgctcacattcttccgaccacttgtacttcacatctttctgaagcagtcgtgtcatgggcttagcaatcttggaaaaattctctataaacctccgataatatcctgcaaggc

SEQ ID NO: 16415 - DNA, 2359 bp, Oryza sativa
cctggaaattttatcgtactagatgcatatgctagtttgtccaccattttcctgatgcttcttattcataccactcttggatacacagtggaactcaatctattgttcacgccttctgtaatcgtattcagctccatcctttttctgttgcatggcttgcaattttgtgatggatactaagtgagcagtgacattgtctttcaatggtaaagttacactcatcgatcaaaagatgggatgatggatatacataaggatattatccatttcacaaccatgtctttttccacattccgagatcaacccaaaacaacaaaataagacatgcgtgttacagtaacaacttcgacttcaaaacgttactttataccttgcacatcaaaaccacttagtgtaaaagaagagacttgaatattttttttaaaaaaaagtaaaaaacatacaaaaaaacagttagaaatatatatatactgtctggagttagaatatcttttgagttgagggtaaaaattatttacgcatcatcccatcttcgtactagatttttgaagttgtagctagctgttgatctctatgcttcacaaactatactatcttgtactatgttgtaactgcatagttttattcttttatttcaacttgtggtgttaaatgtaggtaaatcgtgaattttgcagcttaaaagaaacatattttttttgcatttaacgaaaattagtacatgaagtattccacagtttgggtgagttcctttcactcaaacagagccaagagtagagattcagatcagctgcaagactaacattgctgaaagttagcacacatgtactgttcactacttaaaaaataatttttcccgacacttggattttattttttcaagtggactaaaaatattctcgcttgtgaaaatatcagaagttctataggtctagccccaactgaaaaaaataatcaatttatacaagtgggatctaaagaagtttgcctgtgaaaatacccttcattttcgcaggtagacctccttagcctccacgtgcaaaaatcaatggcagtcgggacctaaagaggcccgccagcaaagcgtggaggcacttttttatccagcatcgccagccaccgacaagcaatccttctccctcacctacgccctccctcactcaatctccctcacacctctactagggcttcgatccccatccctctccgtccagcctccaggccacttggcgatagcgggcaaggcactacgttcagcggcattagcggaagcagggaagggatgacgttcggtggcatcagcggcggctacaagcgcggttggcggcaacgggctggaggagatgagaggtcgctagtggaagctggcaggctcgggatgcaacagcgacatcgacggcgatgatggcgaccccaccattgacgacgactacgtacgagctcgggggaggcggatccactcagtggccagcttgggagaggggtgtatgactatagcaaggttggaagaggcagatccatcgccgacggccttggatccgccattgccgagctatgtagtgtcggacccaccgttgccgagctcgggagggggtggatccaccaccagcagctcgggagttggggtgcatcgtctacagcgaaggggagtggcgatggctgtggaggccttggattggcatgaacatactagaaatctgctggtcagaccgcctgatggttgtcagttggaccgacatgagactcccagccgaccgactcctaatcgacggtcagggtgtccggtaagattataaggtgtccagttagaccgttgttcaaatttagatcaatttagtactagtgcctaattggctatctaaagatacattattgcatatgagatctagttgatatgatgcatatttgtttctcgttttttaacatttctaccacgggatagcaaaatttccaagatttcagattttttggaatattttttaaaaaattgaacaaactttagcctaagttgaataacttttaccaaattcacacaaaaattgaaaactttgggcaaaatagtttcgttcacgcgggggaggggtgttcccgatattgcaggaattggaagtgaaattgcatgcataggttataattatgaactgaacatatgcaggtagcctcacatttctttcatcacaaaaattcttaaaaaaacattctgtagatcttgaatgtcaagcgtggaaacatcgtgtcctccacagtttaccatgtgccagagcaacattcatccaactgaaaccataagcttgcaaggtcaaattttcctggatgcctccttgtccgatcaaactgagatatacatgcggaacttgat

SEQ ID NO: 16416 - DNA, 570 bp, Oryza sativa
gaattatagaattaagcaaagtatttaatgaaattttatctggcccaattttatattggaatttattaattaaacttagattttcttttcaagacttttaaaataaattctagaaattccatttaaacaacaatttatatattttgaattttcagggtgtgacagggaccgtctgggtcgatcacgacattccagggatatgagatcaatgggtacacattctacacgagagcccaagacatgaagagcacgaaccaaaacagcgctgttcgtgtcgatgccatgggacacgatggaacaactgccacgtattacggtgccatcgaggacatatgggaacttgactatggtcctctcaaggttcctctgttccggtgccaatgggttaggttgactggtggaggcgtaatgattgatgacagtgggatgacaactgttgaccttaacaaggttggatactcggacgaaccttttgtccttgccaatgatgtaacgcaagtctttttcgtgaaaggacatgtctagcaaaggaaagaatggcatagggcctgatgagcctaagcgtcaagt

SEQ ID NO: 16417 - DNA, 1263 bp, Oryza sativa
agacgtgttgtcggagtcgtccgtcaagcctgagtggaagagctagccctagaaggaattggagcaggcaagtgacgtaataatataaatgattgttatatttgtaatgcaattaattaagattattagacctgtaattggacttatcatataagattgtgtagtgttctaatattatttgagttttaatataagattactttatttgtaattagacttagtatgtaattattgactacggaattggggcgacaagtagcaattgactattgtagtcttaattagacttagcatatacgcacgaaacacttagcatatactgactattgtagtcttagcatgtaatattatttgagttttaatataagattattttatttgtaattagacttagtatataattatttactagctagggttgtacaatatacgtcacctagacttagcttatatcacgatttgtaattagacttagcacgtaaggttgtgtagggttctaatgtacgacatttacacttagcatacatgacttagattgttaaaacataaatgtctcgtgacttagcagatgtttcttgtatcaacagatggctgaccgcgatgaggaacagatattgtacgacacaatcgcggagggaagcagccagtactggaatgaagaagaggggaacgaggatccaaaccagtacttgaacgaggaaggaaacgtggagagggatgcggaggggaaccagcaggggcacgtggaaagggatgtggaggggaaccaggaggaggaggctagtggtagtcaaccctccgttggacagaagagggcacgcgggcaacgaggtgcagcgaagaagcttgagggtcgacacatcataacggaagtgcaagaagatggacgtcctagtgccccggccgaagccgccaagaactatgtacgtcacagcggttgggttgtgcgggataacgtgcctgtcagtacggtgtactggcgaagaacaagggcacgcggagatcatgagagctttgtcccagattcggagaaagagatgctgtggaccacaatgctcgagacattcacccttcctgcgggtacagaggacaaagtgaaaaggtggactctgaagaaaatggcagaacagtttcagagcttcaagggagatctgtaccagaagtatatactgaaggggcagacaccgaacttcgacacattcccaaagctaagggatcactgggacgagttcgttgcatataagacaggtgaacaagggcagg

SEQ ID NO: 16418 - DNA, 1319 bp, Oryza sativa
agcggtttaccgagttcgtacatgtatttcacttccgccttttcgattggtgcgactcctagcaattgatccgtagttagaccggtgtcagtaataaattgttctatcgtcatttctttaccggtaaccaacggctcgatctcctggtttggttgctctccaagctgagggactggtttggactttccagaagatgctttcttcagcgttcgctcatagtccgatagcttgatggcctccttgacagatgcagacatacccctgaagaagttcctgacactggggtctataggaatcttcttttctggacttcgaggcttgaattgtctcttgacttctgatgcaacgtaagcgtcaagctcctcttgcgtgcaatcgtaccccgggtccttgttcttggcggcgtcaactttcgccttcttcgttgcccttgtgtgggcaggcggtggagctggggggcccttgagtttgaaggtgccggaagaggagcttgcgggggagtaggtgtaggagcacgaggaggagtcggtgcaggatcctgaggaggagtcgatgctggagcctgaggtggagacggtgctggcggagcatgaggaggagacggtgcaggatcctgaggaggagatggcggagccggaggagatggtgcatcgagtacgtccgttttttgtccgctccagggtaggatgatgtaccgcctgcgccatagaataatggcatggcttgtgtctcgtagatgcgtctcaccgtctcctccagggtaatccagctcggaggctcccatcggtgacgtcgccccttgcggactcatacgtgcagacctgtgcggaacgctatgcggaggtaattcctgctggaatcggcctgcagtggtaagtacctgaagggtccgttgggatggccatgcccgacgccaccttcatgttgtgagagattatttattagtaatcaacatatataagcagcaactagcggaatggctaaatcttacctttattgataagttcttgaaaggaatatgcagctcacatggtgtccgctgagtgatgtcatcaacgggacatgtcgattcgtcctgtgtttgcatggcgtccatgctctgtgatcctacctgccccgttgaggcgcagctgctacggtttcctgacgggctcaccattgcaggaggaatggtcggctggggatcatgggaccgatgtgcggacatgcgttcatcaaccttccttgccacctcctcttgcatgttgagttcgtagctcgatacccggaactctaggtctgcaatcttcgcctcggtatctctcttgctcctcatccga

SEQ ID NO: 16419 - DNA, 781 bp, Oryza sativa
ctagcatcctcctatcaaatgaagacaccccttactcacgcagcgatcacaaggagggaacaatagtaaggagaaagtacgtgcggtcaaccgtcaccgccgatgtaatgccgtaattattgtgtacacgatgtaaactattttggatgtattgattatccatataaatcaattgatgtatggcatatgttaattacgcacgattattagaggtttcaacaagtttaaatcatgtatatgctagttatatgtgatacttacaatttttaaaagttttaaatcacacaggtggcaatttcatatgtatgttaattagagtttttaacatttaatttactagcattcatatgctaattataattgactagaggatttttaaaagttttaaatcacgcaagtggcaatttcatatgttaattagagtttttaacatttaatttactatcattcatatgctaattataattgactggagaatttttaaaagtattaaatttaatatatttttaaaactatcattcatatattagagtttttcacaatttaatttactatctttcatatgctacttatatatgactattcgaatttttaaaaggtttaaatcatgcatgtggcatttacatatgttaattagagtttttagcatttaatttaatataattcctacgctaagtatatatgatgattacaatttttattaattttaaatcatgcagtatgtacatacatatcttaattagagtttttaccaatataattacatcattcatatatatgc

SEQ ID NO: 16420 - DNA, 6495 bp, Oryza sativa
ttgccttgggcgacggcccatccaagaccacacggatcggtggtcttctggatggcaaataggaagacgcgctcgtctccttcctgcgggcaaacgctgacgtcttcgcatggaaaccagcggacatgcccggggtccccagggaggtgattgagcaccgtctcgccgtgcggccgggcgcaaggccggtccggcagaaagtgcggcggcaggccccggaacgtcaagccttcatccgcgaggaggtggcaagacttctggaggccggattcatccgtgaagtcatccatccggagtggctggcaaacccggtggtcgttcccaaggcgaacggcaagcttcggatgtgcatcgactacaccgaccttaacaaggcatgtcctaaggatccttaccccctgcctcgcatagatcagatagtcgactccactgcggggtgcgaccttttgtgttttctagatgcatactctggttaccatcagattcgcatggctagggaggatgaggagaaaactgcgttcattacccccgtaggaacttattgttatacgtcaatgcccttcgggttaaagaatgcaggtcctacttttcagcgtactactcgaatttctttgggtagccaaataggacgtaatgttgaggcttatgtcgatgacttggttgtaaaaacgcgcgaccaagaaactttactttcagatttagcggaaacttttgagaacctccgctccgcccgcataaagctgaaccccgataagtgtgtgtttggtgtgcctgcgggcaagcttctcgggttcttggtctcagcccgaggcattgaggccaaccccgagaagattcgagctatcgagcggatgcgcccccccagcaaacttagggatgtgcaatgcgtcactggttgcatggccgccctaagtcgttttatatcaaggctgggagagaaggcgctacccttgtttaagctcctcaagcgctcggggccgttcacttggacggaggaagctgaacatgcccttactcagttaaaggcgtatcttagctctcccccggttctagtcgccccggagccaaatgagtccctgttactttacttagcagcgaccccccaagtagttagtgcagcgttggttgtggagcgcgatgaggacaatccccattctgcgcacccccactctatgccgacttggcccgggagcaggcagggaggagaggcccccgagtcgaacggtggcctaaggcccccgacgaccggagtcggccctctgcccgcttgtcagacggtgccgggtgcccccgaccctcaggaaggccccgaggccactgtgggaaggccgcacctaccaccctttgaccccgaggctacccctgtgctgattcaacccgggagagagcagggagaagaggcccccgagccgaacggaggcctgaggcccctgacgaccggagctggccctttgcccgcgtgtctgacgacgccaggagcccccgaccctcaggatggccccgaggccactgtgggaaggccgcacctgtcatcttcggaccccgaggtcatcagcacaggagacgagtgtgccccgagaggtcacttggacaaagagcaccccggggatacggcccctagcgaagaggatcggccccgccgaagggtgcagcggcctgtttactttgttagtgaggcccttcgggacgccaaaacccgataccctcaggcccagaagatgctttacgctattcgggtcactgtggttacgtcttaccccctcgggcaaatcttgcataatcgagagggtacacgacgggtggtaaaatgggcaatcgagctttctgaattcgacctgcactttgaaccacgccacgctatcaagagccaggccctcgccgattttgtggcagagtggaccccggctccagagaccgtctcaatccccgaggccagcacgaacccctcgcagctgcctcacaccacctactgggtgatgcagttcgatggttctctgtccctccagggtgccggtgcgggggtcacgttgacctctccgaacggagacgtcctcagatacttggtccgtctcgactttcgagcgactaacaatatggcagagtacgagggactccttgccggactcagagtggcagctggactggggatccgccgcctcttggtattaggcgactcccagctagtcgttaaccaggtctgtaaggagtaccggtgctctgacccacagatggacgcctacgtacgccaagtgcggcgtatggagcgccatttcgatgggatagaacttcggcatgtacccagaagggataacatagttgccgatgaactctcaaggctcgcgtcctcgcgagcccagaccccaccgggcgcctttgaagaaaggcttacccagccgtcggcgcgacccgaccccttaggggagacggatgcgcctgaccggcccccgaggcccgtcggagtccaggcctcgggacccgaagggagcgctccaagctcccttagattgattgcttggatctctgagatccaaacatacctcacagataagactctacccgaggaccgcgaagggagtgaacgtgtacaacgcatttccaaacgctacgtgctggtagaagggaccctctatcggcgcgcggctaacggaatcctcctgaaatgcattcctcaggaacaaggcgttgagcttcttgccgatatccatgaaggcgaatgcggagcccattccgcctcgcgcaccctggttggcaaggcctttcgtcaaggattttattggccgacagctctcaatgatgcagtcgatctggtccggcgatgcagagcgtgtcagttccacgccaagcaaatccatcagccggcccaggccctgcagatcataccactgtcatggccatttgctgtctgggggcttgatatcctgggaccgttcaaacgggccccgggcgggtttgagtatctgtatgttgcgatcgacaagttcactaagtggcccgaggcttatccggttatcaagatcgataagcactctgctcttaaattcattaagggcatcacggcccgttttggagtgcctaaccgtattattacggataatggcacccaattcactagtgaactcttcggcgactactgcgaagacatgggcatcaagctctgcttcgcctcacctgcccaccccagaagcaatggccaagtggagcgcgccaatgcagaaatcctcaaaggccttaaaaccaagaccttcaatattctcaagaagcacggcgattcatggatcgaggagttgccagcggtgctctgggcaaaccgaaccacaccaagccgagcgaccggggaaacgcctttcttcctcgtctacggcgcagaagcggttctcccatccgagctcaccctgaggtctcctcgggccaccatgtactgcgaggctgatcaagatcagcttcgcagagatgacctcgactacttagaagagcgaaggcggcgcgcggccctccgagccgcgcgctaccagcagagcttgcggcgctaccatcagcgccacgtccgggcccgatcactctgcgtcgacgacctcgtcctacgccgcgtccaaacgcgtgctggattgagcaaactctcaccaatgtgggagggtccgtatcgagtgatcggtgtcccccggccgggctcggtacggctggccacgggcgacggcacggagctgcctaacccatggaacatcgaacaccttcgtcgcttctacccctgaggaggggggggggtcgggtgtcaggttttggctcaggccaaccccgcacccccctcgggtgtgcaggattggccgggggctaccacacatgcacatatatccctttttcctttatttcagcatttcaataaaagcagtttcaattttctaaaggttgtgtctgtgccgttttttccttttgaagaatcttgacttaaaataaggtcactcgtactcaaccttgccctcgggggctcggttcggtcagctaaaatcgccaaacggggcccagaaccgagccgtgccccggggcgtggtgaactccgggggggaatcggcaaaaacccacaatcgggtcacccataaccctcggtcaccacgttcccggcctggccagtctcgacatgtggatctccccaggcactagccccgacccgcgcttttcgaggactgggacttgggcacgggcccttatttcaagctaagacgcaaaaagaccacggcacagatcatcctcatctcatatatagcaaaataaaactaacacaaaaattttttcatcatttctcattgcagattaagttaaattgtacaaaaaagaggcatgaaggccttagaagaaagaataagaaaaaagttaagattggcgggggcctgggggctcattcaaatgcgcccgggtcgccggcctcgtcgccaccgtcgtcctcgccgctggcgtcgccctcctcgtcagagctgggggcgaacgcgagccgaggggccgagccctcgaagccgttgacgatgtggtcagcagcatcctcgacacgcgcgcgcgcgtcgtcctcggtcccgggagggaactcctccagcgccatccagggagagaaattggggtcccgggcctggtaactcgctagcacgagttcaaccgccccccgggcgaggtccctcgaggatgacttgatggtcttctcgagctcctcggggagtcgttcgaggacccaggccatcctgttgaggtgcggagcgaggccttccagattggtggggggcaccgtcgtctggcctctccagaggcctgcttgccgaccggcgcgcttcatgcgggagaccgcatcccaaagcatgtcgggcccaatctcgcccgccaagcgaagggcctcggcctccccggtggaggagtccagcgctcgctgcatttccgcgacggtgtgttcggcagctgcgaggcgggcggctaagtcgctttcgcccgcggccgccccgccgataggcgcccttgcgtccagctccttttcccgcgcctcgaggtcagcagcccgctgctccagtgcggctctctcggcgcggacgcattcgagattgcggcgcgcctgctcctcctgcgccgcctcgcgaagggacaggctgtccgccagccgtttggtcgtggcctcagcctcctcgagagctcgctcccgctcagcgagtgcgtcctcgcggaggcggagcgcgcactcctcctcggcgcaggcggcctcatgcgccgccagcgtcgcctctcggagaccagcggcggcctcgcggtccgtcaagcccctctccacggcgccggcgtgttcttccagcgccatggcacgggcctcaagggcctcctcgcgccgccgaaacgccgcttcagtctccgttacccgccgctctcgggcagcggcggagtcaaggaccccttgggcggcgtcgagctttttcttcagctccgcctcccagcttgcgtgctgaaggcggagagtgtcttgcgcctcgatcatcgcggtggtagagatgagggcggccgcccgctcctcctccacctcacgggcgatctccgccagcgccgctttccgggcttcaagctccgagacatgacggcggtgagccttacggcccacctccaccatggcgtccaccgagcgccgcccctcctcaacacgcgcccatgcggcctcgagctccgctcgttctgcacgcagggcctccacttgggtgttgaacccatccagcactgcggtgtttgcggcggccagggcctgcagaaggggctcggcgctcagcggggcgacagaagatgaggagaagagccgccttgggcccccggaggatgcgctgggctcggggatgtcccccgggcccgtttggtcctgggcgtcgcccggtgaggtaggcccaggcgatgcgcccgcggcctcgtcgcgagccgcctcggaggatgtcgcctgagggccgcccgagggagtaggcccaagtgacgcgccagcagcagctgtcgcctcagcctggcgagcccgggcggcctcctcccgggcagcttcttcggcttggcgagcccgggcggcctcctcccgagcagcttcctccgcttggcgaacccgggcggcctcccgggcggcctcttcagcttcccgaaggcgggctgcggcttcacgccggtcagactctcgcctccgctcctctgcggccgctggatcttcggcctcggactggccggatttggggtggcgggaggaatgcgacgggacatcgctgaagcagaagaaaaaaccaaaagacgaacaaaatgagtaagaaaaaacttctctttgggagaaaggtggttgcaatgagagtgagacgaacctgcgagggggtcggttgaatgaccaccttggaggagaaatcaggttcccccggcatggttccgtctcccccgtcttgcggagccgtttcttcttgcgctccccctcgggctgcgacgtcggcgcggccccctccgggcgccgactgctgg

SEQ ID NO: 16421 - DNA, 4650 bp, Oryza sativa
aagcacgaccccctcctggggcagattgttcccctcggcggcgctcgcccgcgccgtcgtggcccttaggggctctctcctctgaggccccgacccccatcataatggttagaatggaggcgcggtcgggatcgctgcagagggggaggatctcctgaggaatgcgagacgcctccgcggagctaagattcagcaccctttggaccacgatcttgaagtcctcgggggcccaatcccatctggctccctggtgggtccgcatgtagtcttcaggcccagtgtactcccaggcgctccgggcgcgccgttggagcggcgcaatccggcgacggaggtaatcgccgtacaccatggccccggtgagcccctgggatcgcaggcccgccaggcggtcgaggacggcgtcgtagtcctcccccagatctaccggtgcccgccagctggagacctgcgccgggggctggcttggaagtcggaggcgcgcttcgttggcgaggggggtgtagaaccagtcgctcttccagtcgtcccacttcttgcgaaggacgcaggggatgtagcggttcaacaccggcccccgcggctggaagtagcagccgccaaccaccgacggcggtgacaccgactgcacggtgaagaaccaccggaacagctgaagagaggggcgcaccccgatgaacatctcgcacagatgcgcgaagatggccaatgtcatcaccgcattgggggtgaggtgcgccatctggagatcgtagaactccaggacatccatgaagaaagaagaaaatggcgggaccagcccagccattgcgaaggggaggaagaagatggaccgccccgggtagtctggtgccgggcgcccctcgcccagcatcactatctcccgaccggtggcggactccggcatgaagcggcgcggcagtccggcgtgcctctcgttcacgatgcgggaaggcggtagtacactgccgtcgagcagagcagcgccccgtgccatggcggtggaggaagagatgattgagaacgagcgcgtgtggcgaaagtagggcgtagcagagaaagagttagagctcaggcggcgaaggcaagaggaacaatggcgaaaggaagggagcaaatccttttctcgatgcttttatacccttgccatcgctgggcctggctcctcgtttctcgcgcccactacctcgctccctcgtatctcgctatctcgctccctcgtttcccgtgcccacgcttccactaatcccattcgcccgcttgcggcgcatgaagtggatatgcagttgtggcaatcgaaatggattgtatcgtgcgcgcgttaattacgctcgccgaccgaagcggcgttaccatatctccgggcgagacaaatctgctcacccagattcgcgcgctgctcaagtggtgtggcagtcttgaatagaccgcccattatgaacaaccaaagttaccaataccaatgtgcatggattgagaccgttgggtattttgcccaactacggagaccggtcccacctgtcaccaggctttaggggtggcgtcacacctgaccgcttcccttgggaagggaaattgctctggcataacgccgggggctactgtcggtgatatgggaccgggagtatcgtgaccagaggcttgaggcagacgcaatcgcccacgtggcctggcaccttcggggacgtcgggcccgagggtgaggtgtccgccctcctcctgatttcccccgagggggggggggtcgggttgcgcttgccccggccccgagggccgaggcaccccgaccccttaaggaagtctgcgccacatatatgggataagtgagcacagctgtgctcacctaacagcatttattgcagtctggtcaagcgtgtcacgctgcatgcaacgcagtacagcgcgttcctttatccggtctgtgaccagtcacagaccagtcagatcacgggttaggtggcgactggcggtctgacgcacgccttgccccatcccgtcaagacgaaagcctctaggctctcgtctcaagccggagctagcgtgttatctcttagagatggcacgttagccctggtcagatttataccaggcttcatcctaaccattacaggcaaggtgttacacgaagaagggcaaacatgcacgttgttaaactgacgcgtggtggacaagaatgaccggtctggcactggtcgcgtcagcaacgggcagccacgatctcacgttgcgcctgtctccgccgggagtggaggtaggtgtgggctgtcccatcagaagggttcccggatggaaaccgtaccgatctccgcccattaaagagaaaaagaacagtccagtttggaaagagagagggcatgtggtatccccttgagatataaaaggaggaccttgcccatttagaagggggctctttttttgacttcttcccttttggaaggctgaggggaaagggagttaatcctttgtaactcgtccatacacaaatccacaaaaacacaggagtagggtattacgcttggcagcggcccgaacctgtatacatcgccggtgtctcacgtttcttgcgaggcgggtgatctttccacatacagagggagagcgagagcttgagatttcaccctaagcccccggccggactggcaaaggggggcctgcgcggtctcccggtgaggagccacgagctccgtcatctggcgcgccaggtagggggctcagcgtgtgttttctgagctctcgtactcttccgtgtgcgccaagtttcccttgttcagcctaatggccgagcaagcaaaggcgcacgacctctctccgagtgtgagcggcgacgatggggagccgaatccacgccgacgagctcgtactcccccacctgctccgcgccaaagccctaagcagggggaggcgcttgagagggtcgacaaatccgtggcatcaccagtcgcaggtgatgcaggagaacggcgagatggggagcgtcgcctcctcgtctacggcgacggcagcacgcctcagggtgcgcttcaggctgctggcgcgctcctacgacacccgcctgtcgtccatgacccggagtctccagcccaacgatggctggaagacgtggccaacttggtcatgacggcacagcagcgcctgggtgctggtggacggtccgccaccaccaagacctccggcgccgctaccaccggctccgtgtcatcaaggcggagggcgcggcgagcggcggcggctgcacgtcattcggctgccactccctcgtcgacaccgtcgactcgggaggatcagcatggggagccggatgcccgcctcaacatcgagcgccggcgtaatagccggcgtactccccgtgcaacggagggcgcctcctcgtccagagtgtcacctcgacacggacgtgaagatcagccctccgtgcccccggccggtggtgttggctgtagagcctttgtggcgagccttcggaatgtccgttggcccccaaggttccggcccaccatcaccgagaagtacgatgggagcgtcaaccccaccgagtttctccaggtctatacgaccgggatcgaggccgctgggggtgacgacagggtcatggcgaacttctttcccatggccctaaaaggacaggcgcggggttggctaatgaacctgccacccgcgtcggtccactcctgggaagatttgtgccaacagttcaccatgaacttccaaggcacatatccgcgcccaggcgaagaagcggacttgcatgcagtacagcgaggcgatgatgagtcgcttcgctcgtacattcagcggttttgccaagtccgcaatactataccatgcatccctgcacacgcggtgatctacgcgttcagggggggtgtgcggcacaaccgcatgctcgaaaagattgcctccaaagagccccagactaccgcagagctttttcagctcgcggaccgagtggctcgtaaggaggaggcctggacctggaactcctccggttccggagtggcagcttcggccgcccccggatccgccgctcagacagggcggcgtgacaggaggaggaagaagaggccggaccgttccggcgacgagggtcatgtcctcgccgtcgagggcgctccgcgggccactcgaaaggggaggcctgcgagcgacaaaaagaacgaggctggtacacccagcagggagcgcctcgccggtaggtggtgctctgtccacaacacctccctccacgatctcgcggactgtcgtgcggtcaaaaacctggccgagcgaacgaggaaatgggaggaggacaggaggcaggaacgccgtgagggcaagtccccggcggttccttccggcaaacggcgaagtgaggccaagcagaaggcccccgctgttgacgtcgatgatggtgatgatgacctaggtttccaagaacctggggccaccattgccaccgtcgatggaggagcgtgtgctcacgtctctcgccggagcttcaaggctatgaagcgagagcttctggccatggcccctactcatgaggcgatgcgtcgggcgcggtggtcggaggttgctctcactttcgaccagaccgaccacccaccgtgcattgcccggggagggcaggttgcgatggtggtttcccccaccatctgcaacgtgaagttgggg

SEQ ID NO: 16422 - DNA, 7362 bp, Oryza sativa
atggaaaccgtaccgatctccgcccattaaagagaaaaagaacagtccagtttggaaagagagagggcatgtggtatccccttgagatataaaaggaggaccttgcccatttagaagggggctctttttttgacttcttcccttttggaaggctgaggggaaagggagttaatcctttgtaactcgtccatacacaaatccacaaaaacacaggagtagggtattacgcttggcagcggcccgaacctgtatacatcgccggtgtctcacgtttcttgcgaggcgggtgatctttccacatacagagggagagcgagagcttgagatttcaccctaagcccccggccggactggcaaaggggggcctgcgcggtctcccggtgaggagccacgagctccgtcaccctgtctgatcccagaagagcggagtacgacaccttcgtccatacagtgcttcaaatggtgccatctgcagactagcttggtaactgttgttgtacgagaactcagcatacggtaagcttttgtcccatgctccaccaaagtcaagcgcacatgctctcaacatatcctctagtatttgattgactcgctcagtctggccatctgtttgtggatggtaagcagtgctgaaattcaaccgggttcccaattcttcttgtaatttctgccagaactttgaagtgaattggcttcctcgatcagacacgatcttcttaggtacaccatgtaaacacataattcttgccagatagagttctgctaatttcttccctgagtaggtagtgtgcaccggaatgaagtgagccactttggtgagtcggtcaacgactacccaaatagaatcatgcctcgatgacgtcctgggcaaaccggtgatgaaatccattccgatttcttcccacttccattctggaatctgaagtggctgtagcaaacctgctggcctttggtgttctgcctttactcgttgacagacgtcacagagtgctacgaattcagctatttcccttctcatgctgacccaccaaaacttctctttgaggtcttggtacatcttagtactaccgggatgaatggaataccgagtttgatgagcctcggttagtatcaggtcttttaattccttgttttcgggtacacacaatctttctcccatccagattgttccttgttcatcctcaacaaaacctcgggcttttccaactctcatgttctttttgagctctgctatttcaggatcacttgcttgagctatgcgaacctgctccaccagtgtgggctgtgcctctagggcagccacgaatccgtgctcaactataccaaggttcagatgttccaaatcgcgttgaacctcacaacatagttgctctacccatgcaacattgcagtagctcttcctgctcaaagcatctgcaaccacattagccttgccgggatgataatgtattcccatatcataatccttgatcagctccaaccatcttcgctgtctgagattcaaatcagcttgagtgaagatgtactttagacttttgtgatctgtatatacctcacaacggttactgatgagatagtgctgccaaatctttaaagcatgaacgactgcggccaattccagatcgtgcgtcgggtagttgccttcatgaggacgcaactgccgtgaagcataagaaaccactttgccatcctgcatcaacacacatcctagcccctggcgagatgcatcacaatagacctggaaatctttcgtctgatcaggcaggattaagactggtgcagacaccaaccgtcgtttgagttcttcaaaactcctattgcattcagcagaccagataaacttttcttccttcttcaatagctgtgtcattggcttagcaattttagagatgttctcaatgaaccggcggtaataacccgcaagtcctaagaaactccgaacctgagtgactgtccttggtggggtccatttggtaactgactccacatttgctggatccacagctactccttgagcattcacgatgtgaccaagaaactgaacttccttaagccagaagtcgcacttgctgaacttggcatatagttggtgctcttttaacttttcaagtaccagctgaagatgctgctcatgttcttcctcggacttggaatagataagtatgtcatcgatgaaaaccacgacaaacttgtctagaaattccataaacaccttattcatcaaattcatgaagaaggcaggtgcattagtgagtccgaaagacataactgtgcattcgaacaacccgtaccgagtgatgaatgctgtctttggaatatcctcttcgcggatcctcaactggtgatagcctgatcgcaggtctatcttagagaacacagtagctcctttcaactgatcaaacagatcatcaatccttggcaaaggatacttgttcttgatggtgacctcattgagtgcgcggtagtcaacgcacattctcttggttttgtctttcttctccacaaagataaccggagcaccccaaggcgacgtgctcgggcggatgtatcccttctgtaactgttcatcgacttgcttcttgacttccgccaactcgttggctcccatactgtaaggcctcttgtggatcggtgcagttccaggtaccaagtcaatccggaactcgatatccctctttggtggcattgttgtcagatcgtccggaaaaacctctggatactctctgactatgggaatatcctccagcttcttagtggttttctccactgctacctcttgttcttcaccagcagcctggtttaaactgatccctggcttccgcggcactagagactggaaggttaccacctctccttttgcatgggttaacttgatggtgcggctggcgcaatcaatcactcctctgtgccttgtcaaccaatccattccaagtatgacatctaggtccttggattcgagaagaatgaggttggctggaaaaatcaacccttgaatttcaactgtcacagatgggcagtagtgagttgtggtcatgccacctccaggagtattaactcgcattggtatcttaagcttcactaaagataacccatgtgcaccagcaaaacgcttggaaataaaggaatgggttgcaccagaatcaaacaatattactgccggtgtcgagttgacggggaatgtgcccaatataacctctggtgctgactgcgcctcctctgcagatgcatgattaacacgggcctgaacgaacttgggtccagcacgtcttggcttcgggcactttccaaccgtgtgtccgggtttgttacaattgaagcagagttcgggtttttctcccaacctcttgggctgttctggcagagctggctgaactgattgagctggaatctttagtgaactcggagtagggttgagactgtgctgctcactgttgttgtgactgccattatggtggttcttgttgaagctacccgggtggtagggacggtgctgtcggataatcatggtggaaggtccaccgtgacgtcccatcgtgaaacgaggcttctgactcttcccctggggagtcctgaactgagctgccttcctcttacggtttattttgttaccgtgctcctcctgacggatagccttatccaccagctctctcaaagtcctcataatctctagagatccaactggttaagtcaattcatcatcaagaccagacaaaaacttctcctgcctctcggcattggtacgcacgtcctcaggggcgtagcgcgcgaggcggttgaactcatgcaaatactctataactgttctggttccttgttgcagggaacggaactctctcttcttttgtgccacaattccctcgggaacctgtgctttattgaaactatgacgaaactctgtccaagtaacctctgccccagctggacgggtcaccatgtagttgtcccaccaaatagaagcgggaccttgtagctggtgtgtagcaaaagcaaccttctcctgctcgttgcattgcaaaagattcagcttcttctcaatggcatgaagccagtcgtgggcctcgattgggttggtggtgcttgagaaagtgggcggcttgacacgaagaaattctaacagtttggactgaggaggtggaggaccaactgcaggttctgttgttgctgctgtgcttgctgctgcacctgttgcaacacctgatggtactgttgctgcatctgttgcatcatcattgtcatcatctgagtctgattgtccaacacctgagcaattgttgggttctcgggcggtggggacggactgttgccagatgcactgttggcacgtgctccatcgatcggctcttcgctgccacaggcgttgttcgagtcgcgtgaaccattccttatctccatctgaaggggataggtagaaatatgagaaaaggaagaaaaacagggggctcaaactaatcttgcttatgaatttaagtgcaattatcttaatcttgattaaaacactgaaaaagaggcacgcaactcctaattgaggcagtcataccactgacacatgatatcgaccgccgactagcccacaagcaacaaacctaaacatgaaaactagcaagcaaacagactaagaaggcgataaagctaagggcggcgactctgaagctcggggcggcgcttgcaaacgagggataggactgacatctaaagtagacaagggataggaaccaattcatgctcaaatccaaattaaacaaagcaaaagaagactcaaataaataaccgagcatgatgatttttatgcatagaacatttttcatgaacccaaataaagacactaatgcaactaaacaataaattaatacatagactagttgcatggaaaatgatgcgcataacattgcccccatcgaatatagacacgacctaatgcataactcccaataaattcccaactgactgtcgaataaactccaactaaaatttttctaaagccctagactgagctaattttttttaaaaaaaatccgatccgaatgaacgaccaagatttttcccgcaaaccaaagaggcaaaactccaaattttcccaaaacaattccaggtgcaaaaaggcatatgcagatgaaaaaggggttcagagggctcttagggtttccagttggcttgtcctacggtcaaggtcggctctgataccaacttgtcacgcccagaaattctcgaaccagaatttctaagctgaatgtgcattaaatccctgtccaggaccagccagggtacacaaacgataattgttgacatacagatccacgtcttacaaaaatagaaaagattacaaatgcagcggaaaagataaaagcgagctaaaccgggaagcttgacttcagcagcgggcgactccactccacaggcaatccttgacggcagcgacgaaaccaactttgacaaaacagctccaactaggaagatcttcagctctggtgtgggggaaaagagagcaagactgagtactacccactgtactcagcaagtcataccggaagaggaggtatgatgcaggatataaccaaaggaggctagaggttcttttgcataaagctagcatttaaaagcagtagttgaaggcagtaaaacagttgtagtaattaatcaatattaaccaaacagttgaaggggaggatgaccacggccactagagcggccggccggagttgggtggaaatggagagctcaccggcgtgcgagagaagcggcgtttcggcgacgattggcggcaaccgagcggcggccgaggtagctctcgcggcggcgaagctaacggcggtggcgggttggcgcggcggcgaccctagcggcagtggcgcgcggccgaaggcgacggcaagcggcggcgctagcaacaagcggcgcgagctcggtaggaggcacgggaggggacgggaaatgggtgaaacgagagaggggactcggggaagggtttttatgggcgagggaggggcggacgtggccggggatggcccctatttggccggcgatgtggggagtggagggagagtgagagaggtggattcgaaatcgaatcccgccctctcgagcgcgcgcgcgggccgggagatgcgggggaagaggcggcgacgtgggggggacgcgggagcggcgcggcgtgggcgcgggaagagcggaggaggcggcggcgtggcggattcggcggcggttgccgtcggaggcgggtggctggaggaaggggacgacctgacaggtgggccccacctgtcagcgtcccggagagagggggaaggagaacgggccggcccacaaggggaggccgagcgcgggcgacgggtggactgggccgacggcccaagaagaggaaaaaaaggaggaaaaaggaaaaagaaaaagaagaaaggatttttcctgggattaaaattgcactttggtgatttttaattggttaaaattatttccaaggctctgaaacttccattaaaaatcttgttaatgcattggagcatggggaactcaagaaaaattccaccacgccgaattcaattattaattgcatttattaattaaggaattagctctaggttaattaagataatttcttcggacaatttatttaaccaatttttttaaagcaagcaaaaggggaaacttccgggcgtgacacagttcgagaatgtttgtaggaagtttaatggatttttaatatataatagatagatagatagatagaagatagatagactatgtgttgtagcggagacttgccttgcaaattgaaaaaatgaaatagtttaggggacctagttatcacatctaccttctcgtgccattaatccatagccgctaataagtgtatcagccacatttgtacttgagactctcatactatcatcccagcttcttaagattccatttgtgttctatattttagtcagtaatatcgtgtatttgtttgtgttctatattttagtcagtaatatcgtgtatttgtttgtgttctatattttagtcagtaatatcgtgtatttgcaggagatagctagagaatttattttgccagcgggacaataaattccctatccatgatcccacggaaacaactctggcactggtggagaaatgctttttagtcatggttcgcaacccctgtagtcccggttttcaaaccgagactaccaatccaagactaaagatcgctatctttagtcccggttcaaatacccggtactaaaaatagatctttagttccggttagtaacaccaaccgggactaaagagaggggatctttagtctcggttggtgttaccaaccgggattaaagagggttacggcagtgagatgatcccctttttctttttttttctttt

SEQ ID NO: 16423 - DNA, 2318 bp, Oryza sativa
taagataaaatatattacgtcttgattttatccgaatagttcggatcaggtcatcaacgaaaaaacaaatggtttttcggtcgtacacataaattaaaccagaactattttagtacaaaatatgttacgacctccggattttatctagtctcttcggaccgggtcgataatgaaaaaacacgtggttttttttgatacacacataaattaaaccacaactattattttaggacaaaaaaatatgttacatccggatttgatctgctctgttcggactgtgtcgacaacaaaaaagcatgcgggttttttggtagtacacacataaattaaaccaaaactattattttaggataaaatatgttacgactgaactgaatttcatccggtccgttcggacctaatcgacaatgaaaaagcacgtagtttttttttgttgtacacacataagttaaaccaccagaagtactatttttgtacaaaatatgttacggctggatttcatcttatctgtccagaccgggtagataaaaaacacgtggttttccgatggtgcaaacataaattgaagaactattattttagaataaaatatgttatgttttcatacagacggtccggatcgggtcgacaacaaaaacacatgttatctctagtttttcctttttcagtccgtacgtgaatacgtgatcctaatttcccattccaagttcgttttcgttttcctatttttctactttccgatcgacgcaggttctgttttacgtaccgagattcacctttcttcaccgtgatttatttactaatttttcataataccccttcttgatcaattctactaccgttaagtgagaagatagtaaaaataaatctaaaccctttaattaaatgagattaatagttcaaattgcttgatactacgagtacggaccatcggagtgagactcttgttcgagacatcagagccatgcacaaatgatcgacaagaaggcctcgttccctagatagcagatagcatgtacaactacgaacaaggccgtcataggcgatgcaaaagccttaccgaaggttggtatgggaaccatgtcttctcttgtgtgaatgatattctggataaatccaagccgacattcaccttttccctcatgcctcatattcccaaaactctttgatatcctctccgcatctttcttcttgttttgtgacttacctcattaatgttgctatgtctttatacagtgatctgttttttatatatggagtgaattgttgcatgctcaaagacgtgatataaaaagagttggagaagaaaactacaaggaggttttttaccgtaattgaggttgagggcatgcaataccatatcctagctgtcgatctgggaggatccaacgactgaaattggttggtacctcatggtaccgtgtctctatgaggggcggtaccaattgtgataaggtggtgaaagggtagaattgtacattcgcattaacctttctcccgatccgcctccctccatgtttgatgaaatcaaaacaacgaacacacaaaaaatagggaaaccctatattttattaatcacgattcattaacatgaatattaacaaatacatgagggctcctacaggagtttgcgttttgcctttgcgagaatgcttaatagaaagatatgatgactagagattgcgtgcagtccgctgaaacccagcgcgtagcattgaggctgtcggttaatcatccataggatgagcctatggaacacctctgattaagctgcgcttttggtcatcatcttcaaaattatttgctcaccgagggttttgaggtttgtgtagatttaatgataactgtgatatgggtggctttgcttcgccgaaacctggtcacaatatattatcaccacatccatacgtggatcaggtatcataataaagcggatgacttttgcctcgtcggtgcccagtcatatataccggcctttattccagcttgccaatggctttgcccaccgcctcctctgttcccgctcgcagtgtgatgacgccggctgccacctccgctcgtagtcgagcgtggacgtcgacgaccgtcgtttcctcctctcccgtttgagtgcgacactagcaactgccatctcctccgccccttcttaatcttcctccccctccccctagcgcctgcactctgcccatcccctcagccagatccagccaccggcggggttggggcgctagttttggcgggggcgaccggccggccgcgggaggcctttcttggctcgatcgggggcttggcgacctctggtgcggtggtctggtgtg

SEQ ID NO: 16424 - DNA, 1882 bp, Oryza sativa
agtcaaacattcttaaaaaagtcaacggcgtcaaacattttgggatagagggagtatattgcaagaatgctttcaaaataagtttgcatggattttgcaggggagccaaatgtgcatcccgttaaatcaagggcagaatcgaaaggtatccatcccaaaggttcagcagcaggtgttctatttcacatcctactcagtaaattagtggtcacttctttcctgatgcctcatactcccacacatcctactctgatgcaacatatacagcttcaatctctatttgcttttccattatcatgttagttttatttcgcttgctagtcgctacaaaatgcgctatatatatatgcaccagaaactgcaatgtctctgacggctaaaaactgtcaggaaaaagcaaaataccgtcaggaaaataggtccttacgtgtcatcgtcaggaaaataccgtcacaactagcttgtcggggaaaaattaatttgcctgacgtgtgtccgtcaaggaaattattcctgacgtgaatgcacgtcagggttaattttcctgatgtgaatttcacagtcagtgatatttcccatatcactgataggtttgaccgtcaaagatatttttctaatttttctgacaggtacaaccgtcaggaaaattggtcatccgctattgtgataatttaccatatacagggatgatccatatatatacattatctaatagcaaaaatggtcattatgatattcatcacagataacatataaacagctcaaattccatatttcattcagaaaatagaaagatcaagtccatcatagaatagttctagttcactatttcaacataacacacaagttgaacaactagagtttgcatggcctaagacacctaatagcacgtactttcaaagtctcacactccatctatatggttagaaccatatagacaaaatatccaaaagcattagtatgccgcaactccacattggtatatcaaaaaccttagcccatcttgcatgacatgtgctgtagcagcatcaaggagaagcattcaaacaaccgatacaattgttggtcgatgttgttactgccaccattgcttgaagcaatatcacatccatcattgttgtggtagccattgcagtcaacttgctgtgagcctaaatgggaggaatcagttccctgtagcagtttgaaaagtttatgattaattattccaattctaactagtaataaaaatgcatgcccatgcagcaactaaaatagcaataatggtcatccaacccctgcagcaagttggactaattgtaactatctaaactatttccattttaagcaagattcatatcatgacaaaaagttctattttctactactgactctaagattacacataacagaaaaatacagctaatataaatcaatcactaattcactaatgattattacatgatgtcaacaaattattcattgcaatcacaaatttgcacgcatgattaatgtagcgcccattctgtcgtggcgcctagcgggaaaactatctcttaaaaactctatttgcgaaatccgtttctttgcttgttgtctagtgtccgtgccatctcagatctcaaatccccgatctatcgtcaagttcaatcccgaatccaaatccttcccaaatcaaatccctccgcaaaagtctatttagcctccctcgagttcgatgggccgaatccctctcggcccatctccccctccctccccggctccctctctctctctctctctctccccgctctgcccgtgagccgcgtcgagctctccttctccactctcgcggtcgttcccgccgatgccgcccaaatcgccgcgccgcccgcgcgcgcgcgcgccgtggtggccgaccggc

SEQ ID NO: 16425 - DNA, 2683 bp, Oryza sativa
atctaatggcacgcttagaggtcaataatagggctttattctcgccgtttgctgagttgtcccgtttcgcgtgtagtttcggagcccgaagaccagcagtgcgaggatttcgaggatcaagctcaagatctcgagcgaggcaagccacctttgaacatcttgagcctatatttgaacttaattatgttgcttgaaaaatattatgcattgataggatcgcacttagtctgcttgtcccgtctgcaaggcagattggcagacctacctaacttgttgcatttgacccttccattgtaattgttataccatgttcccttgtacccacctagttgcgcctcggtaatcgtgcactctgcactggtatcgacggtcgccctcaaacttaaaatctgagaaacatcttgggtaaaacttgggttttacaaaagacttggaaaacccgacacctgggtcggtgcttgcgaactaaatgaatttccaaaaccgcggaccggggaacgtaccgggtgtacagtttcccgctcttgcacttaaggaccgtttccttggaatttcatccgaacataagacaagtacgaccacatgggtggaatgggacacccctggctgagtaactagcttatcgggggagccatgatgctaagagacatgtggattcgccggggtggtgtcggggaggacccctgggcttcctggcacagtatggtctgggacctaatctggtgttggtctgggacccctctcgttggcatatggtgaacctgtgtcggctttcgaaatgccttgtcatgaaagccttaaggtctctagtcgtagccgttctgcacgggctggatgatccgggttagtaatgtcgtgtgggtaaagtgtaccccctctgcagaggttattaaaactgttcgaacagccgtgcccacggtcatgggcggatgtgaggtgattcctagcgtagttttgtttgactactgccttgtgaaatttgctgttgtggaatgggtttgatgtttgaaaaatctgcggctgatgggatcagccaggcccgggtggccgtttgaaagctgttggccgggtgccaatcttgatcaattcaaaagactgatacattgcacatactccgaccggacgagacgcactgtctcatccgtgttgtttgagaagcactcccttagttgtttcagaaaagagtttaaataaaatcaatcgaaaaaaaaatagcagcctttccttgaagcctgcattaaacacttatttcccatggcttgctgagtactcctgtactcacccttgctctatataaataatcccccctagttgctgaagaagatgaagcggatcccgctgacgaggagttcttccaggagcaagccggctacgatgagttttagggtttcggcctagttcccaagtcgcgcctgtgatgtttggtccaagtcttggcttccgcttcccttttgtaatgcagttgtgagctcgggatctgtccgcagcccaacatgactgtactcctactctataataaagagacctctgttcctgtgatactagcactgtttcctgggactggtatcgattaacaggttaatttggagcgtcacgggctagttccggtcgggactagttcggggcgtgacaattaacatatgtatatggcaatagtggttatatcatactttaagagaaaatcacattaacaggatatttatgagaaacttagaatgcttaagtaaatagctacacatactgatggatctgttcaactaacaaccatagtttaaaggtattcggcatatgttgcaaggcatctgtataaagcttaccaatagaactctaattggaaaaataaaccaacgggtaacagatccagagaaacatcaccccagaccgaaggaaaattactataagagcagaaagcatgctcatagcacaccaattatattgctcacagaacagaattcatgtgaatgctatcattatgttgcttgtaatacaatggtggatagtaaaatcatcaataatttagtttaccaaagatctattaaggaccgcaagaggtggacacaaaaaaagcttacgatactttggctgaaccctttctaatcctgtaatttaaggtgtacctgacattaaaaatgcagcaactttcagtcatataaatggtgaaaataattaagctgtagttccactcttaattactgaaatactaaaattatatgttaaaatacttcagttgcttcaattagtagctgtggtatgagacaatacacattaatagtggccggctctcttgtaagcattctatcgtcatagtatacaagcttattacattttctcatactattatagtagtgtgagatgcagttatgcttggagctagctaccatcaatttaacgacaaaggtcccaagtatgtaaatcctcttctagtagaacatatgctgtggccattgcttcccatgtggccatccttagctgcatcgagccctctaacaattgtagacaaacctaagtttaggaaaaagaaattcgctaaaacaattctctgcataccatgaaaatatgattggcttcagatgtagcaaatctgccatcataattttctagagatgatattagcccatatctacatatctgaaagagctaaagaacaaaaatatggccggagcaaagaacagctcaggaagag

SEQ ID NO: 16426 - DNA, 2847 bp, Oryza sativa
tttttaaaatataaaaatatttatatcatgcttaaagaacatttgatgataaatcaagtcacgataaaataaatgataataacataaattttttgaataagacgaatggtcaaacgttaattaaaaggttaacggcgtcatacattaaaatacaatacagagggagtatttcccttagggcacacgatagctagacttggatggaatcaaagttcccaacatgctgccagatgttaatgtggaggatgtacatatataagtacatttaaagtagccatatcacgatggaccttctgttataaggagatcttttggatataagttctcgacaaaaaaaaaaaattattcagcctagcccgtcggctagcatggttactgttttcgtgatgcatctcattcgtatcacacgcatagagatttttctggttttatcgcaccgtagtctggcctccatccttcctgttgtgaaatgctacaaaatattctatgatgtgtagcatcacaaacaataaaaaagatgttccttttttacaagttagctatataataggagtaaattaattaaatgtttagagatgggggtgatatatataagggccggaggatgagagaatgcattgctttttcaacaccctccgtatctcagatagcaaaatacatggttggtccttaaatatctaccagagtatcatttagatccataaacttataaagtacacatctatatctataattttggttgatgtatcacccaaggtctcaagaaaacattttttagataatggaggatttatttaaactcagttaattacatcaagatggtacaatcacactgagtcacccccggtctctgcataaaatgacacaaccaaaaaaagaaagaaacaactaggaatatctcccaagcataaaagtttgacagaaacatcttagtgcctatcaatccatagactagaccaaaacccatgttcctaggtaaaaaaaactcctgcgccacctggtccaactgtcgtgataccaccacaatagtatctcgtgtcccggtttatggaggatagcccagatacgtagccatcgggtaactaaagtgataacctgcaaaggagaaaacaccatcttgttatcaaaaattatttcattcttgcttagccaaatggaccaacacaaagttatcgcgcccatcaaaagcagattcctcatgtctttaggatacatgatagccaactcccaaacatatgactaacattgcgaggatgttttaaattataagctagatgaattacaaactacacctagcaagataagcgacactgaaagaataaatgttggctggtttcatccttgtgacaaaaacaacatgtcttactacctttccaatttctcttagtaaggttgtccttggtgagcaattacgcctagcgttgataccaaaggaagattttttactttcaccttccaaatgcgtctattgatattcggaaccccggtatgtgttagagctagataatgagatttaaccgagaagaccccattcggggtgaggttccagtgaaactcatcttgctcatgtaccagaaccaaatcagctatgtgaggcaatatgttataccaagcagctagtttttcaccaattaaatttagcatttagccaacttagaaatccaccatggcaacaaatttgcgtttagctccttgactacagatttgtccccaaccctagtcctctctactctatatcttaccgtctttctaaccgggacgggttggggaggggggagggctagaggggcaaaattttgctctttatttgaagaaaaaaaatacaagagtctcgctaggtaataacaaataaattacaaccacaattttcgtgtgatatatagctacatatattatatctattttttgttccaaattgccgatggataaaagttggatgtatggaagtgatcgagtgagcccagagtttagaaggggcattgtcggtttcataaatgttgtagagcaagacaagaacataaggaacaatcaatgcatgacttgtccatgctttgattgtaagaatgagaagatgtttaccagcaccgtatgaggacaagcatgacgcatatctgatctgtcgaggattcatgaagggttacacatgttggacaaagcacgaagagcaataggcactgaataatggaaggcaatgaagcgagcagccttgtgaacgaggaaggacacgaagatatgcttgtcgcttccccattgggtggtgatcaggtggatgtcgataatgataccgatgacacctctgcgacgggctgaaaaacctatcggtgaacggtgagagttggggcccgacaagtatatctctatcatcggtcgtgacggctactcgccagacacaaatgagattttcacattagtgaccaataatcagtgatcacacactttgtggttaatgatgagggttgtgacccgttacggatgactggctccgtagtagtgtgaggtgtgttgcctgccttcacagtgatgatggcaccgcggcagattcatgggatcaccttctccttatcatactgcatgcatgtatccctatggggatctctgactaccgatgatcgatcactgccgtcctaatcatcatgatgggttaaaagcaaaatgtttgccaccatgtacagccacattagagcaggtacaataggaggctataagccatctgcaaacatattttaagtagataaatgaggagagagaatagcagcgggctatagatttgtagccaactgtaacacggactccaagacgcaatgtgtgtatgataggtgggatcatgtattaatagtgtagtatgta

SEQ ID NO: 16427 - DNA, 1300 bp, Oryza sativa
gtttttgtcagctttccttcctctttgtacagtcgttgttagctttatcactgcttaattctagttgtatcacatcaaatggtaaaaaaaaatatcgaatataataaaaagcaaaggaataatgacaatggaggaaattttatttttatgtgtcacatttgttcaatcttaagaaaatatttgcttggcacttaacactttttttagaaacacattacatacacagatgtccacaacgcacgtacagtcacctctatgaacgcacacacgcacatcgtaccttgcatatcactgaaagaataattatccgtaaatgggagcatccgtgttaaatctaaaatttgaacccgggtggattggttccaccacaaggaacctaactagttaaactatgctcacttcgcgcttcgaacttaacacttagttgactcatccatctaattaaaatatactttttattcatatgcaaagtacagctaatgaacatgtacacgcatatgagctatactcgcctatataggttcacttccgaatattcaggtgtgtctaaatagcctggtcgatctctttcatttgcagatttcatccttgattacactgggaaagtgcaccgaataccattttcaactatgctcttactatatttagtagaattgttatatgacacatggttttatttatgggagaactacgtcctcgagcctgaggtctgaatttattcataatagtactcctattgacttcggctttagtgatgaacaaatttgctttgtcgaaatccttataatgagtagcatttgctgctgccgaataaaccaactttaagatgggataagatgctcgataaggcatgaggtttaatatcataacagtttcttcgtagtaacaccaacaaatctcatccataactctttgtactttgaaaacggacatgtggatgtgttttcgtgctttgaaaaccctcgtacttaagtagacgatcggttggtatacttttcttctgagtttctttggcccactcttcttcttctttatcctaggggtatactttaacagtttgaaacttgtcataaataagattattccccgcttacctatttcttttttttaacacatttgtttcgttatagactagccatcacaccatcatcaacaaggaatcaaaagccttctcataaccaagcctcgtcctgatcttgtggtcttatgaacttaacatgcagctagccggacatctttcattgcacaaattcttagaagaacataagtatgtacccttgaatgccaattctggaaatat

SEQ ID NO: 16428 - DNA, 673 bp, Oryza sativa
gtggatccctttttaacaatgctggcaacaacatccgtaatcaagctccacgtcctgttgcagctccagcacagcaacaacctgccaagagggagcaaggcaacaagcccgtggtgtgtttcaactgtggagatccaggacattatgctgacaagtgtccgaagccccgacgcgtgaaggttgtccctacccagaataactctgctgtaccagcatcaaaggctcgtgtaaatcatgtcgctgctgcagaagctcaagatgctccagatgtgattttgggtacgttccttgttaactcagttcctgcaacagtacttttcgattctggtgctacacattcattcttatctatgagttttgcgggaaatcatgggatggaagtagaagatcttagacgtcctttgatggttagtaccccaagtaatcaagcactctctttgcaacgtagcccctctgtcagaatagaaattcaaggagtaccatttctggccaatcttatcttgttaaaatccaaagaccttgatgtcatcctagggatggactggttagccagacataaaggtgtgatagactgtgccaacaaaaaagtaactctcaacagctatgatggtcgagttgtaactgttcatgcattgtcatctgagtctttaaggtcaagactgaaccagataac

SEQ ID NO: 16429 - DNA, 529 bp, Oryza sativa
tcgttgtagaatggagattcaaagggcccgacggcggagggttttcgatactggattcatcgaccctcggagagtaaacgtcgcaatgctcgaccaatatccacaagaaacagaggacaatctcgtccatctcctgaaggcgcagcattacaagacgttcatactgttgccatacaacacagagttagtttaattttactgtcttcctacataccaaatttcattcccgtacgaacttgctaagtgtttcatatgtaatgcatcccacgcacattgcagattccactgggtgcttttactcttcgacctggaggcctgcaccgtcaacgtatatgactcaatggataaaaaagagtctacgtttgacaaggttttcgaacttatagacaggtaccgtcataagttcctttgttaattaagaaaatcttgttatgttaattgctactacgaatcatagctttaaactccatgtagggcttggtatcggttccgtcatttggtccgcggcaaatggagagaaagacttagg

SEQ ID NO: 16430 - DNA, 681 bp, Oryza sativa
tacgcaaaggttcttagtgaggtgcatcacgtcgattgcgtggcgtacgtccaagaattcccaatatggtaactcccaaaatatagagttctttttccacatcgccgcgtgaccatcttcgctctctatatgctggcttccaggcccctttccgaacactactttaagatctttaaccatagcaaacactgttttcccgctgcgatgtttaggcttcgtacggtggtcggccttatgttcgaagtgcttgcctttcttccgtaccgggtggtttgctgcaaggaatcgacgatgacccatgtatacaaccttcctacagtgcttaagatacgtactttctgtttcatccatacagtgagtgcaagccttgtaccccttgttggactgtccggataggttgctaagtgcaggccatcgttgatggttacgaacagcagcgctcgtaggttaaactcctcctgtttgtcctcgtcccacacggggacaccttccttcttccacaactgtttaagatcttctaccagtggtcttaggtacacgtcgatgtcgttaccaggttgcttggggccttgaataataatcggcatcattatgtacttcctcttcatgcatagccagggggggaggttgtagatacacatcgtaacgggccaagtgctatggccgctgctcatctctcca

SEQ ID NO: 16431 - DNA, 745 bp, Oryza sativa
tttgacaaggtttttgaacttatagataggtactgtcataagttcctatgttaattaagaatcttgttataattaattgctactacggatcatagctttaaactccatgtagggcttggtatcggttccgtcatttggtccgcggcaattggagagaaagacttaggcggaagtttaattttcctgtgagtacacatgctctaaatttatattgaatctccaattcaaatacatacaagtgtatattaattagatctctcaccatttgtcatttatatatagtgcgcaaagcaagcccagggaactaacttgtgcggctactacgtgtgcgagtattgccactgccttgcagaccaaatcatcaccacaagagagctcgatgtacgtacaaataaattcaaaatttcattgcgtacgtatcgatttgttgtttactaattaatttcatacattcatatagtttattcgtataagggataatctcacacacaaggaatttatcgcggtggttcaagaacaacttatgggattcatcaacgaacaaatccttgatcccaacggtgaattctactacgacggaaatacaattcatatgttcttagcttctgagataatgactactactacgtcgaaatcgtagctagctaggacatcataatggattgtaattaatacatatctatttttttatatgcatgtacacatttctttaatgtaaatatatattttggtcatatatatatgc

SEQ ID NO: 16432 - DNA, 773 bp, Oryza sativa
cactgtcgccgtcgtcaagtcgaagagtgccgccgcctttttcctcgcgccgccgctgtccgttgatcttccgccgtcgttttggtcatcggtgagttcgccgcgacgttctctacgtgctggtgccctccgttcacgtccttgcgccgtcgttcgccggcgagcaagtgctcccgagccgccgccggagatgacgtcgccgctgacgtcatcatggccgtctgccgtggcccggccgtggatcggttgatctcggccgttcgttttggataagatcgatctcggccgtctgttcccgtgaaccgctgccgtgcgcctggtccaccgcaaaaccctagccgctgacgcaataaatccctttttccttttcaaaaataattcgttattgcgtcataattcaattaaaatccatataagtgttttaatccgatttaatctttaaaaattcataactaattcatcttagctcggatttagttggttcaagtctctaaatttttctaaaaatgagatctacatgttaaaaatatccacatgtactgttcatgcttgtttatgtgctgttttggtgattttgcttctttctgtttagattccggcgtttccggagagtccgttttcgcaggagaagaatttgaagagttccaaggccagcaaggcaagtcacacagatcccaaacaaccctttgagcatgttgatcccgtttaaagctattgtttctattcaactattgcatttattttcgaatgtcatttggtggaattaacctatt

SEQ ID NO: 16433 - DNA, 799 bp, Oryza sativa
cccttgcaacatatatgcccctttagacaccaaccttaaagatttgaaacggtccttcccaatttggtgaccacttgccgaacttgttatcccgagttccaatcgacaaaatcaacttccatataagttcaccttccgaaaaatccttaggcactactttcttgttataatgcctagcaactcgttccttatctttggtaaccttagcaagggctcgtaaacgcgattgaaccaagtcctccctctcatcggccataaggttataatactcaccggctgtcaaactgtcttgcaactctatccttctagagccgattctaacttcccatggcaaaacagcttcatgtccataaacaagcttataaggaggaacttgaattgatccatgacaagccatccgataagaccacaatgcttcggccaaccgggtatgccattgctgaggataatcagaaatcttccgcttaattaatttgatcaagctcttgttagatgcctcagcctgcccattagcttgtgcataatatggtgaagaattcaacaatttgatacccacgctatcggcaaactgaacaaactcatcagacacaaagattgaaccttgatcagttgtaatagtttgaggaataccaaatcggtagattatatgttcttgaacaaattgaattgcatccccagaatcaactttcttcaaaggaatggcctccacccacttggtgaaataatcagtcgccaccaatataaacttatgccctttacttgatggtgggtttatcataccgatcatatcaattcccca

SEQ ID NO: 16434 - DNA, 1538 bp, Oryza sativa
aggggaaatgtgacattaaattttatgaaggataaaaaagtgatatcatgcagatctagccaatggctaggcagatgaagacaaacaggagcattgccgtttgctatacaggaggaatgagtacaaccaataaactcatcccaaagccacctgtttcaaccttgtgagccaatgagctgatcagctgaacatgggaaaatgagggaagagaagtacctgattcagcaagaagaccccatgggaacagaaaaaaggtataggccaggaagacacgaatgaatgggctgcttgtgtgcaatgaaacaatctcactgaaggagaaacaattgtgtcggtttgtgtccaataaatcaagatgaagattggcgaatccagctgttgtgctgcaacaattagtttcatagaaaaaggggaggctaaaatgcctgctaaaatgctgcatcgaaccgaagccaccagatgagttggacatgattacatgagcccttttacagatggaaaccgcgctaacaggggaaagggatttgatggatctttgtatctggaccaggaagaaacgttttcgtgggtatggatgaacaacttgttagtgccattgctaccaggtatacatgtatcctgtaggatagtagttggacgtgggtgtagccgcgtaggcgaacagattgattcgttgtgttgttgcttgtttgtgggagctcagcatgcaagaagatcctttaatagctgcccttccagttcttttcctcttatattccttgagaagtggaagaggctgttggtttcgcagagggagagaccgtaggatggtggaaccatggaagatgaaccaaatgacagtttttgatcgagccatcaaggaggaggcgaatcgatgaggggaagaggactcgacaacgcacgatggaggaaggaggaagaggaaaggttcactggctggcccaggtgggaaaattgggctgggctcagcgagcaagagaaaaggtctcgaggaagcaatctgcaccgttaagaacgtgaatccaacggatggaattaagtggtgatgtggcttaacctcaaagcaggaaattgctaataactatactaagtggggatgatttgtataggtatataggattcggtctaatggtttatctttactccacaccctctaatctcaaatcttggcttcgcccctgcgcagcagcctcgtcgttgttgacatttccgccttgctgcccacaagtgcgcccgaggttgacctaaagacgcactgtctgaagaagttagcaccccctctgtcccttgtgtgcctctagtgctcccgatctgggacgccatggccccaatccagccattgtgccgctgccagcccttagattgggcttcggaaagcaccatttcgacgcccatagccaggtgaaggacttcatcgccatcatcctcctcaaactcactctctcaccaccctgaaatggttcagcttgtcttcgagtggtacatgtttctcgtgcttgcgcccaacgacgaggtgatgaggtgatagggagagagaa

SEQ ID NO: 16435 - DNA, 661 bp, Oryza sativa
gcaccgtttcctccatgtcaggcttcaccgtcttgaggttaaccttcgtaccattaaccttgggaagggtttgagcctgtgcctttacttgcatggctgcaggaggtgggttaggctttgcgacaatgccacagacactcaaattctccggcaattcgccggtaacagcagcattcttggagcttctagctgatgctgcaggagatgagcctggacctgggaagaatgctgaggcggcaagagaccctgccatgattgaacttcccctcacggcccaaaattcgtttagaaatcaatcacacgccaaaagcgctaacctgaataaacaatcaattgtatcagacactttacaacaatgtagctctttggaaaacttaaaagaggagaaaaaaaattgaggcatgaactagtggatccacccactaaaaagtttgcctcctcatgggggaaaaaaggcctcatgtatcataaacaagtacacccgcgaatttcacaaacgattcgaaaccacatttgaatcaatgcaggcaaaaatgaaccatatgccccccgatgaacaaaatggcattgagaattgggaggacccaatatcggaactcgcaggggcggatccaacttgggacatgggggaggttaaactgttactacttgtattaaggct

SEQ ID NO: 16436 - DNA, 3400 bp, Oryza sativa
gttaatgaatctaaacagactttaaacagacttttcagtatataatgaatctaaacatatatatatatgtctaagattcattaacatctaaatgaatgtaggcaaaaatcttatattgtaaaacggaggaagtagcaacatttctcaagctccaaccaaacgatgaaatttccatggagcagtttacttgctgaatagttgaatcaattagacgattgaaacaacctcttccacacttcaaaacctgtcttatctccacaggggttaaaaacaaaaaagaaaaaaaaaagcgaacaaagaatcaagaaataatagatgtagcaggtacagtaggcaagcaccaacacctcccctccaacctcacactatggaaactactaattttttacagaatacaactcacacttcaagatcagcttcagggcaacagaggcaagggaagtttgatattctccctaccacagattttcgtcggtttgtttgtttacgcgttctcagctgctgcatgcgatcgctttggtcgccactctgtgtgtgccttcacaatgtcagccttcacaagatggtcgcactggatggcagaagcctgcttgtcggcgccaatgctggtgcattcccctgacacggtggtaagtgattgcagcacgctgtctcggccacactccttcctgtaatccagggtcatgcttgcaagctcatgcttctccagtactgaaattggagcactctgggggaaaaaattagaaagaactcagaaacatgtttgaaagccttctgactgaccagatgtaagactaatgacaatatcaacaatacagatggtcagatcagaatctctagaaaataattgcaagtactacataaaatggttccctaacaactactccctccgtttcataatgtaagtcattttagcatttctcacattcatattgatgccaatgaatctagacacatatatctatttagattcattagcataaatataaatatgggaaatgctaaaatgacttacattgtgaaacaaaggaagtaccatataaaaggataaagccaaattatttttctctaaacaatgaatataagggacaagaatacccactcaaggatccaccccaatatatttaacattgttcacatgctgattgacatcgaggtcaccccatctaggctgttgcagtaaacaagagtccatcaaatatcatttaaaataaatgaggggtgagatcaattattactgtttttcttagataaatgatagcagttgaggcataatgataattcagtatgtaaccatgtctagctgacttacagtgagcccctttcttatgaattgctctgtagcatcatcaccaactttatttcctgtctaggctaacttttcactctgctcctctgttatagctgaacggtcattgaaatatgggcctatttcagctctaacttcatctggcatttttgaaagtcttctagttttcttgtgcatcatcacccaaacactgcaacaaatggattggaaaaggagcacaattagtgattatcaatgatgtgaccaagcagaaataccaagattggatgtcctcacaaaaaaaatgatacagatgattcttgcaatagaatacagttgaagcccaaaccttgtagctctcaagattgttcggccagagttgtagtcacgaacatgccagtctcgacgcatgccatttttgccagcagcagcgacccatgtgtcaacttgaaccatatctcccctaaaaccatagcaggttggtacaatacatctgtcattctttttgatccacagaaagacatcggcaattgtatctgaactaaaaaaacagtttgaaattgcacttccatttttctaactcaaaaccccaaaaaagaagttttcaaccacttgttgacacagttgacaagaggatttaaacataacgtgtgaatagtagtactagcaccacttatttgatgaatgatgaccacctataaatttaaactgacagatgctgttcaacaaaagttcactgttctagatcggtccttagcttctcccatgatatggcacagcattaattgcttttgttcttttctacacgatggaatcatttactgcagcccaataaagggaaactttctgaattgtgatcccttgaggtgtggtaccctgtacagacgtcttttaattcaagatccaagaaagcacaggacagaacatttaatgaggcagctctgggcaatgaatatgaagtaaccagtcaattatctattgggactaaacctctccctctatccactaatcagttatgttttcgggagagcattgtcctgctaagtgatgttatacttttcaagacaaaacagggcaacagagttaagtgctgccaaactcaggccttggggtatcgtaactttcatgctgcttgtaataaagctagacaataactttaatatgaactacccgagtggtaaatttttgtttataaatgcaaataaatcacttgctaatttatttttaaaacggagcttatcgctggaaaacgtaagtacatgcccgttctggcattcccactcagcataattcaagatccaaggaagcacagagaagacatcatttaatgaggcagctttgggcaatgaataaggcgtaacaaatgaagttgctcttggatctaaattactactccactaataattgacgtctaaaggagatattactgttcttttaactgatgttgtgtcttttgaggacaacatagagcaaggagagctacagacttacagtgctgtaccaaaaaggccttggggcatcataacttttatgttgcatgtactaaagctagattatgtctttaatgaggattacccaagatgcaaatcctgtttctaaatgcaaagaaataacttgatagtttgtgttataatcagggctcgacaattggaaacaaagtgcatgctcctcccacttaagtaggaatatattcatttcttcctaattggaaaatttagtttgccacaaaatctatccttgatccaacaaaactggagctgatattactacacatttcttagtcaaccaaggaggaataacagaacctccaaaacatgaggcctatcacgggaaatcaaagaaaaacatggccttctatagcagtataaaaacttcaacccatattcttgcaaacctgcagcagcgaaatttacgagcaagtaaaagattcacttgattttcatcaaccaaccagtgtatggagaaatcagaccagagatccacacaacaatatgataaaccatgttaaagtaaatattgagctaaatactactgttgcttgtgtaagaatcttctttaaacaaataaaaacaaatatgcaaaggacacacagctgtaaagtagtacataaaa

SEQ ID NO: 16437 - DNA, 2142 bp, Oryza sativa
ccctcctccccagcacgcaaaatgaagttcgttttattgcatgattaattaagtattaactgatttttttaaaaaatggattaatatgatttttttacacaactttcatatagaagtttttgcataaatcacaccgtttagcagtttgaaaaatgtgtgcgcggaaaacgagatagatgggttaggaaaatgggggaaagaacacagcctttgaagactatgccaagtttgatcgtaccttaataagtgagatgaatggagtactatgctaagaatattagggtatgatattttctaatatttttatcaaaataaaaagattatgccactttgatttaatctacaaagtctgttttttctctaaagaatttaagcattggagccatgtcaaacagggctgatttgccttttatgctgcacatatgggatgacaaatcttggaaactagatgataccccgcgcgttgctgcggaatgttggtgtataacatagttgcaaaactataatatgtaaatcaaatattgtaaatcccactaagaaattagtcattaacagtcaaaacaggatacatggaggttagaaagattatgcaataatcttacccattagcaatcacgggctagccaaagtacaaattgcagttagcagattgtattatcaatgttctcataaattaattgttcgaagaattaaatttattaaaaaaaagtgaagttttgtgagaacatctcaatcaacatgtttaactcgtacatcagacttcctcggccaacatttaaatcatcacgttaattcatactgctaacttcactggctcaaaggatgataaatatatttatgtagagattaagcttatatggtctattatataactatgaaatactactacatgactaacacatctaggaatagaataagaaaatcaccttatgaaatcatgaagttgatttatagtagctgacatatataaggtctgaaaaggggtaaaatcacatattattcattgcgctatgctgcaaactggatcgaattctcacctgtggaatttttttctgcatgatagaaaattatttgataagcagaaaaggagtgcagccttgaaattttccgtatcactctcatggagaggaaaactaagttatcgtcagcaatcgtttcttggaaacgtaaaattctcttcaggaatcagaacagaattgaatacaaaggtagaaatgtctaatcaaaatttacctcgtcaattagggtcagatcgatcatgtaagtgacattacaaaagataaaacatagcgatattatcaagttatatgtccaaaaatggggcaatcagaagaacacatgcatgctattttacaaaaaggcagaaaaaaatgagtacaatcatcaactcacctaatagctatgttccaatttggggatcgagaaaataaactcagcattggagaacggaagaaaacatgcacctgatcaaaaacttgaaaactgatgggattaagaacggtaaacacaaagaagacaccatgcaatcggctaatgttgaagctaccatcaaatcatgtagccgaaggacaaattaaccatgaaccctgtaatatgcccaatatagtttccagccaatggggcagactgaagaatacctaaagcttcgctatttgatgtaaggggagaaaaaaaaagagagtacagtatagacatcagcttaaccaaaagctgataaatttgggatcgagccaatgaactcaacgtaggagaataaggggagagaaaatgtacctcatccaaatactgatgggagtaggaaagataaacaccaggaagacaccaatcgcctgatgtcaggagctgcaaatgaaatcatgttgacggaggacaaattagttgtttaccctgcatatatgccctatatagatctcattcccagccaagatcgaccaatgttttctgaatcgaaagatcaaatcaatgcccggataatccatatgagccaccagatgaattggacgggaaattgatgaaagccctgataatccgcatgagtactggataatgataagatatcgtggtgagcgccgcgccgggattgaaagcctgcatacttgatactcgcagagcatcgggagaaagcatcgatatttagcatga

SEQ ID NO: 16438 - DNA, 890 bp, Oryza sativa
tgaaaatactctctgaaagagcataatattgtaatcagtggcacatctctcttttttttttctcaggcagaaaagcttttcattatatgaatatgcagcagcttacaaaaataatgcatcgatcaagcacatgtaatgtatatatgtacagtacctatagaatgactaactttggccggccttctatatttcttgtgtgtaaaaaaggctatgcatatataaaaagaaaaccataagagatagatatagaaaagaatgaagaactgcaactatatatatactttgtaggtagtctatattactccagagattctcaaggatgaaagtacaacaaaaacaacccaaaggatcatgaagtacactgatgttgcccaagcccacatcctagggccaccaagctcggcgccaagtatgacgcgacgaagaaccaaaaccgtgatgcaaccgaacgacgtcgcgaagaagaccagaagggagaagctgaggccagcagcattgtctatgtacaggggcttcttgtagacaaaactagcatggtggcccgcgcacattgcgcggctagcatcattatattttctctcatataaaagcatatatcttttctcattatattattataaaatatattacaatgacaacataattttaaattttgcaataacttttcaaaactactaacgtgtaataactactctagtctcctcttctaatatttcttattttttaattctgaatttcagctatttctaaattgtatttctatatgtactctgccttttctttttctctgattaatgtgagaatttctaggccatgagagcgaacgtggaggctcctttttattccgaattttagttggttttaaattccaatatgaactctatactcta

SEQ ID NO: 16439 - DNA, 3655 bp, Oryza sativa
aggccagccacagtactgcctctcttgtcgatcgatcgacagccacagcctgcaggtgtggggattcggctggccgtcgccttcgtcttcgtcttcgtcgtcgtcctcatcatgtcgtcctcgtcctcgtcgtcggctgtcttcccactggaccacctcgcggcgccgtcccccaccgagcagctctgctacgtgcactgcaactgctgcgacaccatcctcgccgtacgtgctgtggcgccgatcgagctagccacctacctaccgacagcgtgctagcttcagagcttcttagcattaattcttcgtttgttagttcgtttcttgttttgatcgatcttttgtttctcttgatgcatgactaacctgtgagtccccgtgcccaacttcgatctccacgcaggtcggcgtgccgtgcagcagcctgttcaagacggtgacggtgcggtgcggccactgcgccaacctgctctccgtcaacctccgcggcctcctgctccctgcgccggcgccggcgccggccaaccagctccacttcggcccttccttgctctcccccacctccccccatggcctcttggtatgtacccacctaacttgctctatatatctctctcaaatcctcccatgctagctctcacgttttagtgaggtgctcagctgagaatcatacattatattcatactgacgtttagctctcatgggtgtgactgtgtaatttccggtgtaggacgaggtggcgttccagacgccgagcctactgatggagcaggccgcgagcgccagcctgagcagcatcacgggccgcagcagcagcagctgcgccagcaacgcgccggcaatgcaaatgcctccggcgaagcctgtgcagcaagagcctgagctgccaaagaacgccccggcgtccgcgaacaggcgtaagtacagtactactactacaagcttggtgttctttctttgaaacgctagaattttgtagtcaaaggtacttatgcaccacagtgtgttctcctgctagcttgttgcttattcaccgttgtttgggaggtttaagaacagaaagcttgctaagagggggtaattagctacttatagctcctacttaggcatatatgcacacattagcgtactagtgtacgtgttgaatttcaaatttcaatccagtgtttctttcgagtgtgtgaaattaatatgtactatattcacttgaagaacgctcctcagcactagaaatgatagtacagatcaacaaggcatgcgatcatgtcttgttgtggcagggccatgtaagcccatgcttcgatcgatccggtcagtatttgcagacagcatgtatactgatagcttaggtgagcttacccatttgtccatgtttcctcggatgctgtctgatccaaaacttttgcagctccggagaagcgtcagagagtcccatctgcgtacaaccggttcatcaagtaagatttctctataaaccttctgcctaattaaaactgatggatcctcctttgagctttggttaatcagtattcgtggtatcatctcgtaaaaaaaattaattctgcttataatgaattgctacacagggatgagatccagcggatcaaggccggcaacccggacatcagccaccgggaggcgttcagtgcagccgcaaagaatgtaaactttcttcgtctgatccgcgcattaatgaactcctactcatcctgtagtatctagcttgatgctagctgttcgcgtgtcttgatttgactggacaccttacattgtcagcacggacacagcggcagcttgtgcccggccgcttgcgagatgccgagagcaagcggctgtggtttctgggagcttttagccccacagctgctatagctagggttcgttcggatttgtttcgatctcctttactgatccaaacctgcctttgctttggctttactttccttgtgcttgcaatcagtgggcccatttccctcacatccattttggcctcatgccggatcaggggttcaagaagaccttcaagcctcaggtaaccagaatcccgagagaattaacgtatactactatgggagacacaagcataacctagttatctgtgtaacctgaacactcatatagccttatcagaattcagacccacccggcaaacactgcatatgcactgctcttatttactttagtgctttgcgagcaattcatctgtagccgcttcctgtgtcgtgattttcaggatggttctgaagacattcttctcaaggatagcctgtatgctgcggcagccgccgccgccgctgcagccgcaaacatgggcgtcactccgttctagcgagctttggcaaagcggccgcaagcaccgaattcttggtggtggccctagctcgctctcatgtgtggcgccattctagctatatagcaagggtttaattagcatcagatcatcatctcttaatatcatgtgtgttgcttaattagagtacttctgagtgtgtagaagagagatggggaatcctgttgagtgcctaggtttatgcttataaccatattcctcgtagagacttttttccctgtttttctcttttcttttccttctttatttttttatcctttctttctttcaggactatcttcgtactccctattcacctgtagagtgtagagaagttgctgttccgttgcctgattgtgtcccaaaagacgtgtcttaattacgaactcatgaacatcatctagcaatataaattctagaaacccatgcatgcatgcgttgctttctttaatatttcatgtgcttttcttcaatagaaaatgttttgggtttttatcaccatacattcgttatgagattaagtgcttagtgctaagattttggcaaataaatttgtaaaatttcaaaaagagaataatataacttctttgattccttcaactaaaaaaaacttttacactctgtctatgatagttacaaaaatcccttgccagatatataatcgactaccacgacattggttaattactatatctgttcctttatatttgtcgtcgctaatataagcattgttcatatttaaactttgatcatttatcttttttcttaaaaaatctaaatacttaactagatgaatcttatcaaagtgtattacatactaaacataaatttaatttaaattttcatttatcataatctaaccatttaaaagtttttagcggtccatgatgagtacgaacagagataaatataaaggaatgtatggagtagtttcatccttaaattgctagctgaagacacaacaaaatataaaggaatgtatggagtagtattttggaccttggtacgcaaagatattggtttaaaataaattaattgaacttgcatgccttagctcgaattattaaaatataacgacctataatttagttatatgaaaattttcgtcaatctcaatataaggatttgctaaattttcgtcgatcaaaaatcaagagaaaaacttccaatatttcgtccatcgtataattacattaccattatattacgttgtagttacattagatttctttcaaaattttatcgtagtccataaatatattcattattgaccaaataaaacaatgcacatactggtttgacttggcaccctatttttatagtat

SEQ ID NO: 16440 - DNA, 3433 bp, Oryza sativa
ctctgaaagtattttgacacatcaatggtggtagtagtgatgccatcttcccaaccctctaaatgactcgtccatgttgcatgtgacaactcacgctcgcaaaccagaacctagaggacgactacgattggagcggtgatcatcttaatgttgtgtattctatttattgtttgttgttgcttcaagaacagactgcttgacctacaaagcaaacaatcgtccccttccaccctccgcctttgcctccgtgctgctgctacttcaatatagaaaggacacaaatagttaaaatggacaatcgtttgcacataccctctaatttattggtacggtcatatatatatttttttgaatgaatgcattattttaaaagttttcacgagatttaatttaatttcttcaaaaagaaaaccaattccacctatttcttgaaagtcgtactactatgtctatactaatatgattttcacatgacccagtaaagatcagtctccggtaatgatatatgtgtatagttattgtatttcaagcaaagttaaaaaaagtaatccattaagcaacactgccgcaaagatagcatacctccgatccatcaccgcccggctagatactcccttttttttttctctcgcatggaccggccggtcggcggacccgggcgtatatacaaagcctatttctccgtgcctttttgtctccccacccaagatgagcgtaccgcacagtcgcacacaccctccctgccgtagcgtatataggcccagaaagcaagagtcgagagaaacagaaagacgccgagacgcggagaggtgctggccggcggccggccgcgcgcacgcccgcacgcgcgcgcgcgcatgtatatgctgtctccgatccgacgcgacgatgctccatccgatccgacgcgacgtgtggagctagctagcgcgagccgcccgtacgcgatgtacgcccgcgcgtgccgcggtcaaccgggatgtggagtggatcgcacaggatcagtactgctgctgctgctcttttattgctgcgcggagtgtcggagcgctagaccgagagcccggccggccctgaatcacgctcgggtgtgaccccatgaggtgactagtgatacggtgatgccgcgagctttgcctcttacggcaagtacaataacttgaaattaccggctaatagtaagcttacgttggattttatacctacgtggtggagagagagtaccaagagaaaaacatcgtcgattaatctgtcgacgatcatgcacgggcaccaatacacctagcactggtttgaagcctttctatcgacagcaccatcgacggaacaaaaaattagcatgaataatctttcctgattggcttggaggaaagagaaaagctgggaaggagcgagagagaagtaattaaataattattgatatgtgtgctgcagtaaatgtaaagagacaactattatatttattatctattaagttacctccaaataacgtgtataaagattagagtaagcagtcgtcttttttattgcccttgcccttatctcctctgatcacaactacctcgactgagtgcgtgcgtgggccatccgtgtgcctgcctgcctcactggccgtcgtcatatgacaagcaatgtgaatatagtgcaccgggcacggcctgtttgctgcttgcattccctgcgcgcggcaatgtatactgtagatgaccgtgaaattcagcagtcgatgaaaatctgaaatacttccatcgagagcatcggctctgcgccggatggccaatatcaatcaatcagcatttaatttgacaattttaccttttgtaaaaactaatttcgcaaataaaccgcggccaaaactacccttttatttagcgtcaaatcgtatggcgctaaacttagacatatcagcgtcaaatagcacggcgttgaatgcacgttggcacgccgactcagcctcccatccgcggtggcacagcattcagcgccagttgacgtgatgctgaggtgtctaagttcagcgtcatacgatttgacgcttaacaaaagggtcatttttaaataagttttggtcgcgattcatttgtgaaattagttttcggagaggatcaaattataaatttttgtgaatcaatcagtccgtcctccatatgtaatcaagagcgaggaaaaagtacaccgaaggtccctcaacttattatcgagttataaaatcatcccccaaccgcaaaatcagatatacggcgtcccttaactaatcaaaatcggtcccaataggtccttcggtggttttgaccccgattttgtcctacgtgacggctaagtcagcgtgggacccatgtggggcccacatgtaaggatgccacatcatccttctctctcccctcttctcttcctcgattcctcctctctctctctctctatgtgcctgtagggcgccggtcggcggggcgaggcgggagaggaggagggcggtgccgcaatggcggccggcggtgacggccgcagtggggaagcacggcggcgcgggcgggcgacggggaggcacatgcgcctagttggtggtggcagcaaccgtcgttgatgcctggcacggagaagcccatcgccgtcgcggcggtgcgctcaaccgcggaggacggggtcgaagaggtcagcatgggcggaggattctggcgggaggaggaggaggtcccggtggaggagcatggggagcacgagctggaggtgagatgagggggagttctcgaagctgccgacgccgaaaagcgatagccgcatgggggcgaggcgacgcggtggcggagacacgggagaaggggtgggcggcggcaaggcgaggcggcgtcggcaggcgagcgcggtggcagagaggcggcatccgcatggtcgcgggcgacaaggaggcgcgggcgtcgacggggagacgggaacggcgtgggcggcggggaggtacggccggcgcgggtggcgaccgccgcgccacagcgacgtcttcacggcccacgccgccatgattgttgccttcttcgtcttgcttggggccgccaccacgccgcgagtgccaccctgcgcgcggctaggccggcccgcatgggcgccacctccgcgaccacctcggtgccagcccctcctttccattaccaccgccgcgcatagtcagccgacgctcaggcgagcacggctgcgagctgcgccgtggaggaagaggaaggcgggtggacatgggcatcggtgaggagctcaaggaaggagaaggccgggaaggtcggcgtcgtcttgttcctcttctgccattcgccaattgcatctagggagagaagagaagggggaaggagacaagcaacagcccctctccgctggcggccattgcgagacagaaagaagagaaaagagttgggactatcatgtgggagccgctgctgccgtgttgccc

SEQ ID NO: 16441 - DNA, 14824 bp, Oryza sativa
  unsure (1)..(14824): unsure at all n locations
ttccccagtctgatggtagttgcctacttgggacagccgaatctgcgaggatcttcggtgatccggatcagaatttccatgtctgttccaaccgctatggatcggctgcatgtatcagcaggagttcttttttttaatgctacaattctccaatctctgaacatgtgaccaacaaccaaacagttttttttttcttttttcatagaaacttgaaacagggaaatcaatcagtggaatattagatcgaccacgatgcagcttatggcatactaattctcaaatcaaacatgcatgcagttcacaggatctgaggaatttaagctaagcattgacgcgggataatcttgaattcttgacaaaaataagaggagcagtttatgacagcaaatattcacattttgaaagtgtattcctcaaagattcattctacaatgttctgtagttaaaaccacaaagttccaatatcctacagcaaatttggaaaaaaaatatatgatgcctttagactcttgtttaatgttcctcttcaaagagtaggcaaagctagcagcaatgcaaaaatagcttatcttggcagaaacagtcattttcacgggtccggaactgagttgaagacagcatgataattggagagatcatagaacgaagttgactagtccctgttgccccagtttcagacgttcctcccaactctagtgctcgactgagggaggctaactttgactctactcccaatatatgtccttctaattcaggtcggttttagattgcataaattaattaaggcctaattatgctacagcagctagtaattagcacctacgattttgttagatatgactacacagatataaaatctttcgatttgccgcgtgtaagcactaaacaggacaaaagtactactctagtacttgcaatgggtcctttggagcttcatagggccagatttaagttctatattagttaataaacacagaaaaaaaaaacccaacgctagctataattcgtccaaaacaaatcgacaatggagtactacgcttgcacgcatgataaaagttaattagcaacgttaacaatcaccaaaacattgttttgaagtccttaacgtacgacgccaccatcggattggttggcttttgagttggctcttctcccactagactaatctcctgaaaatctaattaatctttgcattggcctggtccaagttgctgatgactaggattggcacgatcaacggatcaagcctagatcatgacgagagccatttgccggttgtcttctcccaagtaggcttgtttagcaaacttgctctatttgttttcggcaaccagccaaccacggctcttatcaaaatggaaaagggaaaaaaggtaaagtcgcaatgaagccatcgaggctgatcactgatctgttctttctctaccgatcggccggtacggtcagtgtacggctctaaagaatcaggcgagctcggcgttgtcgcgttaccattgcactgaccccagctaaccacttgtttaattaacccgaaaaaaattggacatggtcaccttcttgatcgctgctgactcattttttttgagagagagagatgtaacatatgcagttgatgtaagtatattattactctaatgctaatgcagtggttggccattaggtcagtgcatggcgatgcaactagcaactaggcagcaccagctagatgctcatcgtcggttagtgctactgttgccgtcatgtgcatatcagcagatgcatatggagtttgtttagtagcgagggagctgactttttgagatggcaagtgatcgatggatcgaacgatacgattcagggaagccctatcaggctatcagccgatggcgtgtaaagtatagaagacgctgatcaagctgtgcgtgctcctaccgttctaacgtacgaaaacaatatgctttttgcttgattaaaaaaagaaaaaaaatcctgccttttcaccctacatacatgcatgctcttgcttgattagaaaaaaagacaaaaaaaaatcctgccttttctccctacatgcatgtacatacatgcttttgcttattagaaaaaacaaaaaaaattaatccctctagaaaaaatatatttgatgtataggataagatttcgttaaacttttaaattctaaataatattatgataatatttattaggaaaaatatacgatgccactttttagtttctacactagcatttaagaaactacttataattaaagttttataagtttaactggtccgaaacattaaatatattttattgaagggatattgatcgaagagcaagagaaggataaatatcaataattatgtagtgtatctacatttaaacatagagcttacctattaaaaatacaagataaatagttcggggtctttaatgaaatgaaaggataaatagatttaatttccatgcgaattcaangtaaactccttgagaaataaaattaagaataagctacttgggagttattttcgtgttgtttgacagctaaggggccatggccagcttcctttgtgcttgcgtaactgttcctgttagctgcaacgctgttgcagccaggtagccgagcagttacaatttattttagaaatgttattggtaactaattattttacgctaagtatttgctttccttaaaaagttagccaatctctgtaggtagccgcatccagctggctggcttctccatctcatagagtatacaaatcgtgtttataatagtcctactaccactctcagttagtgccgtacggcacgccccgtaattttgaacggcaacatttcttcctaactctgcatctcacccaacaagagcacttcattcgtcaaaaaaaaaaaaaacaaatctgtgataggacatggaccaatcttaatatatatatggccaaattcgtaataccagaatattacatttaatatggagtagattggtttttaatatatgtatgtccaaattcgtaataccagaatattacatttaatatagagtagattggttttttatggaatgaagagagtactcaagacttgattatgcaataaactactggagtaatggccatccttgatttttttggtctgaactctgaagaaagatttcgcccacacgtttcctaccaataacatgtgaccagtccacgcaggctctggagtaccgtgcagggtttgggccatccgtaccgtaccagcagtccagtccagccccagtgccccactagctcactagcacacgattttgctaggttacacatggctttcgctgagtgcaagcgtatgtgtaaagacgtggatccaccaaaaggtgtggctctatttcaatcaaacttataaagccgattaagtggtctctgtagtactcactctatctatttttaatagtaatatttcatcttgtcacatagactaaggataagtaattctacttatcattcatataaacatgctactagtcattcctcgtaaacaagcgattcattgatatttacgtttctcaatgcccatgtagccaatcatgtgtggaagaatggagagtcatgcattaaatccgagaaagtcattaaaatgatatgttgttgaagtgaaatatgcttatcaaaaataaaacttttagatttggaaatatgactatctaaaatagatggaggaagtaccatttaaaggaagattaattgggttcactcgttttcaaaggcctacatcaaactttacataaagtgagagaaatgccctatatctcagtaaccagaatcttccaagtgcaaaaccgaactagtacaaagaaaggaaaagaatttgcacaatttctggccaaacaatccagcacaggcgcgagtgactccgatccgcacgtgtactacttgctttgctgcttccaaatcttctacgactactaaacgtaccatgatagtacatccaaagcgatcgaaaccggaaacctcctctcacgagtcaaaaacaagttaacatcacgcttggaaaccgggcacccgagccatctagcagtacacaagtgtaccactcaagagtactaccgttccatgcatccatccggccaaaacgccaaagcgcgcagtagaaaaccagcagaaaaaaaaaatcctcgcgaaagttgccgtacgcacagggatgactgacacggccgctctccccgtcgttgccacctccatgtcccctacagactaaccggagatgcccccgccgatgtgaaaccgatcggcagcgtcccgtacgccgtagctttccgcgcgacggaggcctctacacgttcgccttcgcacgcgtgcgcgcggggccgtcgatggatggagcgagctaagaatcgaagaatcgatgacacgggcgccggtgtacgctccggccctccttcgatcggtttcttcctgccgaccttccacttccaaccaaggcgtcgccatcggcagtttgggtagatattgacgtgggattgtagtggtgcagtgcaaggggtgtcctttgctggcgttactgcgttttgctcgttcgagtgcgtacattctgatttctgcatcctctggctctgtcccgggatttggacgtacggcctacggcgcgtgtacgattggatggaccgggtgacggggtgagtgaggcagcttaaccaaatcgaactccacaagtcactgatgaataatgctgaggagctgcacggtcgtgggaaagtcttccagcgaattaaggacgtcttggttgagaggcggtatccaaatcaaccactacactaataactagctgccttcgtttgcattttgcacgagtttgagagagagcagcggggccagatccgcatctcgcgctttattcgtttctatttgaccggcgaaatgttactttggacttgtggaggattaatatatagaggtgttacctaaaagtttcagtttgcaatttgccagtagtgtgcatgtttaagaaaattatctacgggggagctttccaaattttatctcagggttgcatggtaaaaaaggttatccatgggggaactttcatactgtttgctcccaaatgctttgatgacatggatccatcagtacttttacggttactagtagtacatttctttaaggaaagattatcgcctctttcccccttgctcgctttgtcgacgcacttgcctacatcaacagcaccgctttttgacagatatgactgcgaaatatgatcttctaccgatttgctagtaatgtactcctacgtagtacgtaacattggatgcaaaaccattggtacaagattatcaaacggagggaattaaacggacgaactgtgtgtatcacatggaagagctcgtgaacagaacacgttgtagcactgtacggtacccgtcagagaaaccgtaaccgagtaaccgaccacgctcgggaggtcgccagtggccacatgaccgcaggtccgcagccgtcacacgaaccaatcatgcatagatagaaggccaaatggacaagcagacaccaaaaccaggctagaaacgagagcgagcctcgcgcacatgaaacccctccgttttctcggcctcgcacggggaaacgacccgtacgcgcgccacgccgtgtctgctgctcgtctcctataaaacaacccgttgtcacgctcgccttgccattacaacgtcgctagcttcttccgctcgtttagaaaacgccaccaccaccaaagtcaggcacccccgccgagagagttagctagctgcgcgcatgcaggcgaggcggcacagaggattccggctaggccggaagctgctcgggctctggcgatgggcgctctgccaccggcggcggcggcgcggccgcggctacctccgcctgcagccgtgcccgggagctgcaggcggccgctcccctctgctggccgccgggagcgtcaagaagcagccgccgccgccgcagcagcagatcgtcgtgcatcagcgtggtggggagaaggcggtgctcaagtgggggcggtcgctggcgcggcggatgaggctcctgcggcggcggggatccgagcggctcctggaggaatcccccggggaggcgacgacgcccaaggggcaggtggcggtgtacgtgggcggcggcgagcccggggagtcgatgaggtacgtggtgccggtggtctacttcaaccacccgctgttcggcgagctgctccgcgaggccgaggaggagttcgggttcgcgcacccgggcggcatcaccatcccctgcgccgccgcgcggttcgagcgcgcggccgccgtggccgccgcgggcggcggcgggaggaaggtgcccacctggtggtagcacgtggccaggccgcggccggtgtacatacatacacacgtgtcatgtgtgctcgatcgagtaggactcaaacgtgtacgtgtattctttttttttttggttttgttttttacttcttattgttcctcccctttctgtgtggatgcgcatccatctctgcatgcgatgtgaggaggcctagttagatttacagacggaggatgctactaaagtaatactataattctttttgactcgatcaacgtgttcgcatctttgcaattaggactgtgtttaattccacgttaaagttgaaagtttgaagaaattaaaacgatgtgacggaaaagttgagtttgcgtggataggaaaatttgatgtgacgaaaaagttggaagtttgaagaaaaaagttaaaatctaaacagggtctagacgaccatgttggagaatgaatgataaaacgtgaacgtccagtgagatcgatcctgttcatgatcttctttaatttgctcctccgcacgagcgacgaattatattgtttttttttgagaggacaaattatatgttcttgtactccataggagtagtgttgctccagttcgtgcaggaattgattaagctgtggagttctaacgatctgctacttcctgccggcttcctgacctccagtatcgctgaagcgtgtgcagtggtgaagtacttgcgtagtccgtacaaactggtcagtttggcgatgcagcaagcaacttccacgcaagtggcccgtgctgtactgttaagccttccgaagagatgcttgcataggccctgtttgaaacaaagaatggacaacacaggaacatgaaaatatacaggaataaaatataaggctcttttgaaacaaatgattttagaggaatttaatcctacgaaaaaatttcctatgtgatcatttgggtcaaagaaatagctatccaaaaattctgtgaaattgctttggattggctcaaaacatataaatttggaagaattctaacatgagcttcaacctctggggaaaaaaatccattgtgtcagtctctcttttcaattttttatgtttttaccgcgctccatcgtaatttctataggtttcccacatttttttcaatctataggatttgaggtgctatgacactgcaatcctgtatttttcatgcaattgtgttttgagaatattgtgtttccgaaggagcccttaatttgtgtaaggtaaaaaacttaggaattcaagtacatgaatagtgaaaattttgtgttgtttggatcacatggaaaaaaatatacgagagagacatacaaagccatgaatggaaaaaaaaactgagaggaggaggagaatttcctttggctcacacagtcacactgaatgcttttctttcctatggaagtggaggatttgctacctttatatacaaaggaattcaacaacatatttcctttgtcccaaacaggtctatagggaaaaattccaaagcaatgcaagcctctaaacttccttcaaaaatacattgtcccaagcaggtactgtagctgaagccggaaacagagtgcagcttgtctgccgttgcagcggctccggggtcgtggtcactgcacctgcacctgcaccccaatttgagcacatcgcgtagagtaaaattcgtttattcgcttgagacatgagaaggtgtttggtatctgtacttctccatggcacctatcatcaagtgagagttcagaaagattttagtgctaatttgtaatttgagattaattggccatctaatcatcatctgctgaagttgttcgggattttggacatgatgagccatcctataacatcagggctcatcttctcattgagcttggaacttgatttttagagaaaagttcagaaacccggcttttaattgaaagccgcatagcttggaacttaataccatgaacgtaagaagtttctcgtctacttgtgttgagctagacgcccatggctcgtacaatgatacaaatgatggagatgtaatggactatgagggacaatcatgcacgatatacagtatgttgatgtccattctgaatcccagccccaatctgacttcctgtgctcgcgctatttttgcacgacggcgttacgctatcgagacgggcccggggacgtgtgggcacccggcacacaaaaagatcttactgatgaacatctgaatgattggcctctccgaattaattgctgaaactatggtgaaagttacaacaaaagaatgaacgcgattgacctagtaaaactgatcagaaaactggcgcaaaaacagagtagaggagcttctggccaattgaagacgacgactagtgggatactgcgttaattataactagcatggtggcccgcgcagattacacggctagtatcattatattttatctcatataatagcatatatgttttttaattatattattcaaatatattaaaatgacaacataattttatattttgcaataactttacaaaactactaatgtgtaatattcatattgtattttttatatgtgttagttattaattatttttaatatcaaattttagttatttgtaaattatatatattcctaaatggactctagactcgtcttttaatatttcttttttttatttcgaattttctgtaaattgtatttctatatggactctacgctcttcttccaatattatttatttttatttctgaatttttattatttctaattgtatttctatgtgggctctaaactcatctttcaatattctttaatttttaatttcgaatttcagttacttctgaattgtattcctatattgactttaaactcttcttcccatgtttttcttaatttcaaattttagttatttgtaaattattttttatacggactctaaactctacttttaattttattatatttattttaaattttagttagttttaaattcctatatggactctatattctacttctaatattccttattttttaattttgaatttctattattttcttaattgtatttctatatggactctatactctacttctaatattccttatttttaattccgaatttctattatttcctaattgtatttctatatggactctatactctatttctaatattccttatttttaattccgaatttctattatttcctaattgtatttttatatggactctatactttacttctaatattccttatttttaattccgaatttctattatttcctaattgtatttctatgtggactctatactccacttctaatattccttatttttaattccgaatttcagttatttcataattatatttctatatggactctagtttcctcttctaatattccttattttttaattctgaattttagctatttctaaattgtatttctatatggactctgttttttctttttctccgattaatgtgagaatttctaggccatgagagcgaacgtggaggctcctttttctattcctttaataatataatagatagattgttatggcgatgataaccccatccactggataaacttgtaagctactccctccatctcaaaatatttaacgccgttgatttttttaaatgtttgaccattcgtcttatttaaaaaaattaagtaattattaattcttttcctatcttttgatttattgttaaatataattttatatatacatatagttttacacattttacaaaagattttgaataaaacaaacggtcaaatatgtttaaaaaagtcaacggcgtcaaacatttagagaaggagggagtacttcctctgttttataatgtaagactttctagcattgttcacattcatatatttcccccgtttcataatataagtcattctagcattgtctatagatgttaataaatcagtatgacttatattataaaatagagggagtacaatatacctgttatggtgaggcacagaggaagttccttgaagaatctgagtacagtcaggacctatcatagtatcttgtaccactatcggaaaatttgggaggtagtacggagtagtatactaggactatgtcatttttgtttcctttccagaagaaattagttaagtttcttttttttttgaagggaagttaagtttcacaccagtgagcagctaacacactaatgaaatgggagaattatatagtatttatatactcaacggatacatcaagttggcccatcaagcagacttaacaacgggagtacattatgttatctatcaaccgggtctgtatttctttcttctttttttttaaagaagcctgtatttcttttttttttctttgcctgatgaataagaatcaacaagaaaaacaagcaccatggcccatgggatatcacctctaccttttctactctttaattgcaacaacgataggggaagacaaataataaccatgtgacgttaattttttcttcacgaacatacaaaaaggattacacgtagttctataagaataaagtagtaacatgttacacagcgtgacagtaagaagccatcgcagcgaggatgtcaaactaatatatatattcaatgaacttttgtgagagttccaatcccaatcctgcgtatctagacatcgactagtttagtacatggaacaaacagaacttctgttcaatctatatagtatagaaatcgatttgtgggacccactagaacccacacgtaaagaaaatctcagcctctcccgcgtcttcctctctcacgctcacccctaacgtttctttattcggttgtatgcgactcctatctggaactcgattttttcactgacacacatgattcgactcccacagtgtatttggtttggccttttcatgctaggttagatataatcctcacgttggatgtgctcttagacgcatctggctaggaggttcccctgaaaacatcaaacaggaaaaactatggaagcaggggaattctgagagagaaaacgacagacaactgctcttgtgcagtactcccttctgctattgcgagctgaagaatcccgtagttctctcttcttgtaagggtacatcatgacagaagagaatggtgcatagttgcttgaaggggacagggtcattgtccaatgtccacaccaggattgttcagattctgcgaacaaaggtcacacgtaatcccaatcccgtcttgggccagcatacataggcctcacggagcccgcattaccgttccggcccaacacgtataggccgcacggaggtcgagctcccgttccggcccagtacgtacggtggcgcgtggcttttggtcgccacggtgtacaggaatctctggtgcgagcaacgccgcaccaaccgtccgcgtcgtccgagataagtagcttctagacacgagagggcgcgatcaaaccaagccaaactaattctcgtatctgcatgagctacactggtcagtggtcgctgcacgctccctgatcagctacgcccatgcatctactcagcggctgcgtcgtcgccacggccgtcgtgctcgtcctcatcagcctcggcgccgcgccaccggctgccgtcgacgcggcgacggccacgttcatctacgcgggctgctcgccgtccaagtacgagcccaacaccgcattccagagcaacctcaactcgctcctctcctccatcgcctccaccgcgtcctcgggcgccgcctacaacagcttcaccgccggcggtggcgccgggccggacccggcggccggcacggccgcgtacgggctgtaccagtgccgcggcgacctgagccccggcgactgcgtggcgtgcgtgcggcagacggtggcgcggctgggcgccgtgtgcgccaacgcgtacgccgcgtcgctgcaggtggacggctgctacgtgcggtacgacgccgcggacttcatcggccgcgccgacaccaccacggcgtaccgcaagtgcagctccagcacgagccgcgacggcgcgttcctgagcagccgcgacggcgtcctcggggagctgcaggcggcggccgggtacaagctgagcacctccggcacggtgcagggggtggcgcagtgcctcggcgacgtcccggcgaacgactgcaccgcctgcctggccgaggcagtggggcagctcaagggcgcgtgcggcacggcgctcgccgccgacgtctacctggcgcagtgctacgtcagatactgggcaaatggttactacttccgccctaattcaggtatgcgacattgtaattaaccaaccaagcatgtcacgtactactaatcgcgtgcacgttctaactattcatttcttcctataagttggaataatagttaacctttcttattataatttatatcgaacattttttttagtatttggagaagtttgaagtgcacgaataattcgaatatttagtatttcaaaaagcaggggcgatccaaatcttaaaagagaacctgtgtgtaagggccctacctaatgggcaaaatggtagtagttggctagatagtgatcactagtgagtgaggtgaggtctctatggaagtgagaataagattccaaactggtaaacttccaaagctgataaagaggacacgaagaatatattcaccggcataaacttttcgacccttttggatcgatgttaattaagtatttaacactcaagacttgatgaggcgttctagctcatttagtcgtctagcttagcgctttttagccgctatggagaaaagctagcgcgcgtttgctccccgtgcgtgcgtgcggatcgctttgcatatatatggttgttaattagtcatcatctccctttggcttggtgacagataactctggagacgatgttgggaggactgtggcgataataatcggtatcttggctggactggcactcctcgtggtgtttatttctttcctcaggaaagcatgtaagttctctgaattatgtccacagagagatacactttaatatagccaagtagctaaccaattttccaatgcactatacgcaggttagcagctgtcggcgtagccagcttgggttgaggacgtgaacaacaggcgatcgaactccattcacggcatcgcattcattttgttagttatagcagagattcactgatgctctacttgcctgagatgcactgtcttgtttcagtcggtctgcagtctgcaaagaaaaagaggttgatctgcgtgtaacgtaccatttgtttgggttgcactgaagattggagtattgaactgcaacggcagttctctcctcactgccgagttcagctacaacttactccatccgtcccaaaataagtgcagttttagcactgttcatgtccaacgtttgaccgttcgtcttatttgaaaaaagattataattagtatttttattgttattagatgataaaacatgaatagtactttatgtgtgactaatttttttaatattttttataaattttttaaataagactgatggtcaaaacgctgagcacacatatctgactgcatttattttgggacagggtagcactttcgtacctacacaattcacatcttgcttgctgcgctggagattgaaacaatacacgtaacgtacggccgcgttgccagcccactacaaatcaccatggccccgtgccctggcccacataaatcctgttctcgaccaactagaatgggcctcaggtaagtcgcaattcgttcccagcccactacaaatggcccaacgcaatcctaaccatgcagggaataagtccactttaactcccttaacagtgacccgaatttaatccatgactctcaaccgtaaaaccagataggaagtctatccggttaaagtgcactttctatctagttttacagttgagagtcatgtattagatttaggtcatttttaagggagtcaaagtagacttgttccaaccatgcagtcccccgagacgggagaaaggagcagccggactcggtccactaaaagaagggttaactggatcgagcgcatctcaagcaagcagagcgcctcctcttgccgtccttcgtccaggaggacttcagctgccgcagcagcagtggcgcaggtagggaggtgccaaagggtgccaacaccctcctatctaaacactatcaccattacacccctatgtttttactctatattaagttagctaagataagtatttatctagtttattttgtatagtttgaaagtattatcagtttagttagttagcaagtctaaaaatattagcaaaaaacatgatatacaaaattagtttgtgatttatcatctttttcaaagtaaaataaatgatacttatttgtaagattatttaatagtttacattaaaagaatttagcaaaaaagactagtttcaaactttcaatgatattattaaagagctaaaattcaagtttttcttaaagagctacgtattgcttattattgacggtgactatttaacctactttactatgtaaaaactctctttatataaaagct

SEQ ID NO: 16442 - DNA, 1807 bp, Oryza sativa
aactccagtacgatgaatgcattaaggactgtgataaggctgtggagaggggaagggaacttcgtgctgatttcaagatgatctcaagggcactgacaagaaaaggaacagccctagccaaacttgctaagacctctaaggactatgacattgccattgagactttccagaaggctctaactgagcatcggaatccagacactctaaaaaagctaaatgaggctgagagggcaaagaaagagttggagcaacaagagtactatgatccaaagttagcagatgaagagagagagaaaggtatgggatccagtagggtatcatgctgtcatctctagttctcccccctgctttatttatgtcctcacctgtcccttgcagagatttcccttgctgccatattttttagagttgcaatgtgccatttgtaggttgactggctagctaatccttatggtttgtaggtaatcagcttttcaaggagcaaaaatatccagacgcggtaaagcattacactgaggctatcaggagaaatcctaaggacccgaaggtaatttcttttggccctattgcttgaacttgcttgttcgaactttggaaatataaataatgtactcggtttcttcattttcttgtgttttgaagtttgacttggatcattgtttgtcatgtgtgtatgtgtgagtttcaactatatattacgcaccatctaatctatctgtatgtatgcataacaaaaacgtcttttgtgtattactgttttggattgctctatatcatcattatcctaaattactgtcatttttatttatcacctgtttgcatgcatcccttaacataactgcttggggtttcaattatctacaggtgtacagcaatagggctgcatgctacaccaagttgggagccatgcctgaaggtcttaaagatgcagagaagtgcattgaactagatcccaccttctccaaagggtatacaaggaaaggtgcaattcagtttttcatgaaagaatatgacaaggcaatggaaacttaccaggccggtttgaagcatgatccgaataacccggaactgctggacggtgtgaaaaggtacagaagcgtcatagcacaaatcactagtgatagttattcttatgattgtatctctctttgctcctaatgagttagggcatcgcatgaatccgtctcacctccttgtttccccaatagaatccaagctcactcacctttttgtttgcataaaccaactctgaactattgcacatgtttgcaggtgtatcgaacagatcaacagggccaacaggggtgatttgactcaggaagagattcaggaacgacaggtaagcctgttgcacttttcatgccccttgttgctttaaaagttaaatactgtacaactgtattaactggtccttttttttttgtgtagaacaaggctatgcaggatccagagatccagaatattcttacagatcccatcatgcgacaggtaacacagaatatttgttcttagctgaaatttagatgtcagttcataaagtatcacaaatacctgtctgtccataatcttaatgatatcgaaaatgttttgcaggtactggtcgatttgcaggagaaccctagggcttctcaggagcatcttaagaaccctggagtgatgcagaagattcagaagcttgtaagcgctggaatagttcaaatgagatagtcgaccaaagcaagaagcgctgttcgtgtctatgttcattgctccttactttttttccatgctcagtctttgtggacttaagatttacacagtttggggc

SEQ ID NO: 16443 - DNA, 6572 bp, Oryza sativa
accagtactgccaaaacaatatttttacagagcagtttaaagagggttttgcactgggaaaattggaaaccaaatataagaaaagagttcaaatataatagctttatttctgaacacacttgagttggccaaaagcaacagaatgacaacacatataggcttggagatcaaagttgcatcttaaagatcgtgtcaatatccaaaacgacgtgttttttaacttgagtgagtggattgccaatattgacagttgacagatgcctaatccaaattcctttgctagggatagcagtagtggtagtagtacacgactacacgggtgtagagttggacggcggtgtgacaaacgtttcaggctcttaagccccttcctcatcctctgacgacgtgttgaatcgtttatttagttgcgtgaccatcgcaacacgcagagcacggctgaaactttgtgctgaggctctcgagtttctcaggaaagcaaagaatgagtaatattgtaatgaaagaacatcttcagtcttttgttttttttttctcagcaagcttttccactgctgcgcttatgttccacgttggtcgtgtttttttctttttattcaccgaattaatcaaactgattatgtgctccatacttaacaaattacgctttcttttaaagaaaaatttcttctaccgcattaaccacttgttttaagttatttattaaatattcaatttatctcttaatcagatagataattcgcgatcaacaataatctaaatcaaacatgaccaaacatagttacatgttttaccggttcaacaagacaacaactcaaaacaaagggtgtggtctccctttttttataggcccacactccttccaacctgcactggcttatgagtccaccatgggtcacacaacaagtcacaactcacacggctcagtcgagaggaggaattagctttaagctggtccatgggcccaattgggcctgaagcacacttggcattaaacacgatagtcatatagggaataaattcactttatatccctcaatttgtcgccgagtcttaagttcatccctaaaccgaaataccagatataacatgtcctttaactccttaaaacagtgcaaacttgaccccaagatggtttggatgacgtgacgtttatatggttgatttgactgggtcctcatcccacgtggtgaggcacttgcaatcataaaaaatgggtgggacccacatgatagtgttagattaaaaataaagaattattgtgagaccaacttcatcaccccttcctctacgctctctctctccctcccctttgctctccctttcctcattgtccccgacaccagcgcacgttgcagctgttgccgaccctgccgacgggtgtgggatgctcgctccccaccattggttgcctcatcctctcctacgcactgatgagggaagaaggctggaatccattgggcaatgttgaactcgagcttctcccacggctaggagtgaacctcgtcgatagtgtgggcccagatgccaagacgggcgacgctcggctgccgcccttctccacacctcccgccgtgcctttccacgccgcccgctgcgtgccgccctaatggagatgggaagggagaggaagatagagggagaggaaaggaagtaatcgaacaacacaggcggagaatgaactcctacacaatggtgcgaaagttggaggtgttgatgatgagcacggtgttgggcggctggtaggatgctctcagacgcttcttcggcagctttgacgacgtcggagagggagggtgcggctgcggcgcttgcaaagagggcacccgcgtaggcaagagccacgcgatcgaccacgacaggagaaggcgagacgggagatggaggaggagagtcctaggagcacggtggccggtcggtccggccccaacatcgaggaaggagtggagggcgttggccgcgggcgacggggagatggtcgtggtggaggcgaagaggctgcgcagttggttctcgcgaaggcgtgggcacatagatggatggacatgacgatggtggtggcggcgttgttggcttgtggtttctcgacacgattatgcgtgcgccgataatgagtcgacaatataagggaaaaaaaagaggaggaagggagagataaagagggttgatgatgtaggtcccactgcaacttttttttaaccaaacactgacatgtgggtcttacagtttttttaaaaaactttaagtgccacattaacgccacgtaggcaccacgtcagacgaaaccgtcatccaaacaaccttaggatcttatttacgctagttttgggagttgatgaacacatcatatctagtattacggcaacaaattaagagacctaaggcgagtttagttccaaacttttttttcaaacttcgaacttttccatcacatcaaaacttttctacacacataaacttataacttttccatcacatcgttccaatttcaacgaaacttccaattttggcgtgaactaaacacaccctaaaatgaacttattcttagtcatagatagggttcactaaaccgttttgggtggggttactaccatctcacggtaaggtggttatcgcaataactatgtggttatcgtaaagatgcattcgattatcatgagatttaccatgattttaaaaactgacaaatggtgtgttcgcaagtgcaggatggaaaaccatccctcctgcacgtaaaacggagcggcctttgaacacataattaattaagtattaactattttttataaaatggattaatttgattttttaagtaactttcgtatagaatttttttgcaaaaaaacacaccatttagtaatttgaaaagcgcgcgtgcggaaaacaattaagaggggctaggaacatggggggaacatggggttgcaaacacagctagacccttgcgttcccgattgagcaatcgaagtaaaaatcgctgccctcagagacaatagcttttggacgtgaaagtacagagggagcacgcagagaacgaagaaaagagaagcaacaaaaggcagtactcctacagtgggggtgtgggacaccatagccttttcaggcttcgcagctcctaggacaccggcaacaatggagcagtcagccagtcagcagtgtgtcctcccctgtcctgtcctgtccgctcgttcggtgaggagatcgtcacgccttgctgttgctggccctcgggcggtcgggcactcgggcctcgccgcctcggcgacttgggctaccggacacaacggcgcggctcccgagccgagaccgtaccccacgccacgtcgcaggccgcgacgatgaccgatgcttcctgccgcggcagagcccaaccacacacacactgcccccacttagagcaagttcaatagtatagccaactaccggctccaattcatttatagccaatctaatagctcattcatacaatagttacatactgcactattaatacctagtcccacatgttatagacacactgcgtcttggagtctgtgctacagctggctataaatctgtagcccgctgcttttatctctcctgatttatctttttaaaataatttatctttttaaaatatgtttgtaggtgacttatagcctgctattgtacctcctcttaatattcccgcgtcaccagcctacggcgcctatacaacgccctacgcttgtcgtctccagcgacctgattccaattccatgcgtgcttgcaattgcagcccgcaggcgtttcgtcagtttgtcactggcgccggcgtaatcaccggcttttgcacgcccccccccccccagcgggttgttgcagcggcgcatgcatgaccaagattgcgagaatgcaacatcgagcttgggaattgggatgaaaaccaacaaaaaccatgcgaatggaagagcattatgccttcattaatccatatggacgacgcgacgagcagcattgtcacgaaccatggaagaacaggtactagtagtactaggtggtactctgtaatctgtactcgatgaacatcacagagctagctgaacaagctccagcgtaatgtactttgttgtcacttcgtgtctgcgtcaccggcagatcggccggaggcggcggcggcaaagctagaagccggaaggcatgcagggaagactgaagagggagcagcggccacctggtcggttgtctggctagggctcgccggcgcgcgacggcgcgcggcaggtggggcaggaagcgcgcgccgcgagccacccgtccacgcaggcgccgtggaagccgtgcccgcacgccgggagcacgcggacgcgctcgccgccgccgtccgccagctccgacaggcagatggcgcactccgcctcggcccacccgccgaccatcgcgacccccgacgccgcgctggccgcccccgagctacccgtgttggcgccgtcgtcggaagacggcttgggcggctgcgcctgcgccagcgccggcgccagcgccggcgccccggagtcgcggcggcgggcgaggcagcggatgaggcaccgcgcggcggcgtggaggcagaaggcgaggagggagacgcaggcgaggatgatgaggatggtggccacgttggagaagaacgcgcgcgagctggcgtaggggccccacgccccggcgccggcgtcggcattgccggggttgggaagcggcagcctcggcggcggggacggggtggcggtgatcatggccgccgccgccgccgccgtcgtggcgttcacggagggcgaggcggtgtggttggcccggcgcgtcatggctttctcggggagtggcgtgtgtcgcggcgtgggagtgggacggtaggaggtggtgtccttgtccgcgcttcggaatggtcgtcgtcgtcgtcgctatgcgtggccttttgtacgcttcttttctttcctccagaactggtaactcgacccagaccccacgcttcgctttggcaggcacgaattttacagctttttcttttttgaaattcaacatctactactcctaaattttgccgccattttaaggtcgccggagggcatgaatgaaatcctgaagtttttatggcaatcagttcgtttaataggaatcagaattttttttgttcattttgtaagaggcctactccctctgtcccaaaaaaaagacaatctctggtttccgtgttcaatgtttgaccgtccgtcttatttgaaaaaattatgaaaaaaaataaaaggataagtcacgcataaagtattcatcatgttttatcatctaacaacaatgaaaatactaattatagaaaagtttcatatataagacggacagtcaaacgttggcacgcaatccgcggtttgccttttttttttttttggacggagggagtagatgggtctaacattacatttttctactcctacatgctcaagcatgagtatacattttatactctaccgcggtagtacagccaaagcatgattgtcccggtgcatgatgctagaaagtagaaaaaacgaaaccgtaggtatagcataatggcactagtgatcaatcaagatgcaaaatcctaggaaataggaataccactttcctaaaccaacaaacggcaatagttaactctggtcaatgccattcgtcccgtaccaagaacaagaaggtcctacgggaccatccactgcgtccatagggccatgttgtagtagtcctccaacttttaggtccctcgtcgtcttcgcctcatcgaacccatcaaaaggagacggccaggcccattgcgcccccccccccccccccaccccactggcccaatcccccagaccttgaagttgaaggagggttggatatcgtccagcggcagcgctcgtgactcgtgtgagttcgtgagcaggggagtctctccgcgccgtgtttgctgtgtgcatggcacggcaggcacgcagctttatttatctttgggcgtcgcaaaggcatgaaccagtatcatgactcccaggcgcggggcccaatgacccaacttggcagcgttgccagcgttcttcataaaacaaagcgatcaagccaggaaaaattggtaatttggtatagacagactccagtttgatcagattggaccatggttttcccagccgaccggttaccgtgaggtaaccgtgcgttccgtaaagttaaggtaggggtaatcggctatagggtttgataaattttatctaaatttaaattttcaaaaaagaaattggaaaaattcttgtaagtactacttatacaaattttgtgataaaaaagagagaaggttaacataatagactcttatcgtttatgctagttgcattaacacagccgtaacagttatacctgcacagttgtagttctttttttttcattgtggatgttgttcctgtaactgttactaggggtggcaatttttccgttagagccagggccgggggagaattttcacctgcgggtgagcgagggtggggatcggaattaacccacgggtaacccgaaggggcaccggatgtgagttacttcctccgtttcataatgtaagtcattctagtattttt

SEQ ID NO: 16444 - DNA, 18019 bp, Oryza sativa
cttagaccgaaaaatgtaagctcacataatttgtactcatccaaactcacataaatttcttaagaagaatctagaccacaaactagccatagtcacacaaaatatctttttatcaaaggtatattcttataagtaatttttattccacaaaattttctaaaggacatactgtgacacttggcatgaatctaatttaacattctttctttatcaggttataaattgaaaccattgaacgtactttgtcttcccgtccctaaaacattgtgatatatctgtaatattttaatatttttaattttaaaaataatttagactaataatatagatatttaaattaggtaattagtaaattcaaatcaactatagtttggaataaaaaaacaaaatgatatatgccaagtacaatctaataacaatagaatgcacttttggttaatgtttactcctaatttcttaatttctagtttggctccctccaccgttatggtaaaaaatcgttatgttttaactatttatctgctagagcatatgtaatatttatgtaaactatgttctttattaccaatcaaaatagacaccttacctactttcatcaaaagaaataaaaaacaacactaataaataatgaacatgattttagatgtagtaggtattattctggaatactcctcgtcggaaacatatggaacgcatttccctcaaaacgcaaaaaccggggccccgagccctcgacaccaaccccgtcggatgtgaagccgacggcccagatggaggccagcggtgccaatgcgtaggccacgcgtgcctctgcgcaaatcttatctcccgggaggctccgctccacttcccttcccgagtcactcaaaccatccaatccctccaccttcccttcccttgcccccatttcccaccgccgccgcgccttgcccccattccccaccgccgcggtgcggccgccgacgacctccacacctcgagcacgcgtgccgccgacgaggtgcccttctctctctcactctcgtctcccccattcctcccctcttcccgtgtcccgtcgtccacagctccccgaccaaatccctagccctactattccccacccaccaggcctccctcgcgtggtcacgccgcacgatcgggcccgacagtgccgccgcttcttgccctactgccgcggttctttaagagggttgtcctgatttgctgcagcccagtaggtattgtatatttttctcgttggtaaatttggcagcaaaaaaaaaagtgtttaataccgaatgttataaacccgagcatctcatggtgtctatatatcagcatatatgatatgttaggattggtaaggatgcatatcacacgattacaattaccaactccacctcgaagataataagcccaatagtctaaccctaaaatccctccctacctgtccggtccttttctcaacgattcccagaagcgccgcttatctcgagccgagtggccgacagcgccgcccaggagtcgaggagtcgtagctcgtagcgccacccttccttgtgcgcgcggttgtgccctttctcgccgccggtctccccgcttcacctcgcatcctcaacgtcaacagctgccatccgctcctcacgctggctatcgggaaggtcagtaggtcacgccgtctccttccctacttgcctccggccaccctaagaccccaactcgcctcttcctcgcgcgaatcgcctagttacccggcgggcgacacccctactcccgtgtggccgcgcgtcctcgtcgtcttgcttgccctgctttctttggctcacgagccaaacgagcccgctcgagctagacaactagccgagcctagcttggttttctagctcgttaggataataagccgagcctagctagaccgagccgagctggctcgacatccaccccctacacgcgtgcctttgcccaaatcttatctcccgggaggctcacttccctccccgagtggctgcgacgacctccgcagctcgagacgaggtgccacttcttcttctctctctccatcccccattcctcccctctcttcccgtgtcccgtcgtccacagctccccgaccaaatccctagccctactattcccgcgcccgcccctccctcgcgtggtcacgcccgacagcgccgtgccgccaccgcttcttgccctattgccgcagttcttcaagaggcttttgtcctgatttgctgcagcccggtaggtattatatatttttgtggttggtaaattcggcagcaaaaaagaaaaaaaaataataccgaatgttataaacccgagcatctcatggtgtccatgtatctgcatatatgatatgttaggatcggtaaggatgcatagcacacgattacaaccaccaactccacctcgaagataatatagcgtagtgtttgccagcttcgcacgttatggccgaattcttatgtataacaaatttaccatggtatgtaagctcaaaaatgcaaaactaattatcctcgaacctaaaaaagtgtatacatgcaagagatgatcaatcccacatataaatacatgcaaataatacacgccctgctcgacagccactgctgcagctgtacctaagctactagctgtggccgcggtgtgcatccacaaccgtagcaatggctgctcagcaggcccatgatctctgaaaaagttcctgcaagcagtacatatgtatgtacagttgtacacaccctcgcccctattcatcctcttaaaggagtaaggagtaatgacagtcgatatgtgttggttgattaaaatttagaagagaacgtttttgaatagaattgtgaacttactcgaatatcgttcttttgtgtattgcttttgttatgcttcacctgactctatctctgtgaaatggcagctagtatattgaaggttgaagctttgtgggtatccagcaagtatttcaatggcgttgctacagtttggaggtaccttggcccccaaacttggggaaaaacctcagctgttgcccaggtcacctgcacttacaagagttatttatgctgatccaagatttctggtgtcgaaaagtgggtatgtgaatgtgttctgatcagtgagatgtactaggaatactaaaataaaggacacattgatattataaaaaggcaagatttctgagtaaactgaagatgatatatctctttttgtgcagtagtggaggcaggcttaaacaccttgtatcacctactgctagtttacaatcacggacatcttctcgactatttaaccatgcaccatcaccgagatttcgccatcgaaggagttcaaggttcattgtcagagctgatgctgtgagttacttcatttgcttttcttctttgctggtattattagaaaatccagtttcctgacatggatttgatattttaatttacaggatttctattccacacttggtgtttcaagaaatgctagtaaatctgaaatcaagagtggtaggtgtggttttatttgtcagtttagggcatgcagtgattggtgctccgtacaatcgtaggagtattacccagctttgcttcttctctagtttgagcctggttgtaggtttgtaggtaccctataatttaccaaacaaaccagactgctttcatgtggctattagtcgtagattactagttttaaatcatactgttcacgtgtgaaacaaaatatatgtacaacagaaactgttaagcttcccagggaagatatgaaatatataactagtctttttcaaacttggccatagtgagctttatggcccacttgtttgttctcgaaagctttactattcctactagtaactcaaatatttgctatttcatctaatttgaaggctatctcagcaaaaccccttgaactattctaagacaagcctatgctgtcttcagtatcattttctgcaactgatcatcttgcgttctagactcgatactgtttatatttctgaaaatctattgttggcaacttctcattgatgcattgtttgtatggccctcaatccctgccctccacgtgtgtgggcagaaattttgaacaaaaatcccaacccacacccgtagataatctaggatttgtcctatccaaataatgcctaaggggatattatgttagaaatccttcagagtcaattttgatcaaaatatgtgtagtagtttaatgttgctttctattgtagttctaaaatggtccttcttttccagcctataggaagcttgctaggagctaccatcctgatgtgaacaagtaagtactaaccattatatgggaattgtgtttcagctacactcgatatattgcttctttttctcctttcgatccattataaacctgagtactagttgttgcattacctttttcataactacataatcaaataagcaattgttatgcttgtgtatttttctttagagatcctggtgctgaacaaaagttcaaggatattagcaatgcttatgaggttagtccagctaaccataaccaaatcccattgtttcttatgactatgttgttgtagggttacaggtgcttgccagctaacataaataggattgcaggttttgtctgatgatgagaagcgatcaatctatgataaatatggagaagctggtttgaagggtgctggaatgggaacaggagtgagtgttcctagaatgttgtccaattctgaagtatgatcagcatgacctttatatgatattgattgtatgaaatttgtgaatctgcaggattactcaaacccattcgatctctttgaatcattattcgaaggctttggtggaatggggggaatgggaggccgtgctgctcggaacagaccaatgcagggtgatgatgaggcctacaatctggtactcaatttcaaggaagcggtgtttggtgtagagaaagaaattgagatcaccagactggaaggctgtaatacatgtgatggaactggtgccaagcctggaacgaaaccaaccacatgcaaaacatgtggaggacagggacaagtggtctcctcaacaagaacgccacttggaatattccagcaggtctccacctgcaatacttgcggaggcactggtgaattctctaccccgtgcaacacttgtgggggtgatggccgagtgcggaagacaaaaaggatcagtctaaaggttcctgctggtgttgattctggaagcagattgagggtccggtctgaggggaatgctgggcggagaggaggccctcctggagatctttatgtgtttattgatgttctctctgatcctgttcttaagcgagatgggacaaacattctatacacatgcaaagtttcatatattgacgcaattcttgggacaaccgtcaaggttcccactgttgatgggatggttgacctgaagatcccctccggtacccagccaggcacaacgttagtgatgtccaagaaaggtgtcccactcctcgggaagtcaaatgctcgtggagaccagctagtgcgtgtgcaggtcgagattccaaagcgtctgagcagcgacgagaggaagctgattgaagaacttgcaaacctaaacaaggctcaaacagcaaacagcaggagataattccatgaggcttcattggacaaaatgctttggcaatatgcaattttaacgcaaattgcagtgactaagtgagcatgaactggtaaatcacttcacaaactgtacgctcatgctgcgccgtaccatcggtgggaactgtgaattctcatgtctgtaacttcatttttaagccatagaaatctagttccatccaaaacaccaaaacggatggtgttttacagtagcttgtcatatgcttttaggcgagcttattagtctatttttcataatactttttcacaattttgaaaggcctagggagaaatatttaatggtgcaaaagggacgagttttgaaacatttgtttgtcgcagaagcaccagaccattctgattgttattgtaagctgtaacatcaaagttttggcagcaggttttcatgtgctcttaagcgttgggggtttgttccgtttggttttcaactgtatgctagctttctctattagccaatgtaatggcagttgcaaaatctgttgtagtgcaggcgtgcagctaaatgcagtatagctgactgttaactttaagctgattgttccatgcatgtgccagtaaaaggccagtcaggaatgagtctcatggatcaatatatggtgcagacatgtcagtaggatataggagtattacattatagttttttcagcttcaataacgttcatgttagcttgtacattgtatggcaacccttccatacttgcgttagccacaaaagttcaccatgttagcttggctttagatcagtttaaactgtcctttaatagcaaattaataatccataaatgaaattttacttccactgtttaccagtgctactactgttctacctccagcgttcaacagctgagaaacgtgaggagtccagcaccagcagtaccatttactgcaatgcgagagagatgttctccgtttcctccttcactgaggcttaggagtaggagtagtagtgattttttcgtgtcgacttgtttaacattatcgttaacaccatcaagtgtcaatgccagtagcctgctgcttctgatcatttcttccttccctcttctaacgccattatcgttttatctcaccttgcatttatgttcaagtgaccatggttcttgacagaagcagcccttgttctttcctgtccctttgtttgttcagtacgctattattctcttgggtactagaccttgtataaaccggttgtgaaatcctcaatcaaataaaagttaactcgaaatttgtggcctgttccaagtgtttggcaaaccaatatgtatattatccacccgattatctaatggcaatacagtgcctaaaattcctgcttccggagtcttaaactttacccgaatccaatctggaaaccgaaaagacagctgcttggctgatggcaagtcactgggtacattgatttgtgttaattttcagtccaataaaacagcgcaaaaattgtaagggtgatccctctttagtaaagccatgcattctgcaaactctgttgcaatgcaagctgtatcctatatccagtgccgatgaaccaattctgtttgcagactgtaccctatctctactctacaagccaaccaaaggaaagtgtttgatctgcagtggaatactagcaggtattccaccatttcagggttgggagtgtgattgatatgcaggagattgacattgtgcagaacattggccgtcaggctgccgctgccgtcgccggtggtgtcggtgagaaagcccggtggtggtggttgtgccggcggcgaggagtggctgcaacaggatgggctgttgtgcatgggcggatcagcgggtggcttatggcggtggccacgctgttcgccggcgacggacccggcggcggcggccttcacgagggacggcgcatgatgatcctggataatttcgagacttcgggccggcgtgcgtgcaaagcccatacatattctacgcgcaactgtcacgcacaaaaacgaagtttttagtaccacatggaaaatctatgacgactgacaccggcataaaagacgacgcgctcgcatcgctcctggcgagctcggtggcgtgagcttgttaccccagctgcggggggggggggggggggggcgggagttggcatgtttcggctgctggagaaaatgaggtttctccctcgatcgaatatggatgcaaacatcctcccgactttggcccacgaggaagggaaggtgtgagtcaccctgggctcttgacggctgcgtcatggagcgaaaaggacgctgaatcgtgggaaaggtgtgtggtggccggtgcccgacgacggcgcctggcgatgggtggggagaaggtgagcagttgtagttgggacccgtgccacacccccgcacgtgcgcaagtccatgacgtgagcgctcccggtcattaggagccacgtcagctggcggcctccgccgttgagcttttccctgccaaccgacacccttctccccacccattggcgaatgccctagaggtttgggttgagataggagtagaggggagtgaggtggaagaagattgctagttggcttgtgggttccacgtgggccctgcactgactcagccaccacgtcaacaaaaaccggaaagcaatactaccttgggattaaaagtggaccgttttgcaagattaggggttcagggccgtttaaaactcaacgacaagataagggaccttagatgaacttttttgggagatgaggcgcctgtgcatatgacccataggcaggcgacaacgcggcagcagagcgctgcacgacctccgcctccccaatccgtcccgtctccttcgcccgccgccctcgactcccgtctcctcgcctgccgctggcgccgatctccatcctgctagcagaggtggcgccggcgtcctcctgctcccgccgcattcgcatcctaatccatcccatccggcctcggcctcgaatttcgtctcctcgcccgccgcttgcgccgatccccatcctgcgagcagaggtggcgcccggcgtcctccttcttccaccgcatcgtcgctcgccggtgagcatccctccctacccacacctcatcaggtattctgcgttatccctcaaaaagtttgggggttcaaccgaaacagggttagatctgcctctgcccagctccacctactttcaagttgttaattttgatttccgtttttagcagatgtaatttggttattgaatctcatccaaacacccttagaacgaaaaatgtaagctcacataatttgtactcatccaaactcacataaatttcttaagaagaatctagaccacaaactacccatagtcacacaaaatatctttttatcaaggtatattcttataagtaatttttattccacaaaattttctaaaggacatactgtgacacttggcatgaatctaatttaacattctttctttatcaggttataaattgaaaccattgaacgtactttgtcttcccgtccctaaaacattgtgatatatctgtaatattttaatatttttaattttaaaaataatttagactaataatatagatatttaaattaggtaattagtaaattcaaatcaactatagtttggaataaaaaaacaaaatgatatatgccaagtacaatctaataacaatagaatgcacttttggttaatgtttactcctaatttcttaatttctagtttggctccccccaccgttatggtaaaaaatcgttatgttttaactatttatctgctagagcatatgtaatatttatgtaaactatgttctttattaccaatcaaaatagacaccttacctactttcatcaaaagaaataaaaaatgtagtaggtattattctggaatactcctcgtcggaaacatatggaacgcatttccctcaaaacgcaaaaaccggggccccgagccctcgacaccaaccccgtcagatgtgaagccgacggcccaaatggaggccagcggtgccaatgcgtaggccacgcgtgcctctgcgcaaatcttatctcccgggaggcttcgctccacttccctccccgagtcactcaaaccatccaatccccccaccttccctttccttgcccccattccccaccgtcgcaaggaaaaatattattaataaacaatgatgttgatgtattattattaaacaatgatattgatgtatttctaaatattttcacgtattatttattaagtgtcagtgattgaaatggatcctggtcggaaatgaatcctggtcggaaaatggttactaatgtttttccttcatataatatttctggatatgtataacaatgtgggtcagcaatattgaactatgcaaaccattactctgtacaatcttttcttttcaaatgctggccacatttcgctcgagcttactgctcatgtatgcagctcatggatcctgagatctagacgtcaacgtgcttcctggaaagagagaggctcaggcatgagagcatacctctaaaataatgtccgtgcttacctgtgtgcttgataacatgggctcatcctgtagcagatctcattctttaagtgaggctgaaacaaccaaaaatgcaaaagtaagttagcactcggacttattgaacaagtaaatgctaactcaattcttgatttgagagttgccacatttggtttcttctaattcagctggtaacagtctgcagacattgacaggcgaattttgcaagagacaaaagcagagcaacacatccacaagctcttacttcttggtattgctaactttcccaaatttaagtggtcattttccttgtcacaattatctgtgctacctttagtatctattggttcagaaaattaattgtttatgttgttcctatttacctctataaaaaaacctttctcatgttatttccaaaaaaaaagaagataaataaatgtatcctagaaatttttagtttgaacttgttctcaatgtggatccatccttctttctctctctcaattgcttctgttttaaggtgcgggagaatcagggaagtctacgatatttaaacaggtgatgaatgttatattccatggagaatcataatccgtacgccgctagttagtctgatgtattcttactgttcacctgcagattaagctccttttccaaactggctttgatgaggcagaacttaggagctacacatcagttatccatgcaaacgtctatcagacaattaaagtatgcaatactggaaagggtgtgtcttttttttcttattgcaaagtggggattatgtaggagattcgactagggatttgtattctgttcataaggaaatgcgttcatacttttcctttttgtcgagtaatgtgttaaatgttaacagatactatatgaaggagcaaaagaactctcacaagtggaatcagattcctcaaagtatgttatatccccagataaccaggtttgtgcttactctttactcaacagttaaagctaaatctgtgcatatgaacatgtcttgttaaatctgggaatacaaacattttgatttgcaacatttctgttgtagtcaagctgctcggctctatgttttaacctgttaagaccttgtagactgtgctcggctctattgtagtcttatattttacacggtcattctataatgaaaacttgaaaaagatatctattgaaccgtacaatgtactgaacaaagtagaaaagaacaatgagattttgtaacatttattcttccttgtttatttgattgcttcagacaattgttgatatgctaaaaataacttggtatcaaatgtgggtgttataagattcaatttttttctcaaccaggttaaaaaaagtatacctttgtgcatttaccttgttccgttgctttggaactttaaaggaaaactgacttttcttaggcattgaaagacaaatatcaccagtttcacactgtacaccttaccaaccaattttgtttcttagatgtcatttactttgtcatatcatcaggaaattggagaaaaactatcagatattgatggcaggttggattatccactgctgaacaaagaacttgtactcgatgtaaaaaggttatggcaagacccagccattcaggtgaaaacaaatagccattcaaatcttttgaagttatatagttttcctggccaggtgtgctgaagcaatgctctatactgtaggaaacttacttacgtggaagtattctgcaacttcctgattgtgcacaatacttcatggaaaatttggatcgattagctgaagcaggttatgtgccaacaaaggtgtgctgtccatgttcatagacaattatttacatattctcagatatttgtgctgacaccatttcatgttgatttttagtctacttagtcagaggttgtcaaatggttaactatgtgtactgagtcagaggttgccaaatagttttaaaagatgggcatatgtttatccttatcttttaaataatattggaggctatcctttaaaattcaatattagggaggagaaactattattctaccgttattacgcagtctacataacgaaggtaaaaaatgtccctgtgaaacatagggtgcaaaactgctgtgaataaaactctacttatctaagccccttgagcttttgagttcccacatattaatcttatgacactagcatatattttttttgttcagttccttcaataagttgcaacccacaaatatgatcactgtaccatccacttttgcaaccatttcccgtcattttttaagcatagaaaattgtttgtcacttgtttaagtccacactgcatcaaaattccaattaacattgtgtgtgctaagtgaagatatgactccatatttctgcatttagcagtctgatggataatttgtgattgtaccttgtctaatggttcgtttgaaaggctggtagttgatcttccatacttaagaatgcttgcagtattatagttgtcaatattatgagtcattttgcaggaggatgtgctttatgcaagagtacggacaaatggtgttgtacaaatacaatttaggtaatctgctgacactattttttgcacatttttttgctggttgctctactatgtacagaacgacaagttgaagtcctttttttctcccctttcacttctaagatatgacctgagaggttctgaatgtagctgttttaagatgagttgaatcatctagttaactgggtttctttctgcagtcctgttggagaaaacaaaagaggtggagaggtatataggttgtatgatgtaggaggccagaggaatgagaggagaaagtggattcatctttttgaaggtgttaatgcggtaatcttttgtgctgccattagcgagtaagtacaatttttttgattgttgaacttatcctaatctgctaagttcttctcataggcttcttgttcatttcagatatgatcagatgctatttgaagatgagacaaaaaacagaatgatggagaccaaggaactctttgactgggttttaaagcaaagatgttttgaggtctgcatgcatccatctctgcaacctttgtgctcatgctttttttctcattttgaaactaattacggtgctatattgaccatcagaaaacatcattcattctgtttctcaacaaatttgatatattcgagaagaaaatacaaaaggtaaggcctgctctttgtaccaatgcatagtttagtactaaatgttaccaacatttatgtttacgctggttacgtaggttcctttaagtgtgtgcgagtggtttaaagactaccagcctattgcacctgggaaacaggaggttgaacatgcatatgagtgagtgcactactcgccctctcagatgaacatgggcatttggccatttgtaatgttgctgcatggtgcacttatatgccttgataagtttttccattctaatgttatatagtatcaaacgttcatcattactgtggcttatggtctggagtgacgttttacaggtttgtcaagaagaagtttgaagagctctacttccagagcagcaagcctgaccgtgtggaccgcgtcttcaaaatctacagaactacggccctagaccagaaacttgtaaagaagacattcaagttgattgatgagagcatgagacgctccagggaaggaacttgattcagagctaagactaggttgtaagtcacacagggaaggtaattaggacggcgagaggaacaaagtttcacactgtcacagctttatctgttgtaattcttttacacgtggaccattgattgatcttttggttcttactgtgggctgttcaggtctgtaccctattttttgttctctagttagccattgtgcaaattttccttgaatcagattctctacctgttgtctatgtgtgttatcttggtctgttaatttgcatagcccacttgttcattacaaaaggagatctttactacttacaaaaaaaaaaatctagtgggaaagtggttgcaaataattgaagaaattatagctagaaggtgtatccatggtggtggcttgagcccttgaatcccgttattttgcatacaattacatatgttattatagcttgcagagtacaccattagctgtagttacctggtccaccgtagtatacatgcatacagtaagcattaattccataactatcggaggtcgattttgctatatatttgtcgacaaatttttcctttgacagatgtaattacagtacaatcgtagtgtaattatattgtaacttgcatgtaattacactgtaactaacttgtatgtaacttttaaaaatctctccataacatgttattttggtaaaatagaggtcatgggaacaaattctttcacatatgtgtgtgctatgatttgtttttttttctcatcaaaataaatcttataatagatctaacgattcaaaattatgtgaaacttacatataaattacagtgtagttacatgcaagttacagtgtaattacatataagttacagtgtaattacactacgattgaactataattacatctgtcaatttttgaggaaaaatttgtcgacaaatgtataggtagtccaggtatatttacttggattacaggatcctgcataggctttaacggggtttggattaacaagcttcttgttctcattcacgatcaggatgtccctaataaaagccactgtgccataagcttctgaagcaaaatgtctattacccatttgtggagaattttcttagacggttggaccctgaacatatccaccccactttgtataactgcccattaccttcatgtaactgaattgagaacttggccaatatcctattgccgtattcttctcaccatataccaaccgtcagttttttagtcttcgggtcctaaaattaatttaatttgtgttcaaaagtgtgcaaggggcaacatgccattgaatgcacatgacacggtattgttctttttttatattctaggtgttttaacaagagtttctttgtactccctacgtttctaaatacacttgccattagttactatctaaattttaacttttaccactcatctttttcaaaaaaagaaaaaatcttagaatgataaagtattatcaaagtgtgttgtgtcctaaacataagcattaatcatttgtcaaagtcttagttatttaaaattaggggcaattgtgtttctgcccctgctttacatgtcaattgtgattttaccctgctttttagagtttgtgattttgccctacttttttgaaacgaagcagccgcatgtccctactctgttaactaatggtaacagtcttaaatgtgtggtgaatggacaaatatacccctggacatgttttggcttgtgcaacaccacgaggccgcgccgacggagccgccgctcctttctgccactcctccgccgaggggccgccgtgccaacggagccgccgctcctcggggccgccgcgccgtgccgcgcctgcccacgcccgactccaccgcgtgctggcccgagccgccgctcctccctgctgcgcgccgccgcttgtcgcgtaagccaccgccgccgctgcttgcaacctagcaagctagggttttcgattggatcggggacaacaaggtttggggatttggttgtttcattgaagcaagggtagaatagtcattcacaaattataatagcattttctttcttcgtttaatttggaaatcccgggcccaccaaactaccgtccaaaccaggggcagacggctgcttcgtttcaaaaaagcaggggcaaaatcacaaaccttaaaaagtaggggtaaaatcacaattgacatgtaaagcaagggcagaaacccaattgccccttaatgttattaacaattaaagttagaatagtgatggtcaatactaacaagtatttgggaacaaagttagtataatataacgtcttttctctattcaaagtgaaatggtattgttggaagaccctagggaaatgtctattatgatctaagatttgtagtaagcttcttttattgtaattgttgtcgaaacgacaactgcatacgtcgaaagacgtggttactcaacagtggttggaaagaaacgaagtgtattaattttagaattttttactccggatccccccattacatggccctaggggactatttatagccccattacaggttcttactactagggtttaggttatacagggaaatttacatggttgcccttacgaaagggacatttacaggggtacataatgttatggaggctcatgggcccctgatgggccgtcgggcgatcgccggccctatagcccctaggcctgatgggtcggaaagactttttcggccctcgcgggagcgaacttgccatggcgaagtcgtcttccttcggcagatactcttcgccttgcacccttcgcctgggacgcctctggcttactcgcacgacccctcgcctctcgccattcttgctccatagcctttgccacgggtttcggcagatttggtcgaaaggcctcatgccatccgccaacagtaatgttgtgctaacatgcaagataatctaagcattgctcttgatgcatcagatgtacttctgaatatagtatgtagatataacatattatgcaaaattggtgttttcttatatatcttgagtaacttaattaatataatagtgaaccacgtaattttaaccatattgaatttcatgtaaaatagagagtaccttaaatataagaacttgaattctatattgtgttccattatagacggaagcatggtttaatcttcatccaagaacaacactgctgctaacttgaacgaaaccaggacggctgtggtcagtgcaagatttgttttgcgcttcatcattctgtagcgaaatttattccaaagtcaatacctaaaaatggaaaatatagctctataccatctcaaagcggtataaattagtaggaaaaatatgtactgtataatccaatgtattcgtagcaaaatgtatattgattacccagaaaattgtcacatcctgatttttgtttcaggatttctaaattatttaataaattattattagaatttatattaaatgttcattaatttacaagtgaagttaaatgtgggaaataaaatttcctaaatttaaagcatggatggatttaacttttattaaattctccatgattaagtatactctctgaaattttctcggatttttcggagctcaattcctaaatgatacaaagaacagttcagtaattatttgatcattaatgatctaattataattgttaagagcttttcttgtttaaaaatccttaaattataaattgttgtttaaaaggaattattagaaatgatcttaaaagcctaaaagagaatatctaattttaatttgctaaatctcaatataaaattgggctagataaaattttgttaaatacttctcttgaatctttagttcctagatttttctgggatttatttgagccaagaaagtatttttaataaatggaattgcatttcatgaataatttaaattaaaaaaggtttttaaaagtctcttttggctttgggccgaaagccggcccaaaacctctctctctctccctcggcccagtccggcagcagccgcccgcgcgcgcgttcgcccgctgacaggtggggcccacctatcagggctgtcttcctcctccagccgtcgcccggccgaaccctagccgagccgcaccgccgccgcctttccaaattcgctcgcccctttcccgatccggtgaaatcaatagaggggaaatgatcttcgcgatgtcctctaccttttctcttttggaatcatcgcctaattcggtttgggtaccgagctagaattcgccttagagtaatgagtcgcactcag

SEQ ID NO: 16445 - DNA, 9854 bp, Oryza sativa
  unsure (1)..(9854): unsure at all n locations
tttaacccaaagattcattttttgcatccataaagggggaaaaattgaaatctccgaattagccaattttggttattgaccaaatttttaaaaagagccttccaaaattaataaaagttttaaattcttgtgtggcaaaagggcaaacacttttttttcctggccaatggaaaaaccgccggggggttggccntaaagggggccccataagggtttttctctccacgtggccggcgaacctaccgaccgcccgccccgcttccaattcgttggccctttccgaccggtaaatcaaaaagggaatgttctcccatgtcctcacctttctctttggatcatgcatattcgtttgaaactggggattggatcggatcgaattgtctctctctcggaacctacccttccttcgngtcgcggtcgcgttgggtttaacaccgcctcctgcccctaataaagaccncggagctcccctctaccgcaagccactttggctttagcccgcngcngtntgtagcgccctagccctgtaagcttttgcgcngtcgtttgtccacccgtgcgccgccgtcgctccggtcgtcgtcgtcgctcggaaaagccgccgtcgggatcaccaagccgtcgccgatctcgtccgcccctccgccgtcgctgtcgaccgctggaacaccatcgcggtcgtcaagccgaaggtcgtcgccgcttcttgctcgtaaccgttgccgtccgttgatcttccgccgttgttttggtcaccggtgagttcgctgcgtcacccgcatcgttttggtgctctcctttcgcgccgccgcgccgtcgttcgccggcgggcatgcgtgcccaagtcgtcgctggtgatgacgtcaccgctgacgtcatcgtcgtcgtctcccgtggtccggccgtggactgatagatctcggccgttcgtttccgtgagccgccgccgtgcacccggtccaccatgaacccgacccgctgacgcaataatcctctattccttttcaaaaataattcattattacgtcataattcaattaaaatctatataaaggatttaatccgatttaatctttgaaaattcataactaattcattgtaactcagtttaatgtggttcaagttgcaaaagttatataaaataaagatctacatattaaaattatccataaatagaattaaatttatttaattctttttaaatgggctttaattagattaaatcttgtaaaattcgtaataaattcatatgaagttagaatgaggccgttcaagtctcataattcatctaaaattatgatctacatgtttgtttactttttatgtactgtttatttggtttttattagtcttttcttcgttttgcgtgttagcttgtcgtttccgtcgttgcgaaggttcgtgagtgcgtcgggagtgttcagaagattaattgaagaccgattattgcaaggcaagtaacagagatcctaaacacaatcctttgagcatgttgatcctatatttaaattctctatttatttcaactgtgcatttattttcgaatgtcactgggtggtgtgaatctattcctttgttatggcctgtttgcattgattactttattccttgataccttgggatattataagtgtgtaacgttattattatgatggatttgtatattaaattgtcagtttgtgtacctcggctgattcctggacgaggattttatgcacaaataagttcggaaattaccagtgaatttccgggcgtgacaaaaatatgaaacctagcaaagttatcatcgctgaagtttggctagacccaagagctagcactaaccacatctccacatcctgtgccattttcaatttgtatccatgatccactaggaacccaatgatgcttcacctttggctcgtaaacatttgttgtgacccctattccatatatatatcatcccaatatattatccctgctttctacaaggaaaaaaaacatttatgaatcaaaataacgtaaatacatatacgaaattttgcagcatgttaattacatgaaggactgaatgtgcaacacttagaccctgtttggcaaaatggttatgggaggtggagttgggaaatgaaaaggagaggatgcctaggattaaatgagatgaaaagaatggatggctagaattgaatcttacctgatgggtggggcatatttttccaaacccattagctagtcagaataaataaactaatatttattcataagcttatgtaagataaatttatggtactcagaaatataataatttaaagttggtaatttgggtaacaaatatcgacaaaggacttgtttatttgaaagagggatgtcaaagtgaaaaaccataatcttactaacaaatagcacttcaaattaaggggccattatataataccccatcaatttcttaatattttataatcttgactggtgcttgctttactttgaccactgatatattttaaattgttcgattatgataaatggaattcatatgtttatatttaccatgtaacatactacgttagcacggtgtaatttttagtacttataaatttatctataaaatagaaaatagaagtagtcaaactaaaacaatgcaaggtcgagggaatatttaggttttgtgtatctgtttgagttatacagagcaacacatatttcatttaacaaaattgattgagttcatttattagcacttaaatatgaaaacatccaatacttttgtatagctttttcatagaccaatagtaatatagtggttttgtgagtctattatgaagctagacatatgaacaactcgatacaaaaatcttacctttttttgttgactggtgctgactgcattggtattctgaattgagatagtcttgtttcttgttgcgtagtactgggatggttcctatagggcattctgcagtagctaggtagttgtgcttctgatatggaagatataaatggattttcaacatccatctccattagtaaagagcttggtttcaactaattgacaaacgaaaacatgaccattttacaaacgatgagtttacatcgcactatgaaaaaaaaaatcctaagtatgatttggtttgtactttacattctttcatgatgaagcaaagatacgcaaatttttttggctttagtgccaggtcgaagtgtaacaaacaaataaatttactattttatccaaaacaagctgaattagtgaatattctagtctcccccccccaacaaaaaaaaaatactatagtcccccaaaactcttgtattttgatttatgactataataacatacttaattattatctctctatatatgtattcagaattttttagcaacatattagacatgatatcaaatgttagggtgaaatatgtgctttacctgaattgtatgatctttcaacaatggatggttaaagcctggttgtctattcatattgatgcaatcatagacatcaccatcttcagcctgatacgatgttctttttgcttgttaggtacaaaacaagatgctatgtatgtacaaaaagatctaattttgcacttacctcgatggttttattaaccccataatttgtgagaccttgactagtatttcccctttggcttatatactgaatttcttcccccctatgattagaacaacatatgcgatagaagaagagttactgtaatcactcgactttccctcattgtgattatcttggaagattccaagattggtattgatacatgaagaagagatactatttatagggtggaaacagatttggtgatattctttttaatgctttgagggaataaaaacaatgtaggcaaggcatatataaatgcagtattgaatgcacaagatttgatacgttggatggtatcagtatgacagtaatttcattgtttttatgtttgaatgagttttcaaaatatttaaagcacatgttgtattaataattgtgtaagataccatcacttgaagattacatagaggacatgaaaaacaaagggaaatactcctaccttcaaatttatatgttttgtgggtaggaaaagactctaatctctatgggctaatcaatagcgtgtttgtaatactgtaggtgttggttgtcattaaacataatacaaccaccaacattttagtaaaataaaagaagataacatgttaccttgccattctttctttaaatcaacagaattccatgagttttattggttcaacatgttttgcaaggttaggtcataaataagttcatttctgaacattttggagagtttccgattgagttataaagaagcgcaccataaccaccaacaacatgaggccaaatatatatttgagtccaccatattgaatctctcgttgagacagtcgaaacggatatatggttcgcccgatttagtgtcggaagcactccgaacccattagtatatttgaaggatgaatagctatacacaattcttccatcaaacatattaagacattcgacgctccgagagaaagatatgtgagacattgctaggcctttagcctgccagtcaacttcagcctgagatgtgcctgtcaaaccactcgaagacggcaaccagatgtgttacacattcagaagacttaacaaaaatggctaaagatctacaacatctcaaatatctttaactcatactcatgtttaatatgtccctaacaaaaggaacacactaaacactttcattcaagcacatgatatctcaacatagggaattctaagttctaagttttagttaagtttatacaacttataacttagataagtatggccgattggccgaatagttaggttcgcggaagcatcttctacccaaaagatctttcctgcaaccgactagggtagaccctagtaagaaccatcctggaagaaagaaacatccccatcgaaatagagtgatctcacctgcaaccaattctaaacatgcaacaatacaacaatacacgcaagagtcagtacataaattgtactggcaagcaccaagcaagcctaatactctacatgcatggcgtattcaaagtaaagcttacatgggataattttagcataaagcaaatttagtttgcaaagaacatttcaaattcagatttattttcaattaaatttcagcaagcatacacttagcaaatgggcatcaaaatagatgttaaacacatataacatagctccttattgccttccatggcagcaaggatataatccataaatcacatcacattttgaagttcaaattcagctttagaagaataaaacacatgtctatactcatgacatattcacacgccgctcatgacagcgagcacggctaatcgattagttttaactctgcagagtacgtacactttacccacatgatgcgaaataataatcatgcaaaaagcatggcacgcgatacataagcacccgatttattactcacaacaaagcccttccaagattcatgatttagccttacaccagcacttacaccagcacgatacgtgttactccatcctaagccatactcgatatatgacctagaaccgttaagtggcaggtccacgccttaaacttaacgccgtggtggcagacacaacgggaacacaccacgtggcacaatagcattgtattggacacacttagtcacctaaactaccacttcggggtaaataggaagctcctctgaattatacgaactcatacacaccggcctaccagaatgtaaggctaaaccataaataatttactaagcttgggctatcccatactagcacatgtggttgtactgtatacaaaatgaactgacattgagtgaagtccttaggtcggtctgggcacattctccccctatcgacacacaactaaacaccatatgtgtaccacatgaggcccaaacttaaaatccacattttccaacattttatttaacaaatatcacattttatcattttaattcagatcacaaaataaatcatttcatatatgtaattgagcccaaatggtaagtaaactcatcactaagcatggctaagcatttctatagacttgtgacttcaaacatcgttcttaatgtgacacaatcaattgttcctaaggtttgaaataatggttaaggtcttttgtggagtttaggtgataatgcaagtaaaggagttgatctaacaaattttacaagattttaatggattagtgtacaatagacatgcatattttgcaaacttttcaaaaaccaccaaatcataggttcaatgtgatcaaagaggggaggtggcttgccttgctcttccactccttgttcagctccaaagtagatctcctcgagactcggcggcgaatcgtctaaacatacatatgcaaaaattaaaattaaaacatacataaaaatccaacatgctctaaaatgaatgctttttatggagttggtgtgctctgtgttaatttgatttttaatgaaagaaacttcaatctaacaatttacattcaaagttacagatttttaaagggtttacatgttaaatatggtcctaagtgcatttcggatttttgagacataaatctttatgattctgttaagttaaacatttttatatgcagagcatgaaaatatgattccaacaaaatttagttttcaatttttatagttaggatgaattttctacaaatttctaaagtttctgtcatttttcagttaataagaaacaagttttgcattttctccaatcttctcaaatcatttactctctcaggtccaccagtcagcgactaagctttttcgcataagcccctgggttcttgggaaaataggtcccgcagcccctagcacgtggtttaggtttttatgcaaaacgacacttgcgttttattttatttacagattagtattggtcccacttgtaagtgactgctcgagttgttaatacatccctgggagtctttaaattttaaaagccatgcccttgctctggacagagcagagtagcagcacagccgcgagcttcacagcatcaccggcggcgaacggcggcgattcagctcaagctcccaaaacgaaaagtgtagagaacaaccatacaaacccattggtggctttattgcaagctttggtgctctatagcggctgttagggtgttagaggcagtggctaagctcggcttgcacatgcatgtgggttttgaggctcgatctaatcgtgcatgcgtatggtaaggactctagggactcaccaagaagcgaacgcggctcggcgaagtcttggcgatggtgtactggttcggcgacggcgcggctgctacggtgtacccccgggcttgtactgcatagaaagggtacgtgcttcggtttagatcagcacaaggtagctctaggcgaaaaagattgcgccgaagctgaccagagaaggagaaagaaaggaatggcgtcggcggccggaattggggaagaagaagaggatctcccatcgtggtccacctcgcgtcgattacttcgggattcttgatctgaaggtgttgatgaagctcgtggcgaagtggctcagcttgttacgaactgttgaagccgggcgacaggcaaaggtgaagctgcggcgtccagagcgctacggtgttccgagttgacgcggtcgcgttcctggagattgggtgcaccaaatgaggtgttcttggttgtgttaaagacggcattgagaggggattacagaacgcatattgaatggaaatggggctcattggattgcgacagcgtcgaggacttctctcgccggcgccggagatggcacctccgttcccgtcgaatccgaggcggggttcctcggttcttccgcgaaacgagacaagggcgagagagagaaggttggtcggccgatcggcttatatgcggtcgccggtggaggaggagaggaggagctcacacgcgtggcgcgcgggttctgagccgtgggcccgaatgtgaggctgacaatgggatcccacattgcagccctggcccacatggcagcgactagtgatagataaggagaggagattatataatattgatctgatactggtttctcccattgatttaagaataaaatatctatgtttgacaaggtgaagtactggccaacaccataaaaccaccactaatgacgaaaagctttggaaaattaagtgcatgacaggcaaacttagacgctaattaacctgtgaatttgccagtaaatattaaaaattttcgcacaaactacatcagttccattttatttttctattttgtctgcataagtataattcgtagttgacgttcaggtcggatatataagaatatttttgttttcttaatacgatatatttttatataatagaactgtaataatttattgctacggttattacatatgatttacaaaacatagtaaataatatgcaatattatttaaaaatagatttttattataagtagggagtctgatgaataatttggttatgctttactgattaagactctagtatcatgaaattcagaaaatgattttttttttacataatgaataaactagttgctgcatctgagataacaaaaccgcagtcaattattacaatgtatttctatatcactttagaagaagtccagtcaatctatagatattgcaacaaaatcaatttcctaattttatgattaaaaaggcaaactaataatttagtgcaggatagcagcagttgcaagttgtggcttccatgccttcaaatctcaatggaccagctggtgtatatcaaatcaaccaatccaacgggacatcacatgactttcacaagaaaaaccagaaaaaccagggcctgagcaccttgtttctctattcaattttttatccaaaagggaaaaatgaaacacacacacaaatccagtttcctgcacattattatcatatatgtttgagaggtatttttgtttaactacataaaagcccacacactttgcggtgagattttgagaagaaaatcaagctaaaatatattaattgtggataaatatttttaatatatttagagctgatatgtgaaaattcttaggaatgaattgaacaaaaaacaataacaacatgttctcttaaaaaataacgacatggttattctagtggttatgtatcttcttatccaacgactgctatctttgctctaatattgcaatgtaatggttagaaagtgttgctttatatgagttaatgtttcttagtggatactaattatatagaaagaaagtttcaacaacaaagatgttttttttaaaggaacaacaaatatatcattaccacggatgatcattttaggtaaaccttttgcatttttagcatttctaaaaccacaactgagtgactaaatcgacgaagaaaactttaaagtaactctgaaatcaaaattggcttatacttataactaaggcaaagacaagcaatgcttaactatttgatcaaatagttaagcattgcttgaaaggtacaagaaaaaaactaatatatttttgcaccatcgtgtagcatcattacccttcttgattatacattaatgcttaattaatgttttcggaatactccctccgtactcgtaaagtaagtcattttggacagcgacacggtctccaaaacataactttgacttcttatttctataaaaatatttattgaaaaagtgatatatgtatacttttatgaaaatatttttcgagacaaatctattcatataatttttacattttcaaactcaacaactcgagagttattcatgatttatattctcaagatttgacttaaacattgtcctaagcgacttcctttacgagtacggagggaatatatat

SEQ ID NO: 16446 - DNA, 2167 bp, Oryza sativa
acggagggagtagtaagtaaactacccatctttacctatctacttaaacttttataatgaactagtctattagtgttgtactccttctgctcaaaatataagggattttaggtggatgggatatatcctagtactacgaatctagacatgatcctctccagattcatagtactaggatacatcacatccaactaaaatcacttatatttagggatggagggagtagctacgtatttcctctccaacttcacgaggctagagatgccaccggccggcgacgacaagtcgccggcggccaacggcgccggcgacggctattcaaaggtactgcagggccggtacgagctcggccgcgtgctcggccggggcgcctcctccaaggtgtactgcgcgcgcgacgcccgcacgggcgcccatgtcgccgtacgtcaaggccatccgaaagcagccgcagccgcactaccacccatgtcgctcgcccgaggcggccgccgcggcgcggaggtgcgtggagcgggaggtcgccgcgctccgccacgtgcgcgggcacccgcacgtggtggggctcctcgacgtcctcaccacccgctccaccgtctatacctcgtcctcgagctcgcccgcggcggcagcgtcctgtccgcgctcgacggccgcggcggcggccactacgacgagcccgcggcgcgccgcctcttcgtgcagctggcctccgcggtggcgcacgcgcactctctcgacgtgttccaccgcgacgtcaagtcagagaacctcctcctcgacgagcgtggcgacctccggttcacggacttcgggcttagcacgttcactgacgccgaccagcaactcggcgccacagacggcctcgccgccacgcactgcggctcgtcggcctacgtcgcgccggagatcctcctgaagcggcggtacgacgccggcaaggcggacgtgtggtcctgcggcgtcgtgctcttcgtgctcaccgccggctacctgccgttcaacgacggcaacctcatggccatgtaccggaagatctgcgccgccaagttccggtgcccgaaatggtgctcgccggagctccgctctcttatcgggcggatgcttgaccggaacccgatacccgtatcaagattggtgaaatcttcgatcacccttggttccaacaagatgggagcttgtcatcattcggtatgatccaagctgcatcctctcattctaaactagaggtggagaaatgggaggctgggaggctgaattggagcaagcaatggagctaaatgctttcgacataatcgggttcgcctcgggatgcgatctaagcgggttgatcggtccattgccagatcgagttcgattcgtcgtgccgggtgcggattccaggtcagttctggacagagttgagaagctagggcgagaggaagggcttgtagtgaggaggaaagaggaagaatggcgtggaggagttcatgtggaggcaccaagtgggaaattcactgcatatgtaagggttagtctattgcccaaaaagatgctgatgatagaggctgaaaggtatatcggaaacgagattcctaaattttggcatcaacttcagatcggtaatttattcgtcagaaaatgagtatatgatgaacatgtttttatgcaagagatcgtaaatatatagaaaaaaatagtttagagtaatactccctccagattaaaaatacttggcgttctggatataacaacacgatctccaaaaactaatttttaccactattttctattacaatagagatcattacaatattatagaagtactaataaatatatgattttattaaaatacattttaagatctaaggaaaatactttagaagttattcaaagttaaagtttttaaagtttaacattagttttgtttaaaatgataattattttttacctgagagggagtaattgatattagtggacgttttcacatttgtatatcttgtaaataaatactgagacatgaatacacaaacgatcgatctcattttcgtcacgagtaatggaccataagtatcacttgccttgttacctcaagtagctgccacagatcttcaatagaatctcctgccactaataatggggatcctctagagtcggctgcggcatagcaggatgtcatttcaggcgg

SEQ ID NO: 16447 - DNA, 1970 bp, Oryza sativa
ttaatccaaaaccattatttgtctcctcgaatatatccctaagaaaatgaattcatattagccttttttttatgcaagaggcatatatatagaccaaaaaaatagtttagagtattatttgagagtggacattttcatatttatgtatctgccaatgcgcaattcaagatacaaaataatactttgactaaatcatcctaaaactataaatttaagttggtatatcacaaattatatatttagcatttaatttatcacagaactacaaatttaagatggcgtatcacaaaactactaatttaataataaagttatcataaaaaataaatttagcaccaatttagtcaaaattctataacactcatagtttcgacataatggtaatacaaggaatttaaactctaaaatctatagttttgtgctaattttatatttagaaatctatagtttttttacttgctttaattatatagttttgtgataaatttaatactaaatctatagttttttttatggagcagttttttaaaatcttgatcaaaatatctgtagttgctatttttatcgtgaacggccagaagaagcattacatgcctgttacttcaagtatctgccatacccctctgtgcaaacaaaatcaaatctaacgataaatctgaacacagatttacatgtgatcagatttatccctagtttgattttttatataggaagtagacctttaagagaatcccctgcttgcacctattagtaccaataatggtctcctgtttatgcattccgtccctttcaaatcaaataaacatgatgaggaagtgacgtcgactctagatgagaaaaatgtttaatataaaatatacacaaatcattcatacaaaagcagtactttatggtgaagtaagttttttttttgtggggatggttgaagtaattaagtcggttaaacaagtaaaccaaaaaagctagcgtgcggttagttatgatgtttcgacaattcattcagatttaaaagtctgttatgcacttttgataatgtaaaatgcgggtggtaacgagtagcacacaactatagggtacaaaatttagctacaacaaactgcaggatttggttaaacaaacagttaatccttgcattcacgggaacttcagatactataaattttcacatatatagctataaataaaactctaagtacgacatgaaggacacaaataaaatgaagtaaaatgtaaatacatggggctatcaaggatgacagtatttgtaaaactgaaaaagaatgaatttaagaagcgcaaatcatacctagctattacgcggacgtgtgtgcattaatgaggtccagaattgctaagttttgtctattataaacataaattgcatctataaaatataacaggagaagaacttggtgcaagtcactaggatacacctgccaccaccgctcacaagactacaaggatttgctagagaagagcaaggtgaggggaagaagagagctagtggagcagccccggtcgaggttctatagaaagggaacttttcacaaaggcaaaatttgctacagtacaccgaaagattgtggattttgctgtgagacacccgaagatcgtgtatttgattgtggacactgtaaaaaagtagtaattagctgctggacacttctcccattattttattattacgggttaaaatggagagagaaagagttgtgtaagtaccaaaatgccccttccctctttcttttcttttccccttcctcttcctcacgcttgctattgagccgagcagaggcgcgatggtggccggcccgagccaggacggctcggccacagaggggcggcggcggcggcgcatcaccagggttcgccgccgacggcgaccacgcacggtggcatcccggcacacggcttcctctctctctctaccatttatttttcctctttctctctagacgcacgccgacgtg

SEQ ID NO: 16448 - DNA, 4223 bp, Oryza sativa
  unsure (1)..(4223): unsure at all n locations
cgtcttcaccgagccctactcaaagcgcctcatgctccgcctccgcctccgcggcgaggtcctccatggcagcagcggtgtcacgctggagcagggccatgccgtggagttcgccgtccacgaccgcctctacaatgcgtgcgctcaccggtgaaggagggattggtgatgacggcttcagatcgacaccggggaagaggaagccgatctccatgcctcttgcgtctccggttgggattcttggggggtcttggaggggagatcaaggcggtgctgatggcgcggtggctcgtcctaatttggtccacggcggctagaacaccgaggtcgacatggcggtgaccctgggagcacgctcctgggcatccatgtgcacagaggcgttcctgtcgactcactgcatggaaagggatgagattagagggaatgaaaccagtgtcttgaggaggtaatgaaacgtggatgagattgggacgacgacggctcggcggcgattggcgccatccttcttggtagcccgcgatgagatgaacagagaaagagacgaagaagaacagagaaagagagattgacaactgggcccatgggcaaacttgtctttaaccaaaatttctctctgtttcgatcgaaaataattaaataatgggagaagtgtccagcagctaattaccacttttttaagtgtccacgagcaaatacacgatcttcgggtgtctcacagcaaaggccgtaatctttcggaaaaaatatcaaaaaatctgtagcaaattttatctttcacaaaatatcaaaatattatatggaaggtttagaataaaaaaaaatatatcatattggaaacaaatagaagaagatctgtagtacatattccatttatcatcggtggcttcgaaagtccgtttcaaatatgtgccttatgagagaagggatagaaataacatcaccttttaagtattgatgagtaaattgcaccagcggttttttttcttaacatgtaaatagattttacctagattcatgaacttgcaaagcacgtattgaaatccctaaacccggtttattatatcatcccggtccaaagccttatttgaccatgatcttgcctacgtgtcatgccacgtggacaataatatgccaaaatttcccctttccctcattttattatttattttttgggagctcctcttcctaaccaatctcctctccctctttcctttcttcccttttcctcctctctcaccatccaaccgtcggctgttgctgcttcgatgttccagttgcagcctcttctccgttgttgctgtagtcatcgctgcctgctgttgctgcttcgatgctgccaccacctcctctccctcaccgccgttgtcatcgcctgctactgcttctggaaagttaggggtgagggagggtttctctacagccaccgatgcctcctccgccctcccatggccgcaaacaaccttatcgccgtcggatatccacgtcgggtcatcggccactccgcccttggggcagtgtgtccttgctccggccggctggtaatgaggaggagcgcatattcagcgaaaagtcgaaggaggaggcacagatccagtgcacgcaacggtgaggaagagatggagaagaggagaaggtggcgcatacccgggggcacatgtgaagaggaggagaggaggtagcggatgagatgaagagacaaacaagaggaggtgactacaatgaccaggggcacccgtgacaacaacgaagggcggcagacgagacagataagaggaggcggcgacgacgaaccagggacgcatgtgaaaacaacgaagaggcgaaggagcggaggtggtggcgtccactaggagtgcgcacgatgaggaggtggaggaggaggagaagctcttggtcaccgtcaagtggagctcgaggtggagagaagggagacgacggggagctcgtgatcaccatcgtcggctttagcttgagcatctgctctgccgtcgggccaaccccgctaccggtgcctctttctctgatggccaacaccgctctcttgctacctccctatctctgctacttgcatgacgctgccactggcgcatccaacggtgggggatgaagagaaaagaagggggaaaagggggaatgggaaatttttccatgtcatcatcctcatatgcaataccacggtcaaacaaggcttaatagagtaaaaattgtttttttcccttttatgatctacatatatataaggaaatctattgcaacataagcaacaaataaattacatcctagcgtctgccttatgtaacatcgaaagtttcgatgatgacaaaaatcttgatcgattgatgacaagggagtgttcgatcttccatcaagtgaagataattatcgatttttgcggaaacttgacatacaagatccagcttccaatcaacatgatttcaaaccctccaatcataattctatatctcctttggttatcaatagtttaaaacctgattgacttcgccgagaaggataatctctatatgcgaatcgaaaaacacaagcaagaacaaagtcgattgtaactcaattgtagatgaatgattaagaacttgaagttagaattctacaaactgactagcgttgaaactgcatgacgatagaaaaaccactctaaactttgatggctattgaataagtatgattagggatgtcctagggtgtccagtccttggacttatcccatgacataattacaaggtctaaggcccaaatcaaactcaaattggatgatgcacgtggcttgttttgcagatttttgacatccaaggaagaattttaacatgggaccaaaactatttgaaagtagactccataaacattttaacaagtacttatggaccctaagagtccgtctagttcagcggcatgtccgtttaaaattgatgctgttaggagggccgaatccaaataaaaaagtgtagaactttatctctggtattctatagatgagaaatgacgtggtatcatggaagtagatttggggaaggatattggttagtccctgatcaactttatgatcatccaagcactctgtatacccgccccctttacttcacccatgcaattatttctgcaaacgagaagatacatgactcatgttacaataatgtttattgaaatatataacaataaatcttacataacaatcatacatgcacttttggttaatgtttactcccaatttcttaatttctagtttggctccctccaccgttatggtaaaaaatcgttatgttttaactatttatctgctagagcatatgtaatatttatgtaaactctgttctttattaccaatcaaaatagacaccttacctactttcatcgaaagaaataaaaaaacaacactaataaataatgaacatgattctagatgtagtaggtattattctagaatactcctcgtcggaaacatatgaaacgcatttccctcaaaacgcaaaaaccatgccccgagccccgacaccaactccgtcggctggaaagccgacggcccagatgaaagccagcggtgccaatgcgtaggccacgcatgcctccgcgcaaatcttatctcccgggaggttccgctccacttccctccccgagtcgctcgaaccatccaatcccccccccttcctttcctttgcccccattcccatcgctgctgccacggcatggccgttcccgccttgtgcacctcaggcacgcgccccgccgacgaggtgcccttttttctctcgctctcatctcccccattcctcccctcttcccgtgtcctgtcgtccacagctccccgaccaaatccctagccctcccattccccacccagcaggcctccctcgcccggtcacgccgcaagaccgggcccgacagcgctgccgcttcttgcccttctgccgcggttttcaagaggttgttgtcctgattcgctgcagcccggtaggtattgtccctttttctcgttggtaagtttgccagcaaaagaaaacgtgtttaatcctgaatgttatataattgagcatctcatggtgtctatgtatcagcatatgggtcccgngctcgggttcggcccaagggatcctgcactcacctcttgggggggggggnancngagattttccggaactccccagaaaccccanaatacccaaattttccctagttcccacaaattcccaatataccataatgtttcc

SEQ ID NO: 16449 - DNA, 9667 bp, Oryza sativa
  unsure (1)..(9667): unsure at all n locations
aagaaatttgctagaattgtttagccctctagacctttataataattaattatctaaataatataaattgctaaggttatttgacattgcaatggtatgtaatgcaaggtttatttttatgtaattctgttaatgcagatgcttttatttttaaatctagtttgataattttatatatttcaaactttgtgaatttatttcacgcctaatctagaaaaagatcaacgtacttgaaccctttacatgtgtgtaagaaaggattattgtgtttaaatgcgcgcgcgggcagggccggggggcggggtgttaagagtggttacatttttttatcgagcacggctacacgtattaaaatttccttactaaattttactaataatcatctcaaccgtttgatttatatagataaaaatcataaaaaaaattagatacacttatagcatgacacatcattgttagtaagaatttagtaaaaaaaaaagttagtatgtatagcttttccaattttgtcaaggggcgaaaaaatagttttctaatgaaataaaatagtgattgttttaactaataatgtcttatagggaagaacgcttgctagcttcatattggtcgttaatggatgtgttaatcattgtggaggtcacgcaattagttatattactccctccatctatttttgatagtcatattttcaaatctgaaaaatttatttatgataggtatatttcaatccaacaacttatcgtcttagtgtcttttttggatttaatgcgtgactctccattcttccacacaagattggctacatggacatcgagaaatgtaaatattaatgaatcgcttgtttacgaggaatgactagtatcatgtttaaatagatgataagtagaaacacttatcgttggtctgtgtgctaagataaaatatgactattggatggactacaactttaatttcgagtttcgatcgggggtgactctttcgtagctgtcgtttggtctttaataagtaggtgattggaaagaataatctagttttaacacttcgatccatgttgttaattaattcatgctcctgtttatgaggccactaatgcttccgattcggatgtttttgttctataagaaataacacgtttagagctgttgcctttggtttatggaaaaactcgatctcatgatacggaaataaaattccctgtactagctagacagcctgctgctgtcatgcaagaaggctaaaaacgaatggaagtgaagatgatcttatcacaactcgcaagtgaagataatgatggtggcagcgtatctaccacccacaaactcagttgtatttttttacaacaactgtatgtacttcttttttttttaaattacacagcacaacacagatactcacagcacacgcacactcattcttactaacacacgcacgcaaaaccctacccctatgagcatcttcgaagactgaactagtaaatcctggagattgaagaaatcaccacagacgcctcgttgtcgacgggtacgtcgcttaccactgaaagcacaatgccgctaaatcttggaaaattcgctccctcgtggagtcgaacccaggacctaagatgttactgaggctcttgtaaccactaggatcctttataaaaggaaaaagtacgaattacctcccgtactgtagtggtcgaccgaattacccccctaatcataaaaccggacattcttcacacccaactatgcataccgaacgaattaaccccctcgacccaatccgcggtggttttggtctacgtggtgtacgcgtgataatccagtcagcattctatttattaaaaaatatgaaacccacctgtcatactcctcttccactcttcctctctcttctctctctcgctcttcctctctctcttctctctctcactctctgtctgactgtctcactcttcctctctctctcacgggccggtggcgctaggggacacagcggcggcggcggcggttttgaaatgttcacgctctgggttttggtttgggtttatggcatcgggtgtttttttttttaacttcgatttgatccccaatcatttcagattcatttttgtttccctttttgttaagtttgcttcgattctgaatccacttcttgtttccaactgaagattatgtttctgttccaaaatttgctcgattcgagtgcgtctacgaatttggattttacaatttgacagctgtgattatatcgtgcaggtagccgagactacggcgatggtcgatgaggaggagcccctcctgggaccagatcagtctcgcgctcgccgacctgcgcggcggccgcggcctcagcccccgctccaagcacctcgtcgccgcgctcgtcgaggccgccgccgctaagctccaccccaatgccaccacccttcgcctgtgccgcgccgccttctaggggaaggtagtctggatcctcgccgcgacggtcgccaccatgttcgccatcgacgtcgcgctcgccgtcgccctcgtctccgtcggggcagaaggtggcggtggaataggggcggcggcgaattgaataactaattacgtatcaccccggattgtttgggaaaggtaattcgtatttttttctttataaaacaatatttctacgtattgttaatatcttatcctctctctaagaatttaagtttaccatgcaaaaacatccaaaaaaatcagggatgatatatgttgttccaaaaactttacaaccaacttgctctaaacaatgtgcatatgtataattcatttttatccatagcaaaacacgtgtatttaagtatgtcgtgaactttatgataagccacctttcgagaatgacgtgacaaagggagcaacagtacaagactcccttctagaagaaagaaacgttgttggggccagaagcagggaacaggacaagaagccccacaatcatgcactagtagttgtatggggaagaacaaataatcgctcccagttgtttgcaacatacatatcgaatttgtcttgacgtatattcatccggcgattaaagtaccacctcacgtgaaattcatgtggttctagatcgatgcaaattaacttaatatcctctctctttgttttgttatggagaacggcattattgttaattgtagattaatgtgtgccattctatgagctatatgagctacagtgatcaggagtaggtacaattgtatattataagctagctataaacacatttcgagaagacaaaaaataaagagaaaagcagcggactatagacttatagacagctgcagtatggattccaagatacctgtgtgtatatgataggtggaatcaggtattaattttataatatatatttatagataactattgtataaattagctattaaattaactatagataatttagagtgctatattattaaactacttgctcttagtaaacttaactgttaggccgagtttagttccaaaatttttcttaaaactttcaacttttctatcacaccaaaacttttctacacatgaattttcaacttttttccgtcacattattctagttttaactaaactttcaattttaacgtaaactaaacaaacgctagtattttataatggtgcattcctttcacacgaagtacttggagtgttacagtgttgtcgcatcacgctgactcagcacagtactactatgcatgtggctttgggatccccacattgggcaatcgagcatatgccacgctagaacgtggtccaagtgaccatttctgggtgcggtagcaagtacgagtatacgactactcttttcgatcaacgacaaattaagttaattaatatattgtgatatagagttcctgtacatattactctatatccaacaaacaagcagtaatgaacaggcgaattaacgtgatgatcgctatatgctgcatgcacgtctgtatcatctagtactagtaacctaaacaccacataattatgtggtcaagtggacaatgatcgatatacgcatctctctcacgacggaagaatctgtaggtgagcgttagacgtgcacgcttgcgcttgcacacacatttctcgtttcccacctatcgatcaccccgaatgaccttcagaattatatatttcggcgccgcgccgtgcactccacgtgccctcgctctttgacaatttgtataatccactgatctcttcagtcttcccagttctcactgtctgatacttgaagtcttcccagttctcactgtctgatacttgaagggtgtgtttgaggagaaggggattgaggagattggaagatacacaaaaagatgtgagccattaactcatgattaattgagtattaactattttaaattttaaaaatggattaatatgattttttaaagcaactttcatatagaaaatttttacaaaaaacacaccgtttagtagtttgagaagcgtgcgcgcggaaaacgatgtgcattcttactccctatcacccaaacaaacacagccgaagcacagaagcagtaggtttggcccgggtaccggtaaaaacagtaagaaaattttccaaccatattatccacttctacaaaattaatactccctccgtttcaaacgttttgactttttcatggtcaaattgaagtttgactagggctgtgttcgcggctagggagtttggaactaaactctccgcacagaaaacggagcggtccattaacacgtgattaattaagtattagcttttttttttcaaaaatcaatcaatatgagtctttaagcaactttcgtatagaaaccttttggaaaaaaaacaccgtttagcagtttgaaaaacgtgcgtgcggaaaaagagaatggtgagttgggaaagggggattccgaacacaccctaagtttacagaaaaatatagcaatatttttaacatgaaacgaaagatctattaaaatatattaaattttagttttaataaaaactagtttggtgtaatagatgttgctaattttttctataggtttgatcaaacttaaagtattttgactagaaaaaagttaaagcgacttataatatgaaaccgagggagtataataataatatctttatcagcaggtacagtttccaaatattagtttttctactatctattagcatcacattgaagtttacattaaatagttaaattcataaatataaaagatttcaactatttttgtaaaaataaaaagaagagactattatcgatcgatcgttttcatctctaggtttgggtcgccctaaaagtttttttttataatactctagttttagttgaaatatctttttaataaaagttatcaatcaaagtttgtaccttaatgccaaaaacaacgtgttctttgcggggttcacaaaaccaatggaattctgtaaaaaccgattggttttcgtgaaactactatgtctccgtttgtgaaaaccggtcggtattaaccgattttcgtatagtattgactgaaagttatcggcttttatcggttttcggtcggatttcaggaaacccatgaggagctgtttctactctgaaatcaaaaagttaccctggttcttctttgtaatcggagcgagggagtaatttagcagacatacatatattggcatatcatatcgcacagcatctgctgtctaattattcgcatagtatattcagttgtacctcccaagcacattagaagtaaaataacgacaagatgcgcatttgtttcgttaacagtacgtttcaatctagctacggagttcactattcacagagacgaagaaatatagagttatgatgcagatgcaatacacgagtcatgagtgacgttcatatattcctttccttgcctatttttttcctctattttgttcgtaccgaattagcagtactccatgacgttcattagcagctgcacagccacgtgattccgtgactactccgctaattaattaaggctctgaaattaaagtaaagaagctgcatcaagtagctgtcttaccttccagcatatttggaaccacacaaaccggttcatccggccgaccgatcacttcgcctagttttgtgatcattcgtgcttcgggcattcatgctttcaatcatccaaagttcaaattaacatgacgacatgacatctacggacagagcaaacttattcatgaaattcaatcagacccgtcattattactccaggtctgttcatagggctttagcttctaaatcttactcgcgtgctttgtttcacctctttgtttcattcttttgatcactctaacccgctaattcattctctttttgataaagctgcaaatttttgattgagagctggatctggagcccatctcaacatgtgcatcctatgatctttggaggaggccaacatcgacgcaatcaaattcatggctgcaacattcgtacggccgaccaaaaccacgcaatcgatcgcgtcaccaacccccccaaaagatctccaacaattgtcacccaaaggaaaaaaaaaagaaggaaaagacccctcctgtcctaatccaacgcaaaaacaaatgagggaattcccaaattccaatcacacgaaagcgtgaagcatcattggattagacgaggtaatcaaattaagcggcaaaaaccgtttaataaatagtagtactaaatattcataaaatatatagagaaaatcccttgtatacccctaaaattttagctaatcccttctacgcctctgaattttgcttacttcattatatagtctaaaatttgattttgatccattctatgctcctcccgtcagatgaccgtctaatttctacaaaaatgaccattttatcctttgaatgaatataaaaatttatgaattacattattgaaaatgtaaaagtttatcacatgagactattattattattgtttgttgtgcgatatattatactccccccgtcccaaaatataaggaattttggctggatatgacgtattacagtacaacgaatctagacagctttatgtctatattcattgtactatgatacgtcatatccaagcaaaatcccatatatttagggacggagggagtatatgataaaatttatttttagataataaaataaaacatatgtatttgttttatttgttcaaaagtcataaaaatgaggagcatccatacaaagctaggactataaatgctcacgatattttttatgaatgctcccaatcaaaagaaatctattgtcctattagatttctctactattataaaaattaaagatatttttgccagtattttggtacgtcatccgtgtttgagttggttttaagttcgttctcttttggaaatacatattggtgtttgtgtcgaattttaagttcgtttgcttttgaaaatacgaaagaagtcgtataagaaatctttttagaaaaacttgcatactagtttgagatgaaaatcggactcctaactgcagctcatgattatcttaaaaatatccaagcaaattcctacagtgaatttcaccatagctaaattgtataataataataagattaaaatattattcactcgttacaacgcacggacatcttttctagtaaaataaaaattttaatttattacatttgttttatttttaaaatttatgtcaaaattttccgcactaattatttagtctcattagttacataaaatgcatatactatacactcaaacaaaaatttcattatttttcaaacttatttccaaacctaaatcatcaagggcattaaagacatgagccaccaaacttaacagtgaaatgatagaaaaatgtaacggcagggacatgaaaaggatcaagctgaaattttagaggtatataaatatgctcatatttccttatttgatctctctgtaaatagaagagttccctttcatacttcctatctatccatctaccgaaatacaaccacgttctcttattaatgagggatactttcgtcttttctctcaatgcaaatgtgaatcctgataattaagaataaaatttattttagaacaaaaatagtaataatccattacacctcccgaaatttcgcttgctcggctggatcctctgactcttccagtctccacgcccacagccgcaacaactggttaaaaagatccccgcgacgcgcacgcgacgcgacgaccacccagccacgcgcgacgcgccggaacagccgcgcccgccatggcgaaccccatcatcccgagcagcagcggcagcgacggggaggaggcgaggacgaagctcgggcggctgaacgcggcggtggaagcgttcgtgggtcgggcggcggttcaagctggcggcgcgcgggtcgacgttcaccacggagctccgcgccgggacgaccacgttcctcaccatggcctacatcctcgccgtcaacgcctccatcctctccgactccggcgccacctgcaccgccgacgactgcgacgcgccgtccccggcgtgcaggttcccgcccgtggaccccgggtacgccgcctgcgtggcccgcgcgcgccgcgacctgatcgtcgccacggcggcgtcgtcggttatcggctccttcatcatgggcaccttcgccaacctgcccatcgcgctcgcccccgggatgggcaccaatgcctacttcgcctacacggtcgtcgggttccatggctccggcacgctcccctaccgcaccgcgctcgccgccgtcttcctcgagggactcatcttcctcttcatctccctcgtcgggctgcgctccaagctcgccaagttcatccccaagcccgtccggatatcgtcgtcggcggggatcgggctcttcttggcgttcatcgggctgcagagcaacgaaggcgtgggcctcgtcgggttcagctcgtcgacgctcgtcacgctcggcgcgtgcccggcgtcgcagcgcgcgttcgtggcgccggtcgtgacgttccccaatggcacggtggcgctcattgcccggcggaacccgttttcggcgggatactcttgcttgttccggccggatgaccttcccgaccttttggcttgccgtcgtcggctttcttaataatcggctcttgcctcattaagaacgtcaaggccgcatgaactacgggattctctttgtgaacttcattttctggccggcaacaccggccgtacggggttcccggcaaccccgcggcgaccagaggtttggtatttcaagaaggtgttggagtggaccgatccaatccaccgccgggcgctttaatttcgggagccggtcacgctttctttggaagcggtctttacgttctgtccgggacattcttacaccaccgggggttttcttctatggaggttccccgtttttgacaaccacggggaatttagggaaaattctcctttatttcacccacgacacattttgtgtttctgtgtgaacttcccggacgggttaatttgttttacggggaaaggggggggggagaggttgtggcgctccccggggctatatttgggggtggtttaacaccctctgtggataacaccgggagagggcccctctttgtttttgtatataatatccgcggggaggatattaaaaaaaaagagnggnggtttacacggggtgtggccctctctcgtgcgtgtgggggttctctctctgacg

SEQ ID NO: 16450 - DNA, 2483 bp, Oryza sativa
  unsure (1)..(2483): unsure at all n locations
caaaagagaataaaaaaaaaaggtgagaaagaaaaaagagggccccttatggaagttattaatggtcattaaaggggtgcgccctgctcctgggagagaaaccttttaaaaaaagagccatatttggaattttccacccacaaagcccccttttttttttttaaaaacagacttcccccaacagcaaacatttttccatggctttgggagcccacaagagtggcgaaaaaaaatgttttcatgagtttttataacacaaagcaaagtatctggaagaaataaagaaaccaatcttaaaaaaaaaaaagataagtaggccatccttaaaaagaaaggaagtaaagttgaccacttaattgctaatcattggtccacagcaaaaatgatagaatttactgagtgcttcaaatttctgaaatcttgggcttttctaaacacaattaaatttctgaaatcctcggcttttctaaacacaattgcaactttcaaagattcacctgcaactctctgtaagtaccactgttgacactgtatgcctaatatcctgtaatcagcaatcacattacaaaaacatgtgaaagtactcaaatattaagtaggtgctatgttcatccagacgacgatgtgaggtagcttatcctttgatgtatttcaattacgaacactgaactgccaacaacaaaaaataactagtattacactgcattataagttcagattccttagaatccaattacattgttgtgcgaatttcattgagctatggattttgggaagacagaagatagaacgaataataagcaaaaggataagcagtgcctttcctaaggcaacgaaacatttcgacattgaaacaattctatggctggccatgatcttcaggttgctgatcctggcgttcaccttgccaagcccaaacaatgtccttaagagctggtttcatgtcctccttccacaaatgttggtattctagtgtatctccattgttcttcttgatttctaccaaatgaaatgaaggagtcacctcgaagatctctgcatcgattgccaatacacctttccttccttcacttgcaccttccattttcagcacaccaccttctttctttttcactgtcaacttcgaacatgaggcaacatcctctagttttgagataatagctgaagctgattgacttgatgtaaaccttgcttctttctttttatcagtctcctcaaacaagccagaaagatcaaagccttccgaaagagaaataatatcgaaagcgttaaggttggttagctttcctgcatcctgtttctcctcagtctttttgctactactgctacccatggaggagaaaacaacattaacatcagcaagagctgtaactggttcatttgtctccacgttcttaaggattagcttgctatcaagtcctttcttgaaccagtaagtttccattatttttgtaattggcattctacttcttgggtttggatcaagaattctcgaaactaattttcgtacatcagacgaaaaccaagctgggcatttgaactctgctttcccaatctttctgtacatctccatcaaatttgaatcttgaaaaggcagataaccagccatcagaacaaacaggatcacaccacaagaccatgtgtcaaccttgacaccgtcatacccttttcggctgatcacctcaggcgccacatatgcgggagttccacaagttgtgtgtagaaggccatcttgtcgtcttgattcagcaagagcgctcaatccaaaatcggtaattttcaggtttccattttcatcaacaagtaggttctctggcttcagatcgcgatgataaacgcctctactgtggcagaaatcaacagcacttactaattgctggaagtatttccttgcagcatcttctttcaacctacctttagctactttgttaaacaactcaccgcccttgacatattctagcacaaagtatatcttcgatttggtagccatgacctcatacagctgtacaatgttggggtgcctcactaatttcatcacagatatctctcgtttaatctgatccattaggccaaccttaaaaattttgtccttgtcgatcaccttgatagccacactttgtgaagtcacgatgttcctaccatgataaaccttggcaaaagttccttgccccaataattttccaatctcataccttcgcagtagaatgtttccattcttctcaagttccatcattcaaaacaatgctagcggacaattctttattggaattntagaggaaaaccgtanaagcaaaaacttcaaccatcatcagaaattgcatgatctagcatagcagtatttctgacattgatagcatcattattacttntgtgatgcagaatgcaccangtgagcaactgaaaatctcgctcattcaagaaaaatttagggtgggaattggtccaaaaaaaatccaaaaattggggggggggaaaaagaaaat

SEQ ID NO: 16451 - DNA, 4346 bp, Oryza sativa
  unsure (1)..(4346): unsure at all n locations
ccctccaccaggaaaaacgggtgttttaaaaagccaaacaaaaagtgttcacagaaaatgtccaaccttttataaccggacagcccatcgccccaaaattcctgtgggtgttttggcctttaaaaaggaaaatttttaaaaaaaaggtcagttgaatataggccaaaaaacataccttaatttagggaaccccccatatccaaagggaaaccgtgaatatcggtttagcactttaacccccggtgaaggtagaaggaactcctccagaagctgtgggcccggaaaacaattttcttcggtgggcttttcccccggtttgttcaaatcacgggcaaaaatgtataatgaaatttccaacaagtcggtcagagttttgacaacaccatgaagggcttcatccgggcacccaatttcaattgaaccccaaattctccgacgggctaaatggcagactcgtgcttaacccaagaaacagccttaaatcaactgggtaaaaagcacaggagggcacaaaccngacccatttcccagcgcaaaaagaagacggatacttttaaagcaccacggatgattgcagccggctgccaagaaacccgaatccgactcccacgacccaagaatgacccgggggcagcaatgcaggtttgcagggtgggacggggggctgctccgatcgcttcgttcgttccttccttctccactgctgttcttggtgaagggaaggttggggcaggaaagaaaaagtgcggggaggaaggcaggaaagtggggaggagagaagagggatggcggatttatggtgagacggacgcgaggtcatgtatgtggtccggcccttcgctggccaccaaacctttcactgcaacgggtggcctcaattatgccttttggccctttgcactgcattattgcttgcttgcttgtttgatttcgagggttttctctaagggccttttgagttcgtgaacaccaaattttttaacatgtaaaatcgaatatacggatacatatttaaatattaaatatagattaataacaaaaaaattatagatttcgcctaaaaactgcgaggccaatttattaagcctaattaatccgtcattagtaaatatttactgtagcattacattgtcaaatcatggcaatctacacacaatttatgtaattaatattttttatatttaatactctatgcatatgtctaaacattcgatatgacatggtgaaaaatttttatttaaaaactaatcaagacctgaattgcctttgcaaagtgtcagatggtatgtctgggaaaatctaagattctaagaatcaactgctccttccattttatataatataagacataactacatttatttaagttgtttcataatagaaggtgtgtataaatgcatgttattaactagcacatctttttcattaaaatattattatttaaatcatctaccatcaagatctctaattttattaggcgcatgtaatatatttattaaggtaatccaaactatgatggtttgggtggtcgtgtggaattgagggagtacttgataattaagatataataatacggaggagctgtgaaacccagcttcttagagtttagctcgttcatgtttcagattatgtatgtagagcgtctcagaatctcaatgaaagtacatattattttggagaagcctttttatttcgagagaagctgcagttgtcaaaaatttttctaaacaggcccagtgactctgactcgtagttaagggtgcattgtccactttttaaaattgtactccttcatatttcacgtgcacgctttcaaaattgttaaatgatgtgtttttgtaaatgttttctatagaagaattgcttgaaacaaatcatattaatttttttttcaagttttattgttgacataaaaattatgggtacttccactttaatatttgtttaatttgcctctaattattggtaaaattacttattttaaatacatatttttgttaatcacataaattttcttccatcgcctcttgcacgaaagcgaccgaggcattcacttgttgctcccatgatacgatcattacactaacacgatcattacactaacgcgtcaggtacatcattcatatcatacatgtgcatagtggaataattatccaaaaaaaaacatttgtgattattattggtcatactaggttgcttaaaaaaaatttcagttaaactttatccactgggtatattaccggtacaacgcacgggtattttactagttttttttcatataaaacagaaaagtctgaaaacgcgtggaccaattttggtaactggccgaactcccattagactttacgggcaaccggcccatcacgcttttttgcgtggccgtaatcgaaaagaattcgtccccctagttgtgtccccggggagaataaatttcctaatctaaattattccgccaaaaatccgccgcgattggccaccgctggctccatggcaagcggaagcggcgagggcaagggccgccgccaccaggacaatatcccaagcgtcgtcctgctcgagctctggggccacgtcgccgacgatgaccaccggcctgacgccaccaccgccacttccacgacgagcaccggcctgccaatctcggtgaccttgtgcgccgccaccccgccaagcctctcgcacctctccgtcgactgccctggtctggtggatctggatcccaatcccttagataagtttgtggcgcccacggtgatcagcacggatgccgacctcgtcctccttcgtgtccctgtcgatcgctttgccagatttgatcactgtttcagcgactacttcgtctacaaggtgcactctcactctgaaagcgcaaagctgcaccgtctcccgagcccacgtggccgtggctttgcagacgacaacattgccatactgagctgcggcaacgacgacgacgactcctacgctgtggccgctcttcaacccttgcatcatgtccacttcaggcttcacctgtgtcgctctacccccgatggaaagccagggagttggacctcccatcagttgacagtggaggagccgctgaggggaacggtgtgccccgtccctgactcagcactgaggaggatcttccatgccaccaccaaggtgattacgcttggaggtgctaaaggtacagttggctgggttgatctctggcgaggcatccttctctgtgatgtgctcgacgagattgagagccccaagctccgcgatttgccgctgcccttgccctctacgggcaactggcctttgttcctcaatcgctgcccctactattgtcgtgacatcgtcgtcaaccagagcagagacactatcaagtacgtcgagatggaattcaccatcttgaactcatctcaagatccacgctcctcgtatcacgaatgggtggccagccaagaatttcgaagttcgcatctagacatcttggtcgatgatggtagcttgaagatcaacacatggaacatgcctatcccggtcactcatgggatgactggaagcctggatgctccgtcacttccaaccacttggacactgccctgcatagttacatgaggaaaatagactacaagaggaaaaatgccgccatatccgtggagagtcttcacacggcttaccctaccctgagcatcgctgatgatgatgatgttgtttacttgctatccaagcgcaccacaagtggaaactattctaatccctcgaggagatgtttcctcgtttgctcaaaaaccatctaaatggttatgaaaaattctggaaaaatttgacaacattcatacaacacatatatacaacttcacaaaatcttaagtccaaactcaactcacacgtcgagatataaaaaagacaaattcagcgtatgaatagtagagtactgtttatatctaaatttgtcttttttgtttctcgatgtgtagatcgaatttgaacatgaattttggtggactagtaggtatcattatactctacattgtcaatttttttttcagattttttcacaactatttgcatcgaatttggaagaaaaaggtataccactccccaccacaaggggagcagccaagatggtattcactcttaacatgagggcacgtgttctcgaagaactggagaaacttcatagcatgagtcaccttggttttatgcgttgcttcctttccactgggatctccaaacatcttaagcctacaggtaatttgctgtgatatctggggaaatttatatataccttatttgtgctgtatgagttgaaaacaaaactcacgctgcaggccgtgcatggttggaaaacaaagctcacgtgaatt

SEQ ID NO: 16452 - DNA, 1976 bp, Oryza sativa
gtgtgccacatggtctttagaatagcatttgcatcttcctccgtcgcaacatgtctgattaatgcctcattccaggcgtttgttccagggatcaaaagctcatgtacatacgtgagcctattccaattcttcttctgtataacctcaactttctcaccatgcgccacccatctattcctccaaatcttggtagtccgcctgtctcctatcctccaaatcagtcctttctttagcaattccagcccatgttcgattcctttccaagttggtgaagtattggacgggaaagctgtatcagtaagggagccattggggtaatactttgctttcagcaaccgagcgcacaagctattcggctccgcgatcaacctccatgcttgacgtgctaataaagcctgattgaaagaccgagtatcccgaaagcccaggccaccatgaagcttagggctcgtgagcttttcccaggatatccaatgtactttcctctcccctttgtcatgtccccaccaaaaattgcgaaccatctattcataatcattacaaaaatgttcaggcatcttaaacactcctatcgtgtaggtggggagagcttgagctacactctttatcagagtatccttccctgcagctgatagaaacctctcacaccaatctgttaatctcttagaaaatcttcccttgattggttggaattgttctgatttcatcctaccttcgggagttggaaggcctaggtatttatcttcaaaacctgctctttgaatctgcagaacagctttgatctcctcctgcctctcctatgagcaaaattcactaaacaacagagaacactttgctgggttaataagctgccctgtgcttttctcgtatagactgagcgcctccagcaaattctcgcttgatcaacctcggcttgaaaaaacaataagctatcgtcagcaaaaagtaagtgggagatccccggggctccccgacacaccttaattggttggattgaaccttccaagctcttcttctccagaatatgtgacaacccgtcagtaataaacagaaacaagtatggactaagaggatcaccttgccgcaatcctcttgttggggtaaaaggatctagcaggttcccatttaaacagatactgtatctaacagatgtcatacatgacattgtccacttcctccatgattctccaaaacccattctttgcaacaccccatccagaaacgcccaatcaactctatcataggcctttgaaagatctaatttcagagcacaaaaattctggttctcccttttgcatttttggatggcatggaagcattcgaaagcgatgagcgcgttgtctgtgatcatgcaacctgatacaaaagcactctatgcatttgatattacatcatgaaggagcggtctgagtcgattaacaaggcatttagctatcaccttgtatatcacattacatagattaacaaggcatttagctatcaccttgtatatcacattacatagactgatgggccagaaatccttcatctcctccggtgacttagtttttggaatcataactatgacagtgtcatttgctccctcctgcatttcgcggttttcaaaaaatgcttgtaccactctgttgacgaaaaaatcgaacacaccggcctgggagatctgcttagctcctgtgcagttccaaagattgatgagatgcgagcgtgccagtcaatttgatcctacaactgacaaaatatgtaagcagcagataaaacagccgattggctgacaagccgatggagtagttccaaccgatagctgataatagccgatgtcgataccagccgatagcgatagggtttaagcaatcggctatatgtccaatatagataatgatataaaggcaatcggttgatgatgatgtaataaaataacaatataaccgagtagaaaccgggtaccgagctcgaattcggcataatagcagtactca

SEQ ID NO: 16453 - DNA, 14794 bp, Oryza sativa
  unsure (1)..(14794): unsure at all n locations
ttcacattcagtttcagcaaaacaatacacataaaaaggcaatattcagatattactgattcagtctcagcagaatgaacaaccagaaaatttgtacaggtcccaaaaatcgattcaatcacaagcaatactgaatagacaacataacaacaaagtttcatcgaatttggttgtgcatttcacaagcagtattgaataggcctgaacgacattgtttaatgaattttctcatgtaattcacaagaaatgttatattattctaaggtcaaaacacaataccaccaatattaatcgatggttcgttctcgggtggttcaattggagaagtttgtcattgtagatcttcattgttttctcgatggaagataccagcgaggatcatacccttcgcccactttccttttctcaccttgtcctttttctaccttcttggacttgtattcttccatggaactttcaacacgctggtagccatcacatatgaactgaaacatcatcatgatggcattcacgtggccatgtaataattccccttgtttgctgtttgccttgatgaaggttgcaccttcacatcatccttagagttcattgactccttagttgtggcttgatgtggtgaaaaatcctcatcatccacatcatccatggatgccatgccttactacaatacagaagaagtaggagatcaataggtgcaaactaaagtataataatttccaacacaaaagagatagattggagaacaataccaagatgacgagttgaagttccagcagtcctatgcagccgacaatcagtggtgagtattttttcttggttcatacttgttcacccactcatatataggctaaggaggataatgttacctttgttgctatcatgatatttatggaaagatatagcaatattgccttgtatgtcttgtgagttgacatgattgagcatgtaatacatggaaatattgccaaaatagcacctgacagagatttggatatgatttgctaacctttaaactggttcacccacatatatataggcaatcagtgatcaacaatttttggacacgaaatccatctcagaaacaaccataaaattatccaaataatatggtcaatggtaaccttgctcgaattcagaattcgccaaaatcaatagacttcaaagttcaaatgatcttcaacaatacaaattttgtgaacacaaaggataaaacaacagatattagtataacttatgccaatggataaaatctgcacatgataaataataagtgcctacatgcatatacaacaaactaatgatgtgactataccaagaaggaaaaaaaattatcaacggcagttgcacaactgcaaatggctagatcaggttttaactgaataaagttggcacaatcgctgatcgtcaatgtcaacctagatgaatctatatatgttgaaaattaaccgaaaacaatagctaaaaatgttatcctgcaataaaaggaaatggtgaagtgtatctattcagaacctttgacatgcacaggaaatgtcaaaattctgatagggctttgttgaagctcaaatagatccatacctacaagcattaatcagttataggatatacaatgggctcaactctgtttgtcgaggtactcaaaaggaaatagcaatgcttagaaatatcagtcaaaggtgcaatgcaaaaaatgatggtaaaaattgctcccagaaaataaaaaggatgaatggcaattgattggcagatacttaatcaaccaaatgtggaaataatcgtagtgcaaatcattcatgattaaaatacaacaaagtaagtaatacattatgagctagattattacatgatatagtgcaaatcattcatatttttagagaatggatcatatttcaatatgtttataaaaatctgtagaaatttcattgggagtaatatctcaatgttgtacacaaaataaaccactactagatagaacatggagatgctgcataaatgtttggcaaacttgtgttacagcaacatagcagcataaaatccatgtgcttctatgctgttacaccatcaaatttacaacacccaagatcactcatattaactttgatttttctttaataaagcaattctcagttgtaaagacggtaagcttagtaactggcaaagaaatgaattttgttttgagagagcctgttttaataactttttcatgcaagcattactgaagctgtgagggggagtatgcagtacctgattatgcagtccctcctcttttctgaattttgtgggggagattccttgccaagcgagcctatcaaggagcaaaagaaggaaaaaaattagcaagattaagagttggaaatgaccaacatctccgtaacgatcagcagactaattagatcagcatcaaaagcaaaacatttgatatagttcactccataaagaagtccactagggcgagaagatataatttgcagtagtttatcccttgatccggtttgatcactccgtaaaaaagaaaaatacctgtagcctttaaatgcgatgaaacaatgtaattttctggtgtcatagaattaataactgatatacttgaccaaacaagttccaattctgttatttcatctacatggtttagaaacaaacttaataaaactctcaaaaaaaagctactaatcactgataccaccaagctagtagctgaactactcaataaaacactctataatcgttaacaacctgttgacgcgaaaaacacacactggcctgggagatctgcttagctccagtgcaggtccaaagtttggtgagatgtgggcgtgccagtcagtttgatcctgcaactgacaagatatgcaaatagcagatcaatgagccgatcagttgacaagcccatggagtaattccagccgatgccgataccagccgatggcgatagggttttgagcaatcggctatatgtccaatgtatataatgatatgaaggcaatcagctgatgataatatagtatagcaatataatccaatagaaaccaatcggctagcaagtcccaatctctgatcaacaggcagcttcttctgcaccgaccgattttcctttccgggacgaaattggcttgaactaccgacgtggttttcgtcggcatcactgcatcacgggcaaccttccttcgagggtaacctcatcccttcgttttagtagaatctaaagaatttgtagtcccaatgaggatcgaaattgttgttgtctttgtaacactcctctttctgcctctcaagcttcccttgatatttgctgatgatcatagcggcattgggccgatagcttcttctattggctatcccctcgcttgtgtggaccatgttgacaggaaaaggattgccgtcgatctccatggatttctttgggtcgtcgaacttgattcttccctgctcaatggcggattggatctgctgcctgaagactgtgcactcattggtgttgtgagaccttgtgttatgccacttgcagtattttctcttccctagctctgtagcagatggaattacatgaccagcaggaaggtggatttgtttctcccgaagcaataaatcgaagatcctatcgtctttggtgatgtcgaaatcaattttttcctcctttccagagtccttgacccattggcacgtgaccactcatttgttccttgcccattcagctattgctacctcagggtcctcatcctcttcggtttcagagacatatgtgctaacattgttcacctttttatatgcctttctagcctcaagaaacctttgctcgtgtgccgtcaccttctgagctaggtgagctagactctcgaattcctgggctgagaacttctccttgattggcaccagtaggccttggaaagcgagatcggcaagctgggaatctgttaaagccaaactaaagcacctgttcctcatatctctgaatctctggatataatcttgaaccgatttgtcatgcttctgtttgattgacgttaaatcggacaacttcatctaatgaatcccgctataaaagtacttatggaactgctataaaagtacttatggaactgtttctccagatcggcccaactttgtacaaaattatatggcaatgatgaaaaccacgtgaaggccaatcttgacagagacagaggaaacaatctgacccttaaagcatcggtagctgatgactccctgcactggactaagaatcagctgacatgttcatatgttgtcacattgtcctgtcctgagaacttcgagaaatctgggaccttatacctgttcgataatggtactctctcaaaatattctgggtatggatgccgatacaagttctcactatccttaggcttgtgcccgaattgttccctcatcacattggctatcatatctgcccaaggcttctgctgaggtgctccctggatctactgcggcacctgatccagttggttgtattgaggcaggtactggggctgaggcgctcctcctagccgatactgtatctgaggtgagtggggctggtactgaaaattaaggttgccccttaggtgaggttgaggagtttggtgtacgatgtgttgatcagggttaaactaggtgccgatagttggctgttgttgtgggataggcgaaagttgtcccatggttatttgcggaatcgtctcaactatcggctgtcttggtctgaacatagatgcgacttgttctggagagatccgagggatgttatgccctgcatgttgcggttgtggcctgatcagaacgtaaggattgaatcctggctgcccttgtgccgatgttgatggaccttgcccccagggggcacaactgaagccatcggctgttctggggcggcactcgagatgggttgatgcctgtccatgctgacagttttgtagtttggaaaaaccctccaggcagaaaaactggacctttggcttgatgctcagctatcgtgccgtcaaccacatatttgatcatgttggtcaacatgttgacaagtactcctgattggttgaccaaagcatgatgaacggcataatcaacctggtcttgcatacatctgagcgcctcgagatcttcctcctgattgttgcccttggctttgtcgtctttgccagaacttgtttccgcgtcatcgttgttcgacagaactaccttatatttctggaccatggtgtcggaacgagtctgtgcgaatgaatgcaggaatcgttttgcaagtcatctctcatcttttcaaattctgccttctgctccagggtcagcttgtccattgttattgggatgacattttctggatcaacttctctctacttgaggcttgccatgaagaaaattttacgaaagtcggtcccaccgggcatgccaaaaagtgtgttgatgcggaaaacacacgtactggcctgagagatctgcttaactctagcgcaggtccaaaattgctttcgggttccgagcgcgctagttggtttgatcctgcaaccagcaagaaagaaaaaggaacaaagttaaatccatcaacgatagccgatcggctggattgccgataacgtattgttcggagccaagccgatgttacttgcatcagatcagcaagggaatataaggcatagaaattattagatctacccaatcggctgtagacgtcagcagtacgcaatctatccaatgaaagcacatttggatcaagtgattgggatagatcgggcgatatgccgagacagtataaatcacttaatatctaaatgtgcttcaaagtagggattatgtatgctcacagcatagccgattgagcaaacctaacgtgtatcgactattactccgataccactttatactacaatattagcacagatgaaatatacgaaacgtagaccaatctaacaagcaaggtgtcatgtcccaaaacgactctaaaatatatcctttaaattatgcctagaataattaaaatccgtgtgaaagcctccaacaattaaaatgtgcaaagttaaaagtcaaataaggcttaggggatttttgtatttttcctaaaagcctaaaaggtgtaaataaattttagtggaattttcagagcacaaataataattactaagaaataaacaaagttgaaaaagttttataaaaagaaaaaccttaaaagtcccccttccctcccttgggccgggccggcccatctctcctccccccctctctctctctcctctccccgcggcccactcagcctctccccgcgcgcgcgccgctgacgggcgggcccgcccgccaccctcgctgacgggtggggcccacccgtcatccccatcctcccgccgctccgcctgcgccaagcgccgccgccgccgccaaatccgccgcatcccgccgtccccgcgtgcaataaagtgggggaaatcactccccgtgatcccctctccctttccccccatttttccctctctctcttgtgttcaaacgggcggatttgcccccgcaaatctcggcagcgccattgatggcggccgacctcccgcgccggtttccttcccctccggccgctctctcccccttccaaccctatttaaaccctccccgcacctcctctgtccgtttccgcctctcgccgcccttcctcctcgccggaatcgagctcgcgccgtcgctctctctctcctctattgccaacgaccttcggccggccttctccgctcgccgggaccgtctcccgccccggcgtcgcctcctccggtttcgccgcaccgccgtcgaccccgtccacccccttgccgagttcgccgaccgccggaacgtcgtcgaccccgtcgacccgagccgcgccgccgccttcctccgctccggccgcctttttcgtcgtcgccgtcgacctagggtgagccgtggaccgccgcctcttttcccccttcccttcccctctctcggccgccgctccgccgtgcctatggccgccgtcggtgacaataggggcgcgggcaccgcctcccgccggccgcgccgagtggccgccttcgggcgggccgagtggctgccgcgtggggcccggtcatcagccgcccgcgccctcgggtgcggctgatgcgtgttacccacgacgccggccggtgtgagcccgggtgcacctggtccaccgtggaccgtgaggctgccgcatgggccccactcctgtggacccggtccgcgtgccccttcccctcggctgacgcaataaacccctttttaaattaaattttaaatgaagaaattcgcaaatattcatttaaagagcatataaactttaaatggccataacttggccatttgaactcggaattggaccgttcaagtctctaatttttccttaagaagtcaagaacccatttttgtgctttgttcctacttgttatatggagtttattagagtaaaaacccttttcatttctgttggtcgtatagacgctgcagcttcggaagatccgctcttcgtggaggttgaagccgacgtttgggaaagcgagcaaggcaagtcacatcatccttgaacatattgaatcccagtttataaaattattttgatttaaattattgcattatcgctttatttaaattcccgcgttatcactgttttatttagccatgcctatttacctttgttatgaccttattattattgttattgttattattaccttgttcaccctagaataaacaaaaccccaactagtggacactctactcatggtaccactagtatgaatttaggtagatgcttcgctggttaattaggcaacattaggtggttttacaactctagactttgggaatattctcatcacctggacactatggaatggatggattattgggaattggattcacacctccccctctattcaaaaccctcaaaatggttttaggctgggctcggggtgcatggttttgatagtagcacctcggccataaaaggaccagtcttcgggcctctgttgcaaagcactaccgtacttccacatgtctagtggctaaggcttagtttgtggctcagtctggttataaacaaaagtacacggatggagatggacgaagtcgggggtcaatggacatctctagggcaaatgaaggctacacgagctgcggctcggtagtcgagatgtcatggcacagggccggtgtcctgctgctaggggctcggtcctgcctacctgtcccgaaggttccggccgtaggtggggttgggtcagtactcttgtctatggctaggatgggttggaaactatgtcacgtcttccgtccgtataccgtggtggtatgtggcacgtggttacacgtgagaaagatgtgtcttgtgggtaaagatgtacacctctgatcagagtataatctattcgaatagccgcgccctcagttatgggcaagccgagcaatgtacccaagttagtgttttaattcttaaaacctgcttaacaactaaaatgtggaatggatggcctgggttggcttgggacgagctgggacccagggtcgggttgccagttcggtctgaatcatcgtaggccttgggttaaggcaggttcgtgtgggttcacggcctttattaataatattgtatagttctagaatcgtgtttacaaaatagctttgagcaactaagtgtcttttaatgccgtttactgcaaaccctaaccctttatattataacccccttgtactcccttgcatttattctgcacttgtgggtgtgtcttgttgagtacggtggttgtactcagtcttgctcaatttttcccaaacccagaagaggagcccctggaagatgaaggctttggtgtctagctcatgcctgccgtcaagcgcctgtggtcgtcgccctagtcttccgctgtttcccgtttgtctttgtgtgtgctgggccttcgccgccctgtaataaattaactatttacgcttccgcttgttgaactctgaactgtatcaacttttggtgtaccttgcctcctaggacaaggaataatgcacgcacgtaaggaacgcccgttagattatttccggtcgtgacaagcccccagcgttagatcgtagtcgatttaacatcggggacactcgcgcaatatatattgtataaaaacatgctctaggtaaacataataaattatagatccgacaatgctgtatgatcttgaaaagtaggtacagtaaattgtatataaaatattgcgtacctttgtagatatatgccggatatatctacagaattagtagatcaatttaaaaaatcaatctactaaatacctgatcatgggtggctggacacgtactgactccatacatatgcatgtgtactgtgtacgtgtaaggagcaggcatatttgttgaattcgcgtcatcaggacgagtagtcagatttgtcaactagaaatttgattctagcgcaaactacagaactcctcgaatccgattaggatattagccactgaacagatcaatgtggtgcttgtatttcagctcctcgacgtgcttgttttgttgatggagatcgatgccgagtctggcttggacccggccagctgatgccgcccaccggttggcgtcctgcacgtcgatgggttagtgtcggatcagttttggattccgccaacactatggtcctctgccgctgcgacatcttgaagcttgattggtctcgccggatcgaatagttgatggcgatgattccaatctcgttgggagacgtactttggccaggttggatctccctgatccgaagtcgtcgagtagcttattgttggagaatccatctcttaaacccatctcgtctaaatcctgaagcaccaaaaaatccccctacctggcgcgccactgtcgacgtttgatgtcgcgattccggtatttgcatagtatggggatcgtcggtactaggacatacgcgagactgaggtaaaagagacagaggcgacgatttttatacaggttcgggcccctgaattgtcaggtaataaccctatatcctgttggccgaagccggtattgctcttattcaccataatcacacgagtacaatatttggggtagcctatctaactgttgtcgacatggcggtctgtatgtctgactcgtagtcgacaacagggtagtcttcctcctttagttcctgcccggcaagatcagagatagcacttttgtctctcctgacagtatccagagacagcgtaggggactagccgtgcttatccctgaagtcgatatccaacgtgttgtcttggcgtatgttggtttgtatgttgtggcttctgttgttccgtgtatgttgattatggtcggtgttgattgaggtggtcgtgtcccctctcctcctaaggggtcttgtatttatacccataagtgtccccttgtccaagtaaaactagggaaaccaatatggatacaatccgagtagtacttgtcgtttccatacagaactctggttgtctttccttatccataactcctcctatatccgcaggttgtttccgtataggacatggtatgtggtgggtcctgctaagatttagtcaactactattaggtatgtggtatccataaccctgacagtagcccccgacttcaatgcaaatgaacgagttcctattctccacagcagaccttggaggaactgttatcgagctcatgtgaccgttttcggtgagttcagagataacgttagatttcctttatcagcctcgtgcaggcacctaaagggtttgtctgagtcaatctccaacgtcaaccaagaaagtacagagcatacgactaagtctcccgtcttgctgtaatcgagaatttggattgaagtcatgaaattttatcttggcgggtacaccatctcttcattccgtattccttgttgagatccaccaaccattcttgagtgatcgagaaggcgcagagtctacgacggagccttgtcaacatttgtcgtactcgccttagtcgatcttggtgtagaaccacagagacatgaagtcttcgacaatgttgaatagaattttcctgaaatcaacactcagaaaagaacattagataaaaatatcccccgagcgagtgctcaaagggtaacgtgttatagaatatatgaaaaactgaaaatgaattaggtttacaaactaatgttttgtgtatgagcgtctactcttttaccgacttcgaccagtcagtttgttgagttatacactctccctagcccccagccttatcgtcggagaatcgttctcggatgataaggctcttggacctttgacctggcttagttgaacaagcactgatcctagcccccagctgtgaagttagaaaattcatttccgattacacggcttggttaatacgcacggcgagaactcttaaacgaccagatcttagatggtctttcgtctctaaaggatccgacaaagccttatccgctctgggcgtccccagccgaagttcccttaggttcctcagagactttgtcaagacggcgtaaagggacattaggttaggtttcaacgctaggtgtctttcgtggtaagggatctctgggtaaaacacttggcgatattgtgcacctgatatcaacattgttgaagtagaggtaatgggagaatcgctacacctctggtcaagaaccaggtagtagtcgtaactcaaccactagaagtgaatgtacgagagatcggtacgattgactggttgagaaccagtgagtaggtgtctctcgatcatttgaagttgtggtgcatggactgctgcgttattgctgtagccgtacctcgaccatctgaggttgcggtgcgagagattgctacgcactggttcgaggaccagcggacaagtagaattatctcttggacaccaatagaggttgcggtttgagagattgctacgcactagttcgaggaccagcgaacgtgtagaattatctctcaaacaccaatgaaggttgaggtgtgggagattgctacgtactggttcgagaaccagcgagcgagtagaatcatctctcgaacaccaatggaagtggcgggagattgctacgtactggttcgagaaccagcgagcaagtagaatcatctctcgaacaccaatggaagtttgcggtgcgggagattgctacgtactggttcgaggaccagtgagcgagtagaatcatctctcgaacaccaatggaagttgcggtgcgggagattgctacgtactggttcgagaaccagcgagcgagtagaatcatctctcgaacaccaatggaggttgcggtgcgggagattgctacgtactggttcgagaaccagcgagcgagtagaatcatctctcgaacaccaatggaagcactagagttggtttattacatgtgtatctcatgtggccagcatgactcacacacccaacttgtagcatatccggatgtccgttcgcaatcatgtcgggtgatcaagccgacaacgttcacgaggaattatccgttaacaacatttttctcaaatagtccagccacggccggcgctatgagataggtcgtcggtctttgttggtaggttgggcgcgacgactctgcatttgtcgagattgttctcaataatgcggtgtacttgatcacaacctacttgagtgctcaattattcctgaaaaatattttctagaagacaagatatatagcagataatatcaagtgtgtactcaaaaaactacatggattttctagcattatcaggatataacgagcatatataaatatcaggcattatgtaaaccgtaaacaagcatgatttatatggaagaaaatagagtgaaccctgtcacgtcccaaaacgactctaaaatatatccttaaaattatgcctagaataattaaaatctgtgtgcaagccttcaacaattaaaatgtgcaaagttaaaagtcaaataaggcttggaggatttttgtatatttcctaaaagcctaaaatgcataaataaattttagtggaattttcagagcacaaattataattgttaacaaataaacaaaagttaaatgattttataaaaagaaaaactgtagagagccccctatccctacctctccctattgggccggctcggaccatctctctccccctctctcctctcccccgcggaccatacggcctctccccgcgcgcgccgatgacgggcgggaccgtccgccaccctcgctgacgggtggggcccacccgtcatccccttcctaccgccgatcccgccgcctagcccgcgccctagcgccgccgccgtcgtgaatcccgccgcccccgtcctccccgcatgcaatcaatacgggggaattattccccgggatcccctccccctttccccccatttttccctctctctctccctcggattcatttggaaacccctcccctaacctcgacggcgccattaatggaggccgggtcttccgcgcccgttttcccctcctccggccggcccttttcactcccaaccttatattaaccctccccgaggctcccaccaccggtttcgccaatcaccgccctctctcaaccgccgaatcgagctcgcgccgtcgctccctttttccgccgtcgccgtcgagctccggtccgccgccgtcgtcgcccccgaccaccttccacctcggcgccggcttcttcggctttgccgcatcctggccgacctggtccccccctccgtttcgctcgtcgaccgccggagcaccgtcgaccccgtccacccgaaccgcgccgccggctttcttcggtccggtcgcggtttccgtcgtcgccgtcgacccggggtgagccgtggacccccgtttcgtttcccccttttccctcccctctatcgcccgccgttccgccgtgcctatggccgccgccggcgcccataggggcgcaggcgcgcttcctcccgccggccgcaccgacgtggccgcctccgggcgcgcctagcggctcccgcgtgggggcccggccgtcagccgcccgcgcctttaggtgcggctgacgcgtggggcccacggcgccgccggtgcgagcccgggtacgcccggtccaccgtggaccgtgaggctgccgcgtgggccccactcccgtggacccggtccgcgcgcccctcctctcggctgacgcaataaacctttttttttttaaattaaaatttaaatgaagaaattcgcaaatattcatttaaagagcatataaacttcaaatgaccataacttggccatttgaacacggaattggaccgttcaagtctctaatttttccttaagaagtcaagaacccatttttgtgctttgtttctgcttgttatatggagtttattagagtaaaagccttttctttttcgttggtcgtgtagacgctgcagcttcggaagatccgctcttcgtggaagttgaagtcgacgtttgggaaagcgagcaaggcaagtcacatcatccttgaacacattgaatcccagtttataaaattatattgatttaaattattgcattatcgctttatttaaattccggcgttatcactgttttgataaaccatgcctattagcctttgtataaccttataattgtaattgtaaaaaaaaacttgttcnccttaggtttttcgggcccccggctagtgggcgctctactcatggtnccagggtcccgagctcgnttncgcccttggtgagccgagatgcattcaacccaggngnggggggtgggagagagaatagaaaaataatacgtaacagcanagattaaaaaaatgattantagtacgaaaagaatatttaacagaaataaaaaaaattagaatgagagggt

SEQ ID NO: 16454 - DNA, 3405 bp, Oryza sativa
  unsure (1)..(3405): unsure at all n locations
accccaacaaccataaaggcagaaagggccctccttcccacacggataagaggacggtggtatattctttttttaagccggaaacctagtgaccccatcggttccaaaaatccctttctagggaataccctgacaagttaagggtttagatatattggaaaaatatttgccaggtcactaaaaaaattggtttctccttccggatgaagaaggtatatgtatggacccaaagtccctttgtaataaatcaaaggggatttgtggggcaccatataaaacaatgtgnccaagtacatgactcacttgattcttaatggaccatgaaagcaaanctacacttccaaagcancggataaggattgaaagaaaatcagtgccattgcatctataaatagacaagcgcaatgaaaaccctccccatcgttcacacagttcaagcattatacagcaaaaaaagaaagatctagtgtcccgtagcaatgaagatcattttcgtctttgctcttcttgctattgctgcatgcagcgcctctgcgcagtttgatgttttaggtcaaagttataggcaatatcagctgcagtcgcctctcctactacagcaacatgtgcttagcccatataatgagttcgtaaggcagcagtatggcatagcggcaagccccttattgcaatcagctgcatttcaactgagaaacaaccaagtctggcaacagctcaggctggtggcgcaacagtctcactatcaggatattaacattgttcaggccatagcgcagcagctacaactccagcagtttgatgatctctactttgatcggaatctggctcaagctcaagctcaagctctgttggctttgaacttgccatctagatatggtatctaccctaggtactatagtgcacctagtagcattaccacccttggcggtgtattgtactgagttttaacaatatagtggttcggaagttaaaaataagctcatatatcatcatatatttcacctgagaaactcggggtgatatatcctcgtacatcgtcataactaattaccatcattggtactctacaatattactatgtgcttacattcgatccaaagctactttgtctttaagatataaatggagcgtataaaggatgtccatcctttaattctagtaagaacaaacacgaagcacatatgtcaaatactaaatccactacaacaaaattatagaccatacaaagcacgtaaagatgtagcaatccacattgattcttcatccactactaaaataagcgcatgtgaaaggccgcatatgcatgatcattgtgaatatgacatgcccttatcgagcaaacgtgtcacttcatgcaaatatgttgtttgtttcaagcgacatcaagatatgatttcaaagttttaaacattggtatattaatgactttcatatctgcatattaatttcaattgaaagccatcttgttgcccatccttcctgacaagatgtagtgtacaaggcactctttagttgaggctcgctcactttgtattacagaagtataacctagacgtaactaattcagtataaaagcaaaaagtgcatcagcaacgatgagggtggaaactagaaagaaggatttatgatgttccttagtttattcagtcacgaaagaatgactttaaaaaaatgtacacttctttcaaagtgaaaatgatgagatgtcttacttatgtaatgctcctacacgctgaggttgttcttgctgacaccctcgtttctatgagaagtttattctaacatagtaagttgatatttacagcaaacaaaatggataataatcctgatgtttcaacaaaactagaggaactcactgttaacgaccaaatttggtaaagccatgggctgggttcaaagctagagtcgaagccggatttggaggaattctttttaagaaagccagagtgtgtatcggctacgggcggcatcagctgccgtacgtatcggctacaagcggaatcggctgtcgtatgtatcggctaacgccaaatccaatgaagacaagccgatgtagccagtcttgaaaagacaggtccacaactatcatcgggatcaatcgaagtgcttcatagccattgccacacaagaatcggtccagcaaagggcaattgtatctattaattaggtttagtttccttaagagatattttggtaagagtccgcctaagggacttgttcgtattttacattgtaataaagatagagtcatgtccaacaaggagatgttatgtactttgggtataaatatgacccgagaccttataatcaggggacgacagctcaataatacttcggcgcatcgccaccctttttctctttcattgtttcgacgagtttttgctttcgagttgggctgcatcaggttcgatctccgacgaagaggtaaagcttgttatagcggattgcgttctcaggattagtgcttacatctttatgacactctaatcctatctatgtgaatcaccgagttatcatatatgctgcataatctagattgatctcgtcatctaatctcatcggctagcctctatcatcgaaaacggccgacagatttagatatcaacattaagctagattatgcggtatatctaccatatcaaatgagtcttcatcgttcttgcttagatcttatgtttcttttcacacttaatgctgcattggttaggttcgatctactaagtactgtcttgaaacattttatctagctctttctatgaatgctaatagagttagtatcggagtttcagccgatcttacctgatttagccatcgtgtttccactacttgggtcttgatcgtctaaatttgccctttatattaaaatatcatctatttgaagtgtattaagctctctatcaatctactagttcaccttatgtcacgaccggaactaacccaacgggcgttccttacgtgcgtgtattattccttgtcccaggaggcaaggtacaccaaaagttgatacatttcagagtttatcaagaggaagcgtaaataattaatttattacatgggcggcgaaggcccagcacacacaaagacaaacgggaaacagcggaagactagggcgactaccacaggtgcttgacggcaggcacgagctagacaccaaaaccttcatcttctaggaactcctcttctgggtttgggaaaaattgagcaagactgagtacaaccaccgtactcagcaagacatacccacaagtgcagaataaatgcaagggagtacaagggagccataatatagggggttagggattgcagtaaaacaacattaaaagtcacttaagtgctccaaccctactttgtaacacaagtctagagctatacatattattaatcaaggccgtgaacccacacgaa

SEQ ID NO: 16455 - DNA, 2097 bp, Oryza sativa
cactgcgattagaggatctcatcgttatcatggactgctacactactatttactagatcaacgacatggttatcttatcaacatccccccctttgggttcccaaaaagtttcctttctttttccaaaaccaaataaggcccctaactctctgctgtcgttgatgggcaacttcgtcatcatagccggctatctctgttgccgctaatcatcattaccgtcggatgcgtttgccattgccgactattttcttcatcttcataattggtggatttcgccatcaccgttgatgcgcgtctacgtcttcatcgttgggtttgcttttgtcaccaccgactgttctttcgttgttgttgggcgcctacatcttcactgctagctgacctgactgttgccgactggtttcttcacctccatggttatgcaacttcattacatttgattggtggcatctttactaccactgacatcttccgttacttctgatgagcaatttcgtcttcatgttggtcatttcatctccatgccgactgcgtcagttattgccaatagacaattttgactatgacagaaggacaagctatatgctcaggggctcatcaactcaagcgtgaggattatatctccaatttggacttgttccggatacattccacatggattcatagtcatgagtctattttctatgctcaaagactggaccaattattattccccgtaagggctatcaaccgaatacttgcgccagtcgggattcaattattatatttattttggagtatcccataagggataatcattcagatcagaagctattcatatgagctacacttggtctatattacccggaagatttattactcgggagcatgttacatgcgtcatcctttaaatggtgtcgaaggcatattttttggcctaggcctaatatgtctgcagcccatattttcaggtgtggcctgtcacgttcttttagggacttaggcacttttcgcttaggccaaagtgcgcgtaatcaagtgcccaataccttaaaatccttttataccgcagttactcaactttttaggagttggtacaatgcatcttaaaaggtgtcaaacagtaaagctttatatagctggcccgctgacttttttatatagtcatggtgctgtttgggtttttaagcaattgattggatacaatatcattgctttttgccacgtaagtgtgcatttttattgaccaatattatggcttaggctgattatatattgtggtcatttttcaggcggttggtaaatcctttatgagtttatttactcggattttataccacatatgccatatatttccaggtgtggtgggaccatgtgtcttctagggacttaagcacatctgttaaagcagtgtgcgcatggcgtatgcccaatactttggaaatttctttattcacaacatacaagcttctttatagctattttgctatgtgaattttcaatgatgtagtcagctttaggttgcacgcatcatattttacaaagcagtcggtatatcactcggatcatgttattcagggattcacaccgcatatgctatatattaatattaagtcacttgtttgactacgattatcaaaaccactcagttggtgcatctattaggtacatctactcgatgcacctgactttatttttcagccctccacagtcttcatatttggtaaaagtactcgggagatcatggcgaggatgattgaagcactcggctttggagtaatctagttcgagagaagattatctttccgactgtgaaggtctcaggggctactgtggagattatgggtaccccatacccacacggcatggttatccgactagtcataggggatagcttatatctatggaatatgtaaccgatcatgacttgggtattacgtttccttttatattatgaagccgcctaaagtcctgatttgataatattgtaaaatagatttaggaaaccgataccgtatgggttaaggtttctatcttgtaatcctgccccccatcctatataaggtgggcaggaggccctctagggggcatgagacaacctgatcgtcagatcaatca

SEQ ID NO: 16456 - DNA, 8812 bp, Oryza sativa
  unsure (1)..(8812): unsure at all n locations
gcgggccagacggcggtgggnccgcgcgcgcgggggccatctccccgtcgcttttgccgtaaaatccaccgtcccgtccccgtcccgcagagctgggccaccggtcgactactcatacatgtcgctgtgtcgactgctcgtttgctacttacgccgagcggcgcgtgcccccgccatgtgacggttttggagcatgtactgtacaaactagtagcacaagccagcggcagtggagttctcccgtggccagacagcgcgcaccgcagagtattacaagtggcgcgctagatgctgcatgctgtctgctgctcggccgtttcctccttcctgcaacgatcgatccagatccggtccacgggtagcaccgtgcggtgtctcgctgcttgttctggggcttgcacaccaacgttacaccgcacttgtacctttgggttacgtggcaattaattatctgtcattcgttgtctatgatatatgggtccagtggtaaataatttaattattctttgggttaattattctttgagttcggggtatctcacagcttgtagcttctggggcttgcacatgcgcttggtttctttcttttttcgtcgatttgtaatatacgtttgttgagcctatagatgttctgggatattgtttgatttcgtcgattttactgcaccgattggttttccactcaaactggtttgccatctttgttctcacgttttcatcggtttccaaatttctgctcaaacaggttttcattggaaacagatcaaaattctgttgcttttttgctcaaaaccggatgttgggattcttttttctttttttttggacgaggattaggattcaaatttcgatttgggaatatttattggttcaagaatttcattattttgctgatgcacgtatccttcaaatggtactgatgtacgttcactttatcaggaaattggaatggatgagaaaggcggaactaggctctgttctgcttttattatctccatcagcaacaattcaagaagataattaacggtaatcttcctaaacaactaaaggaaggcctccacagggaattgaatctgtggttagcgtcatctcgctagaagagaaggacgaggtaaaaaaaacacataacatcaacatttaaattactaggatactgaactgtattataaagtactgatgtataaatcatttaacctccattgtgtcatagaaatatcggcaagatcaaaaattggtgacaaaaccttgctacgctacagaaacctgagcttgtgaaaatagccgaacaaatataacgatgctctctctctctaaaaaaaatgatgctgtatgcaaaaatagttgtttccgaaggtatgcaaaaattgtattatccaagtctaatagagcttcagttggcaaaatgcagggcggtgaacaacaccatcctagttcaatttataggctgcttgagtcccttccatagatgaaccgcctgccccaatcagatactaccagcatcctggtgcgccagctgaattgcttactgcattccataagagcaaaacgccattaaaaactctacacgacacgtccatacatgcgagggaagatgaagtgcagaaaggaagacaagcatgttcagtagggtggcattattaatacctggcatagacagaataccatagccattgggtgctgtgaccaacatgtatccaatcacccggcaattgagcggctgtttgctctccacccagtggagcaaactggccaaggtgcctgtacctgtaaatcataaagggcgaccattagggactgctgtattctggatgccatgcaaaagaaatctcgtgtatcagcaatatgtgacaagattggtaggcttttgtttggtttgctccaccaactttggtttggcaatgccaattgtttttagctaccaaccagttagatgactaatttattggtgttgtcgatttcttggcatagttgattggagtcataaacaaaaaaagttcatccgtaaatccatatcaacatggtcagcagtgtttaagtgcctaatgtatgtatgctaagagagcaagggaaaacaaacctgaaaggtttgaaccgatgacgccctgtgcctctgatcctcaacggaccttcagggttctcttcacagtatttcatcttgttgaagcagtttgccagataggctccctcttgtgaagcaacctgaagtgccaaacgaaaattcagaatacatgaaacggtttgtagatattcaaggacacatcaatttgacatataaaatgccaaacaaaaatttactccctccattcaaaagtctaagccactttttttgtcactaagatcaagaaattacctcatccaccatgtgacaaaaccacaaaaatttactccctccattcagaagtctaaggcactttttttgtcactaagatcaagaaattacctcatccaccatatgtgacaaaaccaaggaactatatacatccatacaaccaattagtaagatggttctttgtgtttgggtcaacaatttaatttggcacataaagactacaaatatacccaatctcatttggaaaacatataatggtttgtagatatttaaggacacatcaatttgacatatattgcaacagatttctttccctatgtgcaaagtgcaaactctctaatggtagacatgaataattacctgagctgttgctgggagcatcttaacttgcgagtccactcgagcaagggctttcttgaattcctctatgttcagctcttttgactccttaatagcattcccgtctgaatctttgagtaggtcatggaagtccttcatttggttagttttaaggtacaactcaacctgtgggtacctttcatagatgtcgccaagaacatttttaattttcttgacagtcaaagagccagaattgtccttgtctgctacccggaaaattgaagcaatatcttcctgaatatacatatcaacacaatccattaagaatgtcagaaattcataaacaaaagtagttgacaatacatgaaatttgtttgctaaacaattactagcatttatgttaagatggcattaacactacaacaggtagatgctagatcatgtcaatcttgcctttctcacaaaaagaatttgaagtaggaactgaaaacatcctccaaaaattttgaagttggttcagaaaggaacaccacggtgtaaatctttataactataatagtgatatgtttgagatggctaaacagcttcacacaaagttgcagtctttaaaccataataatttcagcatttgtaattttttatatttaatcatatgaacttattatcaaaacaaagacttagatataattaactggcaacttaacactgaaaagggctaattgctgtacataggccactatttgaaattcaattatgctagcttagtattctagagagcaggcgatgaaacatgttaaattataattataccataacatatcgagatgttcttgccaatgacaaaatatggtgcattctttacttgaacaaaaaatatggtatctttgcattgagaagtacacacataccataacttttctttgagttattgtcgcgcaatcaccgagagcatatacatcatcacatccatgaaccctgagccattcatcagtagctagcactcgtcggtttgcctataaattaaataagtgttttaaaaacataatttagtgtaatatgttgaaatgtattctcttatgagttctgtacgagatatacctgaccaacttgcttcatgaaatccattatgaggggacgggttccaataccagtggaccaaacagccatgccataaggcacagcaatctctccagttgcagaattagtcatagtgatagccttatcagacaccttcacaaccttaaaattcgtcttcaaatctatgcctgtcctcttgaatttatcttcagcaaattgggtaattctcttgtcaaacctgcatatatagaacattaaaacttttttttgcaaagaatatcataaaactgcatcaagaaacagaattttctgaaatttgaaggcctcctacatatgtaattatcaactaaaatgcttctgatcggtaaaactaaaagggtgaaggttcaaaattactaacataaaactaaaaatgtgaatattttgcaatggttcaacaagtacaacagatctcaaggtcttacattgtaaggatatgatctccagcttcaattactgaaatattcgcatacttcttcacatcaggatacaactttgccaagtcctcattgacaaagtcatgaagctctgcagcaaattctacacctgttgggccaccaccaataacaacaaaatgaagattcttcttcctctcttcctcagttaggtttggaagggacgctctttcgaaacatttcaggacactcttcctaattttttgagcatcttctacttcctgacagaatgcacatgacgattcaattcaccatgcaaaatatgttgcaaaattgaacaacataatggatataacatactaaagaaaaagaagttatgacgaaagatggaacaaggatattctttgtttgacaaagaacaagtatatgtaaagatgtaaaagcaagtttgctgaaggtaattcagacattgaccaagagataagctgaaagagtcgtaactgataagatgataaaataaaaccgagttttgttacaacagttaatttctttcattaacctactgccttattagtactgacctttagaaaatggcagttttcaacaacaccaggggtattgaatgtattaggtctagctccaacactgacgaccaggtaatcataatctacaacaaattcactatttccatctgagtctgatctgcagtggatctttttgttagttggatcaatcttgtagcactctgcttcccaaaatctaaatgcgccgcctctctggaaataatgtacatgtaatatttgtgagaattcttgcattacaaaatgatgcaatatatcaataatatagctaattgattattaattcagtaaggtcttacctttctcacaatattacggataggctctacaatactacgtgcttcaactgtgccacatgtcacactaggcaacaaaggtgtgaaggtaaaatagttgcgaggtgatacgacatgaacatcgtacaaggaagtgtcaatatttctcaagaaacttgcgcctgcccaaccagttccaacgataaccaccctcttcttgccagttccatcatttatttgaagtacttgattatcctggcaagcataagtcaaagaaccaacactgcaaagatatttgaataaaaggtgtgtgagaggagagactcagagtcctgaaatatatacaatataaaatattatgaaaactaatattaagagtgcatttgccatctcagtgagttttaagttgcatttactagtttttgatttgccaatgaataccaactaatgaacttatcagagccataacagaacatgtaaataaaaatttcttccagctataatgaatagcacacctctgctgctagtcttcttcactttcaaaacagaaagaaccacaagagaagtattcactaaaattgcttgagacgcttacaagattttgctacatggcccaaaaacagaaatctggcaatacaaatgttatttcacttttgtgatcaaacaatatcatgaacagtatctgctgtgcacaattccaatatgatcccgggttacaataagaaatatgaaggacaaaccatcaccatgaatctatctgggacaaacatgtctagcatcatggattaatagctatagcacattctcttaagcaaaagggtgagaatacaatctgcttaaatgcccactcctctgtcccacaaaaccccaatatatctgaagatgtaccaggacaacgtgcgtgtctaaatacatcttcaggattggactttttattggacgaatatattattatttattatttatgacgttaaataaacaagtaggacatgttttggacttttggtgacacaatacatactcgtctccctagaatcgtgaggcggtgatttcaatattacaatgtcaatgaacaagaataatacaatccgatttagacgattggccaagtaggcaccatggttccagcacacttcaaataatttgttgtttcactttcacatcacaatcacattctttttcaagtgtcaagatgacatagataatattttttagatttcaccataaccaattatgaatataaacgtgaaccagatttgttagatctatgagtaattttaccaataaatgatcgaacttctgaacaactttttcacccaaatcttaataaacaacgtagtgcggtgtttaagtgttgggctaggtgtaaagtaagcgtcgggctacggacttcaggggcaaaagaaaagttgcaggttgacagatcaccaccgacttaattcttaaaccgaaaaaaaaaatccattgaaaagaacatccccgattaaactaatctcatgttttggaggaaaggctttaactactctcatgtttatacagccgccttgatagaactagcgcaaaatcgcgacgaaaacatttacacggtgtatcaaagttcggcaatcaaaccaaagcgcggacgcgcgcacgtacggcggcccaacgcaccatatccagcgcaaggacacggttgcgcacgcgtataactagatcgatcaacgggggtgaggtgtatatcaggggcgcgcggagcatgagggggagaggcggaaacgtacccggcggtgaggacgaggagcctcttctgccaccgcggcgtgcggcgcgcggcctcgacggcgcggcgcaccaagctcaatccccccgacgccgacattgcgatccggccacggcccctactacgggtggtgtgggacggagcagggaggaggaggaggaggagacgaggcgaggcgcggaggcggcggcggagaaggagcggtttgctcgcttgcgaacacgcggcggcggacgagggcgacgtgcctcctggcctcccggagaaaagcctaattataaacaaaaccacaggagaggagagagagaattttgtctgcgtgggccgtggagcttttccactttaacccctcataggttgaccgatttgcttttaaaccccggagatttgactctggaatgttgggtagggatacgattaacaattaaatgttttacagggggagatcagcaagacagacaaatgacagtttcgtactgcgtaataactgcgtttcatttccttccttgttcagtcgcggcgaacgcgttcacaccttggacacgatcgagcggtgcaccttgtccgaggctgtccacgtggacggcgcgatgttcgcgagacgggtcttttggcttgtgagacaagaaagaaagcgagatctttttttggtcgtacctgaaggttggggttgaggagatgggaggggagtggggccagctttgctgcggcggcggcccagctgtaccagcactactgtggctgcgttcttttcagggtagtcctcctcgttttccgttagcacgcttttcaaactactaaacggtgcatttttctgtaaaaagtttctatacgaaagttacttaaaaaaatcatattagtccatttttttaaaaaagaatagcagatacttaattaatcatgtgctaatggatcgctccgttttccgtaatcactgttgagaagaagaaagaacgcagcctgtgtaacaatggcgctatagggtttttttatgttgttttggaaacgtgtgatgcttttcttttcaagcacgattacccagttttttttttttgagaattgattacccagttttttatggcaacgtttcattggagattataataatgggtaccttaaataaatcagaattgctatatttcttgtgacaaaaattcttgtgaaagaatctgtcagataatgtacccttatatttgctcttatacgctatctttctttcgacatattttcttggaaaaatccgtcagattttgctcttacatttgtgcaagtggcatgctatatttatttcgatataaattctaggaaaaacatttttgttagattttctatcaaaatgttgtatagctctctgtaaataaatttgttgaaagacgtgcgactttcggtatataaaagtgcaacttcagtactagtaatatgcccgtgctaaacgctacggtgcaattctatatgtctttaattattttttaaaatttcatgttaccaaaataatatttttatatgatttgtgcatttaaactttaattaaattcatatcgtgtataaaatatattttatataaagtgcaatattatgatattacgtgggcacaataaaactttgcaagacttaattatatataagcaattaagtatacaatataaaaggaaaatatacgcatgaaaatatgttaaagaagtatagagtcattctattatttgttattttgttaagaaatgcacctatgggagggactgagaagaaaaagaaaataattctataatttttttcttatcttttaagatcactattggtagatagtattttttttatacgtctatattgtatttagagacgtgtagttatataaattatcgtgcacctatattttttttatggaaggaactgtcgttttttatttcactatgacacacataacatttcacaacggttttgatataaaatatttattcatctcatgcgcatcttttttctttgtgagtgacataataccactggtggagaaaccgtctttg

SEQ ID NO: 16457 - DNA, 7314 bp, Oryza sativa
  unsure (1)..(7314): unsure at all n locations
cgagacgcccaacagttgccttcttgtttattaaccgccgaccgggggagtttaattcttgagggtgcaaaatctcccgggactctttggggttaccaaattagggggccatgttgaggccggatatgccttggacacaaaaggggggccacaaaaaagaaaaaatggtccccaaaatttatctcatcattcggtcaacaagggaatagggagccggccttttggggcgggaattccacagcaccttggggcggcgggttaaaagaatttaggttttttacccccaaccggcaatggcgtatcgttccccagtttgtggaaaaagaattgtctttcataagcggggtctcgcaggtatgaatcccaccctaaagagtgttattttaccaggcccccacatccatgcctatgggaacaacctcggataagagaggttgtgataaggaaagcacccgatgtctatttgaaccgaaaggcctgctcgattgtaccaaattggttccatattccacttgccaagggacccttatgggtataatccaagacccctagaggaaaggggaccgaccactcattcacaccaccccaatcaacatacacgaacaatagaagccacaacatcaaaccaacatacccaagacaagccgcgggatatcgccttaggaataagcacggctagtcccttacggtgtctctggatactgtcaggagagacgaaagtgctatctctgacctcacggggcatgacttcgagagggaagactaccctgttgtcgattacgagtcagacctacagcccgccatgtcgacaccagttagataggctcccccaaatattgaccgggtgtgattatggtgaataagagcaatacgggcttcggccaacagaatgtagggttattccttgacaattcaggggcccgaacctgtataaaaatcctcgcttctgtctcttttacctcattctcacgtatgtcctagtaccgacgatccccatattatgcaaataccggaatcgcgacttcaaacgtcgactgaaatcatatcttgatgtcgcttgaaacaacatatttgcatgaagtgacacgtttggtcgacaagcgcatgtcatattcacaatgatcatgcatatgcggcctttcatatgcgcttattttagtagtggatgaagaatcaatgtgcattgctacatctttacgtgcgttttatggtctatgattttgttgtagtggatttagtatttgccatatgtgcttcgtgtttgttcttattggaattaaaggatggacatcttttatacactccatttatatcttaaagacaaagtagcttcggatcgaatgtaagcacacagtaaaattgtagagtaccaatgatggtaattagttacgatgatgtactacgatatatcaccctgagtttcacatgtcaaatatgatgatatctgagtttatttttaacttccgaaccactgtaatgttaaaactcagtacaatacaccgccaagggtggtaatgctactaggtgcactatagtacctagggtagataccatatctagatggcaagttcaaagccaacagagcttgagcttgagcttgacccagattccgatcaaagtagagatcatcaaactgctggagttgtagctgctgcgctatggcctgaacaatgttaatatcttgatagtgagactgttgcgccaccagcctgagctgttgccaaacttggttgtttttcagctgaaacgcagctgattgcaataaggggcttgctgctatgccatactgctgccttacgaactcattatatgggctaagcacatgttgctgtagcaggagaggtgactgcagctgatattgcctataactttgacctaaaacatcaaactgcgcagaggcgctgcatgcagcaatagcaagaagagcaaagatgaaaatgatcttcattgcgacaggacactagatctttcttttttactgtataatgcttgaactgtgtgaacgatggggagggttttcattgtctatttatagatgcgatggcacttattttctttcaattcctcattggttgctttggagtgctagttttgctttcatgtcctattaggatccaagtgagtcatgtcatttggacatatgttctattaggtgcctcaacaaatcccctttgatttcatcacgaaagtaacttttgtgtccatcaaatatactccctccgtcccataaggagaaacccacttctagggatgaacctagacaatcatttgtccagattcatccctaaaccctaaaccttgtctaggttcatccctagaagttgtcattttttgggatcggaaggtgtacatgttggttagcaggctagaaaaataatgatatgacacatcgctcactttatacgttagtttggtaaggattgcaaccgttatctagctatattcgttatgttttgtgagctattatttcactaatgcatgacacgttgaacattaaggtcgtgtggcctcatgcattttatattacaaaatttcaacaagagtgacaaaaattatggtacaccaagtgctttttattgttccgttgttgtggtaccgaacatttgattttacagcaagaattaggtttgcactgaattcttaaatcaccattcgagagatttacgagaaatcaccattttgctatacctgtagtgcaggattgacgtaattcgtattcttgtaaaccaacttgttacgtgttttcttgtctaaactttttggatagacttgggctgtgttcggaatccagggttcccaacccatctccatcgtattccgcgcgcacgcttttcaaactgctaaacggtgtgtttttttgcaaaaagtttctatacaaaagttgcttaaaaaatcatattaatccattttttgaaaaaaaagctaatacttaactaatcaagctctaatggaccgccctgttttccgtgcgcactttgcatgttgggaacagctgattccaaacacagccttgattcgttttcgagatagaaaagaactaccacagatttgtagtgtgtcaagaaccggtttcctttgggtacatcatgcgtgagttcctctagttttgttgaaacatcatgtttattatccattttgtttgcagtaaactatcgacttgctatgttagaatgaacttctcatagaatagctagtcccaagaaagggactagctagtgtgctgtcgacangtttttaggtccagaactgtcaaatttttcaaccataggatttgtcatcaacgattacaggaaaacagtctgcactagtacaaaccacgagtcttagtgcccaaattgataataactttcaattcaaaagtaatatgcatatatatgtccctgaaaaaaattacaaatcctaattttataccatgtaattaccctgtaactactctagttggtgtaagtgctatgtaactaactagagtatgtaactagagtataagtgttatgtacctagggtgtaagtgatatataactacaaatgctattaataatcagaaagtgcccgtacctcagcgtaacgtgtggcaagtttgatggatagatcctagctcgttcaatgcttgtctagcccacacgagattttttttattctacccatatggccgtatatgttgcacgaatcctggagtgcatctaatggctagaaaatcgaaagttttctaaagaaaaaactgtcgccagttttttagcaaaaccgttgtttcttttttcttttagttacataaagagacaaaaaggagatccaacgtcccacattgtttcaatccccgggacttagtatattttgcactacttgacgagctctatacatccatggttcctgatcgcctattcgaacaacggtttaaaaaaattgaacttttgcgcatttgttctaatattccccgaaatatactaattcgaaactcggggcattacacaaccttagtgtgtaggagcattccataagtaagacatctcataattttcactttggaagaagtgtacatttatttaaagtcactctttcgtgactgaataaactaagaagcatcataaatccttctttctagttttcacccttattgttgctgctgcacattttgcttctatactgaattagttatgtctaggttatacttctgtgatgcaaagtgagcgaggctcaactaaagaatgccttgtacactacatcttgtcaagaatgatggacaactgtcacgcccagaaattcacgaaccagaatttctaagctgaatgtgcattaaacccatgtccagaaccagccagggtatacaaacgacaattgttgaaatacagatccacgttttacaaaaatataaaagattacaaatgcagcggaaaagatgaaagccagctaagcctgaagacttgactccacatgcatctttgacggcagcgacgaaaccaatttcttcgagacatctccaactaagaagaacttcaactctggtgtggggaagagagagcaagactaagtacttcccactgtactcaacaagtcataccggaagaggaggtatgatgcaagatataaccaaaggaggctagcggttcatttgcataatgcttgcatttaaaagcagtagttgaaagcagtaaaaacagttgtagtatttaatcaatattaaccaatcactgctcaacactacaccacattgagacaagcccaaaccaccacctgaactaactagttacattagctaactaggggtgagaataattgtcggtgatatgggcctgaggatatgagaagtatggggaagtctcaatcccgtccagccacgcggccatacagcctggccctccccccacatctcggacgacgcagaggcagccagggggcctcggggtgccacgtcacgcccctttgaccctcaggctgcctcgccccgaggccctcgcccggccgccacgtggcggggggagtgagtggggcggtggccgaatctgagccgccatcaatgaatagcaccccaaccgtcccacaccgcatttaatgcggtgagggcggacgtgcggcgctgcccgattgacccgcgtcaatcgggcgtgaccggtctgtggccgatcacatccaatcggacgggcggcggtgcccccacgttccgccctgtgctcggcggagtgggggcaggtatgccccgtcccatcaatgcatcgtctagagccccctccacgtgaggtgaaccgccaaaagtctccattcacttaaaggggaatgacaagggcgtcccccgtgtcaggcaggggacggcgctgggccccactcgaggacggacggctgcttagcttccggtgaaggcacgaatggtggtccgctccaagcggcgtgggccccctcccttgaaggagtaggtagaggcggtgcatgtggtatccccttgaactataaaaggaggaccttgcccactgaaaaggggggatgactctcacttagcctaagccccagaggaagaagagtaagagttctccctggagtttagaaacctttgtaacactcaaccctaaatcccacgcacaggagtagggtattacgctccctagcggcccgaacctgtacaatcccagctctcacacgcggtctcgaaagactctaggcagatatacgttcttgatcagtgcgccctttcccccggccgaactcacaaaagggggtccctcaatcacccgcaagagaggatcattcctcgacagctggcgcgccaggtagggggaattcgcgcgtttgaaagagaaatcgtttccttccaccacaagtttccctccatcctcaacgatcatggtcgaggtcctagaggaagaagtggtggcgcacacccctactccctccgggagtgacgatgctagcgggagccgcggcccccaccaccgtcgcaacaactctcccactcctgcccaccgcgacccccccacagagggaggaacctctccccgccgccgcgcggggagaaaccgcgcagtgtcggggcacggggccgcctgacatacggcaacggcggctcatcccgaggcgcactttaggcggcgggagcccttctacggcatccccccataaattcggagccggagacccctgtccagcgatggttggacaacatgaccaacctggtcaccactgcccagcggtagcaggctgcgggtggccgacccgccgcctctggtacctcgcgtaacccaccgctctttcctcgtcagcaagaaggagggcccgtcggtcggccctgacttcgaggtggtcgacggccccaacgtcatcgaggatctcgggaagccggggacgtcatggtggcctctacgaggagggacgctcgaatcaacattgagcaacacagggacgagcactgggcggcccgcatggggagggcgccttctcatccggagtgccccgcttcttcacgcgaggcggcccgcccctcacatttaccccttggagggaccagttgcagggcctttcaagcgagtcttcaaaagtccgttggcccccgaagtttccccccaacctcacggagaaatatgatggcagcacgatcatcatgatgcggggggcgacgactaggtcatggcgaatacttccccatggctcttaaaggtcaggtgcgcggctggcttatgactcagccccccgactccatccactcctgggaggacctgtgccagcagttcattacgaactttcaaggcacgtatccccgcccaggagaggaggcagacctgcacgctatacaacggaaggacgacgagtccctccgctcatacatacagcgcttctgccaggtccgcaacactattccctgcataccggcccacgcgggcgtttatgtgttctagaacggcgtgcgacacaactgcatgctagagaagattgcctccaaggagcccaagaccatcgccgagcacttcgagctggcggacaaggtggctcgaaaggaggaagcgtgggcctggaactctcccggcaccggcgcggcggctgcagctgcccccgagcccgttttcccccccccccaagggggaagaggaagccggcccactctgatgacgagggccacgttctttgcggccgatgggccttttgggccccgtgcaaagaaagagccacccgcaacaagccgagctttttccaaattaaacccccccccccccctttcccctctggggggggtaaaaaaaaaggggggggcggtttgcggataaggggggtcgatgcacaccacctattgggacaaaatgggaacaaccttaccgaatggagctgggcaggaaa

SEQ ID NO: 16458 - DNA, 3749 bp, Oryza sativa
agtcggtcaggaacttgcccgagcggtaccgaaaggccgatgaggagaagcggcagagtcaacgggagggcaaggcccccgcgacccccgctagcgaccggcggggggaggccaataaaaaggcccccgccgatgatgatgatgacagcgaggacctggaattccagatacctcagggaaccgtcgccactcgcgacggggggtttgcgctcacacctcccgccgcagtttcaaggccatgaggcatgagcttctggccgcgatcccaactcacgaggcaacatggaaggcgcgctggtcggaagtgaaactgaccttcgaccagagcgaccatccgacggtgctcgcttggggagggaagttggccctcgtgatctcccgaaccatccacaacatcaagatgaagtgtcctctagtcaacgggggggccggcctcagcatcatctccccggctgcctttgatgcccttaagtccccggggatgaagcttcagccgtacctgccgatcatcggcgtgaccccgggacacacgtagcttctgggtcacgttgagctcccggtaacctttcgtgactctaccaacctccgcaccgagcgggtcgacttcgatgtggcggatcttaatatgccctacagtgcggttttgggaggcccgcgttggtgaagttcatggccgccacccactacgcctacctccagataaagatgccaggccacagtggccccatcaccgtctttggcgatgtcaaagtcaccctggcttgtgcagagcagcgcgccgataacttggcggcagccaccaagccgcaggccccggagccctccacaccccgcgcctccaagaggcgcctcgcctcggccgacgagttgcccgtcaaggagattccccttggcgatgatccatccaagaccgccaagattggcagtaccttggacgccaaataggaaagtgtgctcgtctccttcttgcgggcgaactccgacgtcttcgcgtgaaagccatcggatatgcccggggtccccagggaggtgatcgagcaccgcctcgcagtgcggccagatgcgtgacccgtccagcagaaagtacggcaccaagccccggagcggcaagccttcatccgagaggaggtgatgcggctcctggaatccgagaagtcatccacccagagtggctggcaaacccggtggtcgtctcaaaggccaacggcaagctccggatgtgcatcgactacacggacctcaacaaggcatgccctaaggatcccttccctttaccacgcatagatcagatagtcgactccactgcggggtgcgaccttttgtgttgtttagatgcctactccgggtatcactagatccgcatgactaggaaagataaggaaaaaactgctttcattattcctgtaggcaccttttgttatacaactatgctttttggtctcaagaacacaggccctacattttagcgcatgactcgtattactttgagtgatcaaataggcgtaatgtagaggtgtatgtcgatgacttggtggtaaagacgcgccaccaggacacgttgttgcaagacctagctgagactttcgacagcctcaggtccacgtgcatgaaactgaaccccgagaagtgtgtgtttggtgtgccggcgggcaaactcctcggtttttttagtttcctcatgaggcatagaagctaatcccgagaaaatacgcgcgatagagaggatgcgccccccaacaaacttagggatgtgcagtgcgtcacgggatgcatggccgccctgagtcgattaatatcgaggctgggaaagagggcgttgcccctattcaagctcctcaaacgctctgggccgtttgtatggtcggaggaagcggagcaagctctcagccagctgaaagcttacctcacctcccccctatcctagtggccccgggaccagaggaaccgttgctgctctacttggctgtgaccccccattcggtgagtgccgcccttgtagtagagcgtgacgaaggtgacctgcgtcgcgagcccggctatgggaagggaccaggggtccccttaactagtgatggcccctcgtcccccaacagcccgatgcccgaagcccccaacccccgggaaggccctgaggtccccgtgggagagagagaggccccggcggacggccccgaggcctgtcgcactgacgtggctcgagaccccctcggggcccccgagcacgggcgccccgagctaggttgccctaacgacaaaggtcgaccccaccgaaaggtgcagcgccccgtctatttcatcagctaggcactccgagatgcgaaaacctgataccctcaggcccagaagatgctttacgcagtcttgatggcctcaaggaaattgcgccattacttccaagcgcatcgggtttccgttgtaacgtcttaccctctcggccagatcctgcacaaccgagagggcactggtcggatcgtgaattgggccatcgagctcgctgagttcgatctgcactttgaaccacagcacacgatcaaaagccaggttttggctgacttcaacgctgagtggaccccggcggacgactctattccgtcccatattccctccctccccggagatggagaagacccgaacgccgatattcgcaccggacattgggttatgcactttgacggctctctcaaccttcaaggtgcagggaccggagtcacgctgacttcgccaagcggggatgtcctcaagtacgtcgttcgacttgatttccgagccacgaacaatatggcagaatacaaaggactcatagcgggactgagagcggcagccggaatgggcatccgctgcctcctagttctaagcgattcccaactggtcatgaaccaggtcttttggcccaacccgctcttttggcccttcgcggtctggggtctagacatcctagggcccttcaaagcggccgaggcgggtaccagcacctatacgtcgccatcgacaagtttaccaagtggcccgaggcttacccggtcgtcaagatcaactggcattatgccctcaagttcatcaggggcatcacatcccgattcggagtacccaaccgtatcatcacagacaacggcacccagttcaccagtgagctattcagcgactactacgacgacatgggcatcaagctgtgcttcgcctcgctcgcccaccccaagagcaacggccaagttgagcgggccaatgccgaaatcctcaaaggcctcaagaccaagacgtacaacatcctaaagaagcacgggtattcttggctcgaggagcaacccgcggtgctgtgcgcgaatcggaccaccccgagccacgccacgggggaaacgcctttttccctggtgtacggccctgaggcggtcctatgctcggagctttccctacgtttgcctcacgtcgcgctgtacgatgaggccaaccaagatgatcttcacagcgatgacctcgattatttggaagaacggagaaggcgcgccgccctatgtgcggcgcgctaccagcaaagcttgcggggctaccatcagcgccacgtccgagcccgatcactacaagtcagcgacctcgtcctacgccgcatacagtcgtgtttagggctgagcaagctctcaccaatgtaggaagggccatacaaagtgatcgggggtccccggccgggctcggttcgactaaccatggaggacggcacggagttgcctaaccccaggaatatcgagcatcctcac

SEQ ID NO: 16459 - DNA, 2783 bp, Oryza sativa
atcgagcatctccaccgtttctaccaataatgtcgcgcgttttttgctttcttggggctcgggcaaacccccgcacactcctcagcctgtgcgggcttggccgagggctaccactgttaaatatgttgtatccaatccctccctcagcaataaatttttctgcttaatcaaaagctgttgcgcgccctttcttactccttcctatggctcgtcctggcttaaggacgattcgcgcttgctccggaccctaagtggcgttggataacctgaaaataaccgaaggggagcctgaacgcgggccgtgccccgggctgcagcgaaccctaggggctcggaagggcctacacatggccatccccgacccccgatcaccgtggcctcggtctggttagtcccgctgggcggctcccctggagcgacggccttgcccctcgccacctaagtgtcgcggaccaagtgcaaattccccctttttaccggaacgagcccgaggggcgggacaaagggagtaaaaatggcaacttgatcgtaaagaagtcaactaaatgcgttcgctttgtttttttccttgccgcaggcatttagaagagaaagcaaggatgtaaaagtgcaaaggagaagctttatttacaaccaggatggcacaatggcctagagtttcaagcgttcaccacgagcacataacaaaataaaggaggagaggcgggggcaatcacggagtgcctgggcctccaagtacagcgccgctgaccaccttgtcccaatcctcgttgccatcatcgccgccgccgtcatcactcccgctctcctcatctgagggaagcgcgagggtgaaccaaggggccgtcccctcaaagcttgagatgatcacgtcggccgcgtcccgaacttgctcctgagccctcgtctcaatccctgggggaaatcctcgagcacgtgccacggaaggatgttggggtcgcgagcttgatgactcgcgaggacaagctccaccgcagcccgtgccaaggaagccgatgacgacttcacggcttcgccgacctcctccttcagcctctcgagatccgccgccatctcgtccagccgaagcgcgagcgccggtcttgtgggcaggagcttcttgtcccggcgcacggagatgcccacccggcgtcccacgcactccagccgttcgatggcatcgtagagttggccaggcccgatgtcgttggtgaggtggagggccgcgatctccccagcctggttctgtaccagacaccccaggttggcgagagtatcttgggccgcggtgagctggctgaccaactcggcgtcgccgggctgcccgcgcgctgccagttccttctccctggcctccagctcaagcgccctcgccaccatcgccgtgcgctcaacacgggcgctttccacatggcgggtctcatgcccagcaacggcctcctcacatttggtgagctgctcgcctagccggcgcgccgccacctcgcggcggttcacctcggcctcacgctcggcgagcgcggcatctcgttcccgccacgcctcctctcggagccacagctcctctgtgcgacgggccactaaagcctcagtggcaatggtggtctggttgcgctcggtcgcggcctcctcgcggaggcgaagggaggattccgcctcggccgctgtcgcctcgtggacggccaaggtagtctcgtgctggtccaacgcgcgcgcccgctcctcaagcgctagggcccgctccttcagctcctgggcccgctgcgcctgtgcccgaccgcaccccttctgttcgcgttggttgcgatcgaggacctcgatccgccggcgaatcgtggcctcgaactcctgcgcgaagcgggtgcgctcgtccaaggccttgcgctcggcctcaagcgccaccgaccgggcccgcagcgaggcgttgaccttcgatgcccgccgaacttgggccgcggccgcgtcgaggaccccgcagggcgttctcaaccctctttggcaggaccttggcgtaagcctcatactgcaggcggatgttgcccagcacctccgctaaagcgcttgatgtgatgagcgccgcctggcgcttctcctccgtcttacgcatgaccgaatcaagcgtctcctcgcgcgcctggatcttctccagctgggcttggtgcattttgcgccccgtctcccttgggggaccccacccttttggcggcgggggcgggttaaattttttgacccacgggtgaggtggggtccgggccccacatttttggggggaggggactggggaagccttttaccaggggtgacccgcggggcctccggggatgtaaattcaaccctaaaatgtcgaccatggcaaaccccaaagagctcaatccaacaattggcttgcaattaaaaactataccctatccttatcctctctcctttccaatctcctcttcccgtgacccatacacacaaatgcttgtggtaagttttctccataccttggcaaacatattggttttgaagcacttggcgaagtggatataatggtatctcataacccttgataatcataaaaccaacattttccacttccaaaactggttaccagccttctataaataatccaattgtttgtccccttttgctcatttcccgcaaattggggatttcggggggaaaaaacccccccgctcatacaccccaatgtggtgggaaaaaagttttttataaacagcgcttttcagtgtggaacaggttggatagccccacccttcctgggtcttcaagtctttggt

SEQ ID NO: 16460 - DNA, 9594 bp, Oryza sativa
ttgttgtgaacgatttggggatgaactattgtgtgaatgatttgggatgaactatattgctatgagtgatgaatgtttgatctgagatgatttgggcaaatagcaaaagaacagttaaaaagaaaaagagaaaagaaaaaaaatgaaaaaaaaaccctatagtcgggaccacatttttagaacaccaaccgggactaaagtcccggattcgccgtcccggttgcataaccgggacaaatagatggttgccaaccggcggcaaaatcggttgtgcagcagtgaaaggcttcaacccaagcgatacaacttcagcttcacaggacaactccatcttgacccaacagaactcagtcttgctgatgacagtgcagtgctgtagacgtcagttcttccgcacattgttccagtttgatttgatcctcctggctttgtaaacctgaccaatataagagggaaacaaacagatgaaacacaccatatcaggagacttgatcttctttatccttcaaaacatattacgggccggcttcctagagggcccaacacatggcggccaatcccgcaatgtgattttttttttccatttggtatataaactatgccctgatcaaaaaattgctcgaaagagtgggacggacatttgagctccaaacaccataagccattaaccataaggctccaaatatatttggccaactcacagtaaaaaaaaaaaacaggtcgttgacagtctccttttccttgcaaaaggcacaagtttcattaccattccagtttcgtcttacgagattatcttttattaatattgcattgtgtacggctaactaaatttttttttatctttaatggtagtttagctttcaatgcaatttatatgatgtggccatatacagctgtgttgtcacatcctgattttttttcaggatttataaattatttaataaattattattagaatttatattaaatgttctttaatttacaagtgaagttaaatgtgggaaataaaatttcctaaatataaagcatggatggatttaatttttattaaattctccatgattaattacactctctgaaattttctcggatttttcagagctcaattcctaaatgatacaaagaacagttcagtaattatttgatcattaatgatctaattataattgttaggagcttttcttgtttaaaaatccttaaattataaattgttgtttaaaaggaattattagaaatgatcttaaaagcctaaaagagaagatctaattttaattaataaattccaatataaaatagggccagataaaatttcattaaatactttacttgattctaaagttcctagatttttctgggatttatttgagccaaggaagtatttttaatcaatggaatatcatttcatgaataatttaaattgaaaaaggtttttaaaagtctcttttggctttgggccgaaagccggcctaaaacctctctctttctctctccctccccggcccagtcggcccaaaaccgctctctctctcctccccggcccaagccggcccgcatccgagccgctgctctcctctctctctcccgctgacaggtgggccccacctgtcaggcctgtcttcctcctcgcgccggccgccgctcgaaccctagcgccgcgccgccgtcgtctccttccaaatccgaccgtctttttcccaatccggtgaaatcaatagaggggaaatgatcttctcaatctcctctaccttttctcttttggaatcgtcggctaatttcgtttggaaatccgtggattcgagtttgattcggatcgacttctctcctccgaaccctagctttccttctcgccgccggtcgccgtgggcctccgtcgccgctcgctagcccctttataagcacccccgagctctcctctatccgccgccacctttgccttagcccgccgtcgcgtctagcgccgcctccgcgcagccctagccgtcgccgtcgttgccgtcggttcagccgcgccgcgtcgccgttgcagccgccgtcgtcggtcgtcgtcgccaccatcgggatcgtgaggtcgtcgtcgtccccgtccaccgcttcgccgccgccgaagaccgccggagcaccgccatcaccgtcgacccgaagaccgtcgccgcttcttcctcgtcgccggcgccgtctgttgctcttccgccgttgttttggtcaccggtgagttcgccgcgtcgccctctacccgttggtgtcctccgtttgcgtcgtcgcgccgtcgttcgccggtgagcatgcgccgcccgagccgtcgccggtgatgacgtcatcgctgacgtcatcgttgccgttcgccatagaccggtcgtagaccgtttagatctcggccgttcgttgtggatagggtagatctcggccgttcgtttccatgagccgccgccgtgcacccggtccaccgtgaacccgagcccgctgacgcaataatcctcttttccttttcaaaaataattcattattgcgtcataattcaattaaaatctatataagtgttttaatccgatttaatctttgaaaattcataactaattctttgtaactcagtttaatgtggttcaagttgcaaaagttgtgtaaaataaagatctacgtattaaaattatccataaatagaattaaatttatttaattctttttaaatgggctttaattagatttaatcttgtaaaattcataataaattcatatgaagtcagaatgaggccgttcaagtctcataattcatctaaaattatgatctacatgtttgagtactttatatgtactgtttatttggtttttattagtctttttcttcgttttgcgtgttagcttgtcgtttccgtcgttgcgaaggttcgcgagtgcgccggaagtattcaagaagactaattgaagaccgattattgcaaggcaagtcacacagatcctaaacacaatcctttgagcatgttgatcctatatttaaattctctatttatttcaactatgcatttattttcgaatgtcactgggtggtgtgaatctattcctttgttatggcctgtttgcattgattactttattccttgataccttgggttattataacttgactatttgagctttatatattggttcagctagatattagatatgattgcttagccatgcttagaaacattagcacactattgggataacttatgactcattattatttaatgatggcttaatgatagttcacgatggtcaatcgtgattggttaattaattacttgccaactaaaacttgataatggtgggttgtgagcacatggttttgagagtcgtgctcatgacaattaaggaccggttcgcgagctactgttgtgaaacattaaccgtgccaaccacaagccagcgtgggcaacggctttaccttttgtataacatgattcattgcggagcaccagactgagaagtggcggagataagcccacgggggtcgctggggagtccatgccttgttttataaggggatgattatgatccaggaatggtgcactgtggtgagttgtgttgtacaaagggtattgtcacagcctctattcgggtactttccagtatcgcgacgcatggtagacatgatgttgaggctgtgtcttgtgggtacagtggtacacctctggccagagtaaaactattcgaatagccgtgcccgcggttatgggcgagttgagcaatgtttttcgtgattagtctcacacctctcacaataattatggatgctataactggtaataatttgtttagctcctggtttggagttagatctgtacggccgggtatggttgttcagaatggttgggcctgtgcagcatgggtgtgttgttcagtgttgattaaaatttctgattaattactccactgttttacttctcttaaatgttttgctaaatgctgcttttgcaaatgagcctatattatgccatcctttggtatctttgtgcacttgcatatttgctgtgtggcttgttgagtatgtcatatgctcattcttgcaataatcaatcaacctcagttgaagaaaaaggatccagaaggataagacgtttggcttataccccagttgagctgcctgtgggagtggagctgaagccatcgctagaccgttattccgctgctggtttcttttcttttgtaagtgtgtaacgttattattatgatggatttatatattaaattgtcagtttgtgtacctcggctgattcctggacgaggattttatgcacaaataagttcggaaattactagtgaatttccgggcgtgacatgtgtgaagatggttgtacgttgactttacagaaaactaaactggccactggggctcctgtcacgcccagaaatttgacttccgtcaaccagaagtcacacttgctgaacttggcgtatagctggtgctccttcaacttttcaagtaccagacggagatgttgctcatgttcttcctcggattttgagtagataagtatgtcgtcgatgaacaccacaacaaacttgtccagaaattccatgaacactttgttcatcagattcatgaagaatgcgggtgcgttggtaagtccgaaggacataaccgtgcactcatatagcccgtaccgagtggtgaaggccgtcttcggaatatcctcttcccggattctcaactggtggtagcctgatcgcaggtctatcttagaaaacactttagctccattcagttgatcaaataaatcgtcgattcgcggtaaaggatatttattcttgattgtgacctcgttaagtgcgcgataatcgacgcacatcctcttcgtcttatcctttttctccacaaaaatgaccggagcgccccaaggtgaagtgcttggtcgtatgtaccctttctgcagctgctcatcaacttgcttcttgacctctgctaattcgttggccgccattctgtacggtctcttatagattggagcagttcccggtgccaagtcaatccggaattcaatctctctcttgggtggcatggtagtgaggtcttcggggaacacttctggatactcgcagactatgggtatatcttccaattttctcaagttcttctctacggtgtccactgggatttccgtctcaatctaattcaacgagacccctttctttggcgagactagagatttgtacaccacggtttctcccttctcgttggtcaaggtgactgtgcgactcgcacaatcgatgactcccttaaacttggtcagccaatccatcccaagaatgacatttaggtctttggattcgagaagaatgaggttggctagaaatggtgacctttgaatttctattgttatagaagggctgaattgaaccgaagtggagctattccctggggtatgaacccgcatcggtgtgctaagttcctctcttattaacccatgcatcccgacaaatttctttgagatgaaagaatgcgttgcactagaatcaaaaagtactgttgcagggattgagttaacagggaacgtacccagtacgacctccggtgctgcttgtgcctcctctgcagatgcgtggttgacacgagcctggataaaccttggcccggcacgcctgggcttcgggcatttgtcagcgaagtggccaagctcgtcacagttgaagcaggaccctggttttgctcccgtctccttcttggcttgcgcgggctggcctgactgtgccggtgccactgatgggcgtggagctgcaccgcggttgggctgacctccatggtggttctgactgccactggtgccctggtggaagttgctagggttgaacgggcggtgctggcggacgatcatggtggtaggtccaccctgctgtccgggagtgaagcgcggcctctggtgacttccctgatgtgccctgaactgagcggccttcctcttcctgtccatcttgttgcgttggtcctcctgacggattgccttgtcaaccagcctctcaaagtcggcgtagtccccagatatcagttggttggtcagctcgtcatccagacccgccatgaacttctcctgcttctcggcgtcggtgcggacatcctctggtgcatatcgcgcgaggcgattgaactcatggaggtactctgtcacagtccaagctgacgcgggaccctgaagctggtgtgtggcaaaagcgaccttctcctgatcattacactgcaggagattcagcttcttctctattgcatggagccagtcgttcgcctccatagggttggtggtgctggagaaggtgggtggcctgacgcgtagaaactctggcaacttggactgagggggagggggaccaaactgttgatgctgctgttcggcgtgctgcatcatcctctggtgcatctgctggtgctgctgctgcatctgctgcatcatggctgccatcatctgagtctgatgtgccataacttgggcaagcgtcggattctcgggaagtggtggcggaccattgccagaatcactgttggggtgcacaccatcagcgcgttcttcgccgttgctgccctcgcctgttgcgcggctaccagtcctggtgtagaccatctggagggaaaagcagacggggaaaaagaagaaaaacagatgctcaagaactaagctttattacaaaggaattaaaactgcaattgttctgatctgaattaaaacacttaaaaagcaagcaaaaatccttattaagacagccatatcataggcacatgatatcgaccgtcaactgaccccaaacaagcaacctaaacacgcaaactaacaaccagaagctagaccatcgataaactaattggaaaacgagactaatgctcggaacggctcctgcggtcggtggagtcgaaggcgtcctcctgctcgtcacccggtccctctgagcgactcctggagcctgacagatcagtctcgccgctgccactgggagtagcagacaaccaacctccggtgccactggctggacccctggcggctgatgctggagcgaaggagagagtgaacgcgggagctggaactggagctgcaggaactgcgggcggaactggaggtgctgcgggagctgttctataggctcgtaccgttgcatcctttaccaataaggaggcaagcactcaagtctcagtaaatcaagaaaaatgtgtagaatccattaaaaatggttttgttctctgtttcagtagtcttatagcctgtttgcaatgtttgctttgtatgccgctagattccgatccctccgacgctccggtgtacttcgagatagtcgccgaggttcccccagcagcagagcaaggcaagtcatgcttgtcacttgaacatgttgatcctatattgcaaatgctcaattgtttcctttcaaatattgcattgttttataatattactatgggatggttacctattgttacagccatgctttttggataccatgctcctttgttagcttgggttataacatgattagagtttggactaggaattgcttagccttgcttagttcaactagatcacaatggggaaaatcatattaatgtttagactgttagttctaatggtaatgttggtttaataccaccgctctggtgttggttaaataaaatgaaccacatggtgggctgtgggtgcatggttttgctggtcgcacccatggcagttaaggaccggttcgcgggatgccctggaagaatttatcgtacttaccacaagccagcgtgggcaacggctgggcttgtagtgtagctttcctctagtcgacgcatccaggcaagggtgggcgtgatggagcggggcgggccctgcgacggcctctgtcgcttccggattcacctaggcacgagaggggactgcccgttgcccgctggggacgggggtgaaacctgaggtgtggtgtgcttggctagagggggttatgcgaagggtcctgtcacggcctctttccggtatgtcgtggtggcatgccggcgcacggaaacgtgtcgtggggctgtgtcttgtgggtacagttgtacacctctgatcagagtaaaactattcgaatagccgcgcccgcggttatgggcggtcaaccagattcaccgtgattagaatcacattagtttagtctaatgaatttggatggtataggtggttggttgggcctgttgcaacgtggtgtagcgttggacagtggatgattaatactgcttaatttttacaactgtttaaatctttcaatctctgtttataaatgctcgctttatgcaaatgaaccactttagctcttctttgatgattccctgcatcatacctctattccggtatgacttgctgagtacagtgggtagtactcagtcttgctctatttttcccaaccccagagttcgagttcgggtcagatgaaggtttctctgaggagtaggcttcgtccgtgccgtcgaggatgcctgtggagtggtgttcccgctgcagtttagtcaaggattagctccagtttcttctgttttccgctgcatttatgtaagactttacgatgtttgtaagacgtggatctgtatgtcaacattgtcgtttgtgtaccccggctggtcctggacggggattttaatgcacattctgcttggaattctattcgggaatttctgggcgtgacagctcccaactccattttgcttcccaactacagcaagaagccccaaggcttgtcatcaactaactcacaacagtgcatagtgatccttgagtactactctaccattgcattgtatcctcattatcaatcatattctcctaaattaagtacactaccttggtaagttgtaatataatctcagtagtttggtcacacagaccatcctaattcctaaaccaaggaatattattatgatccgaccttagatccttatattgtgttttcacacccatattgtgctacattttgctaggaatgagctcaccatttattggatgtggatttgctgccaatatattggcaaaagcaagcttcggtaaaccaacatctactccaaatgtaacagtgcggtgcaacaaaattcacctgagctttgttttccaaccatgcacggcctgcagcctgagttttgttttcaactcatacagcacaaataaggtatatataaatttccccagatatcacagcaaattacctgtaggcttaagatgtttggagatcccagtggaaaggaagcaacgcataaaaccaaggtgactcatgctatgaagtttctccagttcttcgagaacacgtgccctcatgttaagagtgaataccatcttggctgctccccttgtggtggggagtggtatacctttttcttccaaattcgatgcaaatagttgtgaaaaaatctgaaaaaaaaattgacaatgtagagtataatgatacctactagtccaccaaaattcatgttcaaattcgatctacacatcgagaaacaaaaaagacaaatttagatataaacagtactctactattcatacgctgaatttgtcttttttatatctcgacgtgtgagttgagtttggacttaagattttgtgaagttgtatatatgtgttgtatgaatgt

SEQ ID NO: 16461 - DNA, 4444 bp, Oryza sativa
  unsure (1)..(4444): unsure at all n locations
tttgtaaaggctaggttttntgtagttattagagactgtacatcatcagtatatgtggtatctgcattgagaaatctcagaatggactcgtgcctgctgatgttttgatttgatactaacatgcattactccactaacgaatcgagtattatcttttgggtgttattttgacctttcttgagtacgctgtaggaaaacggattgcttcatgtcccgaaagaggaagcacagaaagctcaggctgccatgttttcagatccaaacatggccatggacatgatgaaaaacaacctctctatgatagttcctcaggttcagtagcttacatttcaattttcttccatcttagctaccatggctctgtttactaaacatgttgcttcaatatttttcagacacttacatttgcatgggtgaacttcttctttttgggttttgttgcaggtatgcactttatagtgtatgctactgtggtacctgttcttctgatatgccgattccatgtttatatatttatttaatgctgcttcaaaatcatcagtgttaagtattaactagtataaaaatacatcaccattcaagccttggcaaactgatatgatgtgtactacgttgttctcatgtgagatctgtctttttttatttgaggcacaagtgcattgaaatggttgtcatgtaatgcactggtggatcccctgcctggtggccccaggcagccgcccgggttcgtcatgattgcgcagtgaaattttagtgttaacttagagatttaaaataatattttcatagcagacacttagttgagatgtacttgcccaggctctagaattgctattgggcattgaagcttcagtcatgctacttatgttaagaaaagtatatccaggactgcctggaaaaaagtagatatcatatttccacgtcgatgtttaacctgtttactcatcaaggattaattctccatggaaattatgaagtatattttttttcagttaatcagattgccttgcatgaaataaccttatgacagtatgatcattttagcctggatatatactgaagttatcccatctcctatagctgcatttggaaaattttagtttaaaatattgaggtacatcatccttataaccatgatcttccctgagacgagaagtttgacaacaactaaaattctacaagagtgaaatgtgttatccatgattttgaattttcagatatgattgaatggttgatgggtttggtatactggttactgataatatagccatacgtgtcatccacttattttggttttgtaatcatatgtacaattcaatggcatgtacttgtgtccctggactcacatatttcctgctctcttttcagctaagattcccttttcattgactccgcgattcaggggaatgctgcaaaacgggatagacctgagtactgttgatgtgagctatgttagcagccgttcatggtgcgtatattttatttttaatttttttggcaaaatgccaggtaaggaatgatctaggttatatatgaatcacaacttctgaagtgctctaatggtttcttgttattatcaggtactttctcaatttgtttggtttgaggggtctcttcagtctgatcctcggtgaagaaaatggttagataacaaagtcactcctatgtggaactttgtcatatttatggattctcttgattgtgctttgttgtcttggagttttatgatttttttttcatgacctgcagctaatgatgatgcacaaaagatgatgcagatgggtgggggatttggcggtaatcccacaatggtatggtgctccccatcttttaatggattcctgatgcttatcttgaactgatgcatataaacatgcattacatagcacaggttcctgaatacaaaagaaaaaaaaactccagttagcatttttattttcatagaccctgcatgttggaccttcacataaattagattaaattactttaagcataggatgtatagcttgaatgagtctgtatgaaaaaaatactttgggcattttgaattattgtaatgatgtatccacttgattggagcgttggccatttttagtgcttaaatgctacttgagggtttcagttgttccattattttgttgcgcaatgcaaattgtaccttcttgctccaaaaccagacataataaatactgcaggggagtggtgcagctcatatcttgtcatattatccctttgatagatatattcagcaatatgcatagctattttaattcctcattgaatagttaggtattttgttgtccaaaaattcatctgaaatctgcttgatgttttacagtcctttggttgtccttttccactattgatttcactaactttctgtatgcatgcatgttataatggttctttgaacgaactagattaacacagaatcatgtcacatttttgaactggctgtttccagggtttggccgcagagaaagacaacctggatataatccagcatgactgggctttaccaaagatggagcatcatgctgaggaagtgctgaggaagcttctgaagaaatgataggaaactaggctgctccaatgcattactacatcttgcaaaatttttgttttaacctgtttattgaccagacagttaaaactttgtatctgtataacttatggccaagaatttccttcagaaagtttatgtatcatttttctgttatacggaccacagccaggctcaatgcagaatgaacaaaaatcttttttcttggcaaagaggtactgactcagtaaatttgattgcaggcttagcattagtaattcctatgagctctcgttagttgcacaatacaatattatgttgtggcgatgtagttttacactggagaatgcccatgcttcccgagcttataaatggtgcaaattttataacaactcttcatatgaatttttcaagtactgttttaaatccacttttcaactttatttaattcattcatttgtagtctcgaataattatcagaaatctaaatcattacgctattcatcataaaataaaagctattcagcacaaatgaacgtggtataatgcccataggatagaaatgcacaatctgaacaaacaagtttatcatttaatggcaaaattagtcagataacaccgaaagttttcgttttggttttatagcaccaaaatgttcttgttcactttaatgaaccggaagtaactttcaatgttattaaagtgaatcggaacctttcggtgctataagaccaaaacgaaaactttcaatgctctgtaacccatttaacctaatttaattcgtcaatatatcagagatgttctgaacaaacaagttcataatttgtcagtatatcagagatgttcgtgctttctttataactttatacagtgacacaatggttttccgtttatacatacatacatacataattacatcactaagtagactataaacaatcccaattcaagccacacacacaacacaaattcttcattcttcacacgcaccgtgtgatcgggccacgaagctcacatgacggggtagctcggcagcagcgcgatgccgcacagcccggacgccaagccggcgacgtcgcgctgcatgaggatgtagccggggttgccccactccgccccccacgagttcttcacgatccagtacttctcgccgcctttcgccgcgccgccgccgtccgtcttcggctcggactcgccgtagcccaccacggtgacgccgtggttgacgtcggcggtgcacggccccgtgtagaccccgctgccgtagagctggaacatgaagctgccgccgtcgacggcgacggacaccggctgcgccgcggcggccctcgccaggtcgggctcgctgctgggcgtcacgttccggtagcccgcgatggcgaccgcgctctggttcagcttcgccgcttggcacgcgccgttcgcggcgtggtacgggtagctcgcctccgtggtcaggccgtggttgccgacgacgaactcgaacgcccagctcatgtacccgccgccgcaccccaccgccttgtcgtcgcagtccacgagctcctgctccgacagcgacaccagctcgccgttcttgatctggttgatcccctctatcgccgccaccgcggagaacgcccagcaagaacctgcatccacgcagattttccatcggttaatctccaacattttttacagggttgaatctttctttaccattgctattgctcacacaccacaatctccttggttcttcacttccaccactgcccctttcttcctccaatctacgctcttcggcagaatatcatcactgctctctccaggcattgctatgtcagcctgttaaaacacaaatttgttgttcataattcactcttattatgaaaaacaaagtataatttgagtgagtgaatatca

SEQ ID NO: 16462 - DNA, 1150 bp, Oryza sativa
  unsure (1)..(1150): unsure at all n locations
tttcaatttcaaccattgcnccttcttcctccaaatttacgctcttcggcaagaatataatcaatgcctctctcaagcaatttgntatgtcagccggttaaaacacaaaatttgttgtcaataattcactcttattatgaaancaaagntatattttgagtgagtgaatatcatacgagcaaggtatttgaaatctgagaaatcgtgacatgaggtctaaaccccagcatcttggctctgaactcctcgttcgtcaggtcgccgaacttgttgtcagccagcttgtagccattgctcatgaagttgaacgtctcaacgagctcgacgttcctcctgtacacctcgaacctcctctgcttctcaccggcgtcggtgtaggcgcggccatgcctgatcatccactgctcgaacctgtccagcatgagatcggcgcgggcgagagccgcgccgatggagaagatgagcagaggaagaaggaggagcaaggatggtttagccattgttggagcttggattggagagggagggtcagcaatggtgaacactgagtggtatgaggcgcagcaatgattgcaagaacatatggtttatataatttgtaggagggagtatcagtgataaatcctatggcctgttcatcatgcagagagtgtgcttggagatgatctgttgtgcaagcatataacattgcatatgcatgtgaattgtgctggaaagagcaatggttgcacaagttttccaaagtctcagcaaattggttaacctccagcacaccgatttatcattttactagaggactgaattctgtatagaaactagcacacattgtattcaagtaaaagttttgtaccaataccccacatctgacttgatataggtaagagttcatataataagttccatcataagccgaaaatggagaagtcgggtaattctgaatgtttagaatttacaagagaatatatttttcgatcagacaacagtttggtgtttctgaagttgctaagacactaaaagatatacaaatcatccattggaatggaagtaccatccttcggtccagttttgcatttcagaaagtatagctgctacatctaaaaggcaatgtgcagtgcacaacaagagcagcaactgctcgtcagtggccaag

SEQ ID NO: 16463 - DNA, 9382 bp, Oryza sativa
  unsure (1)..(9382): unsure at all n locations
aggatgaattgganattcccaactangatacccccctcgagcgagcttttgcacctgcggccccatcgnggacttggaccggccagcgcgggaggcggtgagggacaccgtcgcctatgtgctccgcccgctggtggacaacttcaaccgtctattgtcgctcaagaccgcctttgatattaaggattacaatatcggcatgcccaccggtaagtacctagagtacgtactataagggggtgaaaacaatcagaagcatttcttgggaaacgtcgacgctcgatcgacgggtaattgactatatttatcgttaaaattactcagtgtcagacattaatctgtgactacatactatacttattgatgaacacatgtacaatttgcgtggttaatttgattactgaaagtctgaaattaggtgcactcatcgcgtgtgttggatgctatcaactcctgaaaatgaatcccttcgtgttcgtcgatgctgtgctggggtacgcgttctacaagctcagcgtcttgtcgtcgcaggtccggaagcaggaattccccaacgagtacatcacccggatcaaaccagtcagttcgtcatctcatatatatatagagaatttaccttgcgtatatacatgcatggacctgaataataataattgaagtgatccacgagagtaatgatttttttttgcagttattgccttaatttttatcgccaaggatttccataagaacttcgtgcccttggattacatcaagtaagaaccctttgcttgctaattccttgaatgatattatgctcacttcatccaaatttacgagtagctagcgctcatatatatattccaagctaggctcaaactttgcacgttttaaaactaaactgttcagattcagataacctacaggcatatgaggattctaccaatatacagttgtataatatagtttgagtctgtttaaatgtacaggcgtacagctataaaaagcgattttctttttaaaaactagagataatttactagtataagatagatttacattcaaaaggacaaggattttctacacctaggtgccacggcacctatcatttacatgcgactcaaatagttatagaaaaaattgaaaaaaattagtaacatcatttgtgatgatacaagtctatatacaaacatgcatgactaaatttaatctacaactagagaaacaaaaataataaaatcagacagtcaatagtacccgtatagtgtagataaaatttgttatttttatttcttcatatatcgatcgaatttagacttgcatgtttgcatagtgtcttatattatcatggactatcttattaaattttattctgacattcaaaattcaattaaacgaccatgtaaaactaaaatatgccttacaaaatgtagggagtgagtatatgttactaacaagttacttctgccgtggtaattgtgttacacagggtgccagtttttttcttctacctcctaacattactcgtcgaagtgcatggcctaaagaaagacgcaagatatcttttgtctagattgtttgagctgcttcaaatcaaggagggcagacgcgagctactagtcgacatcctcttaaccagatgaataattcttgttgcatgattcaatcaagaaacggttaatcgatttgtctggcttaaagcagatctcgtagtcatatatataattattcttgattaacttgttagaggtatgtgtttgagtgccatccgaagggtttctttatgcataataagttcaccaagcttaattttattgaaagctaattagtagcgttttttagtcaattatgtttaaagtactataacagttttcttctcgaatactcgtatatactcattgatgtagcgaaaattgttaaagtataaaaagctgtaatacttaaaaattaacatacaaaaaaaatctacaaatatgatttctatgcaatgaatctagaattttaaaatgatactaatgttgaaagtttttaaaggttcattcttttctaaaactatatatttgtagagaaaataatttctatgctactcacactactacagcaaatatttttctggacgccggaccgttaatttacaggcgggcccgaagtgaaaccgcacagaaaaataggtggaccggaactggaccgtcgccctcacaggaaaatcaattttcgtgtgcgggtcacttaacaggcccgcacgcaaaaataagccgattttcgcgtgcgggcctcctaatctacccacacaggaaaatacttgttccctctcatcctattccaaacattttaaatttccttctctctcccccggcccccttatctcctctctctctctctccccattatcttctcctcactttcgtctcctcttctcactttcctctctctcaccttctccttctgtggcgccgcgcgcctccttcacctcctcctccggtgccgcctccttctccttctcctcccgtggcgggcttggcggcggcgggctctcggcggcgggctcggcgaccgggagcggcgtgcgcgcggcggtgggcgaccgccccccgcccggatacggcggcgggcggacagtagggcggctacggatccggctacggtgtcggcgacgacgacgacggcgaccgcgatggtgacggcggggaggacagtggcggcagctttaggattagggttttgtttttttggattttctttttttttggttttccatttttgcatgcgggcgacataatcatcccgcatggaaaaatagcgatttttgcagacgcttttttacagatggttgaaagatccacacgtgaaaatcgttgcacgcaaaaatccattatgtagtagtgtcaaattatctagttcccttatatatataccactggaaattggcaatttctctatgggattatctattaaacatttgatagaaaaccccttaatcttagtccaatggctaggactacatcaagattcgtgctagtaaccttagccttcctcttcccattcttcctccctgcctcttggcctcgccagcgttggaaggtgccaacagcgctagcgaggtcccgttggccgttctcccctttccctacatctccttctccccaagcatggcaacggcgagatgcccccacctcatgacatattcggatctagcagcctaccattggccttgcccttctccaaccctgcaacttcaactataccagcaataccttacgttcacctgtatccgctacccaccatctggcctctctttccgttccccaacccatcctcctaccccttatcccaactccaaaggcaaatatgtaggtttattccgggagttaggcgaggagttcatcgaagctagaggagaaagagcccccaaaaattcacgtacacacaaatcttgatgtaatccatgtaatccaatggttcgagattcacaagaagtttcccctctttttttctgagtgaagattatcaattgtgttccgttatatatatgccattggaccataatttttcttcactcgaggacatccccgtcaatctatcattagtatgttgttaaactaaccgtagagagaaagacagaaatgcacatgccccttgcttccccacttttctcattgtcctctgactattcgagcggcgagagctgctttctcccaccgaccactgttccgcgactcggcggctccacctaggccccacttgtcattgttgccattccccgggtccctcacgcctgtggctgccacagccgatctggaggcctgcagccgcacctccatgtctttgtgcatgaacccatcgttacccccgagcacctctgctgctctacgtgtcacagccaattattataactaggggattccctgcgatttactgcggaaattactaagtaattttttaatgctattttttttataattcagctaggagtaaaaagaaaaaaataatcaaatcttagggcttatcaatatttatcaaattcacactttaatgtaaaacatattgatatgtacatattaaatattaaaaaaatgatagagagatttgtaaaactattgtggaaataatgtgagaagtgatgattgaatatgcttgcatgttaatctaatttggggcatttgcaaatttgccatcggttttttcaatattgcaaggatgccactcgaatgacagttctagtggcatttttgcaattttctagtggcaattttacaatagtgattcaaagtagtggtaaatttgcaattgtccctaatttaattgtagaattaaatagattgtagatgctcttgcatgcttgcatgagattgaatatgtaattattgttagtgggtgatgatgtggcatggttgcatgttaaactttagagttagtgggttataactttatagaaagtatagattccgagtcgagattttggtaattttggaaaccccccccccacacatgttcgcgcttggaatttttagatttttctcttttttaatgaatttggttaaagtttatttaaattcagtcaaaatttatttaaatattcaaataatttcagtctagaaatgctgaaaatcctgaaatttcgtaaattttgatcgaaatcgaaagtgcaaactctggtcgtagcatgctgggaggacgaagctcatctaagtgacatcatgccgtgagacaacgaggagaagccgccgcatcgcattcagaggccgtggactcccgtcgacaattttatcgtcgccatcgcattgggaaatcggaacaaggtttttggtgccctaattgtcgcatgacaagttgcctgggtgagaatcttaacagagaaacagccgagtttagcaagtctgtcaaatatgctacagcctctgcacgataacaaatacaggcacacaccaagttcaatttttagaaaattagaataaatccagcctctacattcaaccggatatacataggcaaacatacaagttgtatgatttctgaattctatgggagctggaagagaggtagtaatccaaaggcaatgttcagcacatcaatcatcagaagagcgagaaatgccaagacatattcgagctgtaacaccaaaagaaaacaagaaatgccaagagcccaagagatgaagagattgttcagtaataaaggccagtttaattagaaggccaggcttcgctgcaaacctaaaattctctcaacagcagtacaatatatcatctaactcaggaaccatgaagtggaataaggccaagatactacatattgagctctgtcaaacaccctcttccacgtgtaaacatgatctaggaccaaatattgcttacacactaaattcagcagtgtagatcattagcgtcgtaatgtagtaagtaccactaatagcaaccacaaaaaaacagaacaatttgtgaatgcacattatatcgcaatttcagtacaacgtaaataagctagaactgaagtgcaaatttatctcgacacatgcatacataaactaagtgaacagtaagtcaccagcagaatttcttcaacgattaaggaatcttgcttccgcttacaccagcaataattttaacatgacagcaccaatgaactcagcaagaagaaacaaacaaacataatatgtgttgatcaacgcatggagagagtactagcatgatcgtgaccactggcaacagcagttaaaagaaaaagagatttggagggagagatgtctctccaatcatttttaaagaagaaattgtgaacgttttgaggattgaacacgtacgggacctcaagtttgaaatcacacatcctttgtcactgcactatatatttcaacatgcatttaagtgtaccggttaaaattgcagatggctactttcgtgggcttgggccaaacgttgatggttcagtccctcatgcgtgtatcaatttcttttcctcctttacagcatgtatgaatctcaaagtgcatctaacggtcaaaaatgcaaggtacaatttttctccattttctatcgaccgtaataccataaagagaaaatttttgagaaaaccatcgtaacgatatgtgagttgcaaaaaatactattgtacgtaaggacagggtttgaaatttcggttcgaaatttccgaaatttcgccccccccccacccaccggcatgctcaaatctcgcccgaaatttttggttttttgcatttttttttgtgaatttggtaaaattttattcaaattcagtcaaattttcaaataatttcggcttgaaatttcggaaaccctgggtataaaatctaatttcgaaattgaaaaccctgcgtaaggatcgatgacatgtgaaatctggacttacatgaaaatgacacatatgcactggtatttttcaacttcagagatctttgtgatggtaccaagaaaatcagcccgcaccgcacttcagcgaaaccgtgtcatgtataagcacgccacctaagcaaaactgccaatcggttaattgatctatcgtttgctcatgacaaaagggacaaacagagacacgagatataaaaagctcactaggaatatgcccatgcataaacacatatagtactcctaataagcaacaacttgaacggacaacaactttggtaaaaatgacagcaagacgcgctgttggattccatgtcatatgcatgcaacgaactcaagaacggatttcctagtaccatctaggaagcaacttatatcgtccactgacgtacgtgttgctgatccacaagaaactagctttttcgtccacgcatgcatatgcactagctatagagccaaattaactaccaatgtggcagtctactgtaccatcactacacttatatcacacatgaacaagcatgctgcaggtaccgtaggtaccggtatctcgaggtattttttgttggaccggagcaaatctcgctgcagatagatcgatcatcgatcgagccaagattgctttgcttgcttcttcgtcagacaagcgtgcaatccatggcggctgcggcgccgttcttgtccaccgatgatttcccattgccgcagccgcagccgcagtcgccgccgcgatgtgatttgacgttgacgacgtcgaggttgtagaggatggggatcatgacgagggaggagaggaaggcgaggagcgggccgaagatccagaggaggagcgggacgccggcgaagaagatgcggttgccgacgaagttgagcgtgaaccccttctccagcgcctcctccatgtagtccctcgtcgacggaaggccgaggaggcggcggccgccgtcgtcaccggcgccatcgccgccggcgaggagggtgggggaggtgttgatgaggaagctggcctcgttgaggaagcagatggcgagggagtgggagaggaaggcgacgaggaagaggagcagcagcgccacgtacttgagcgccatcatgtactcgccgtgggcgccgaagacggcgtcgctgagcggcttcttgatggtgtacgtgctgctcagcaccgccgcgatccccgtgcagaagaggatcgccgtcgtcgccaccagcgtcgaccccatgatcacgttccgcagcgactgcaccaccagcaccgccttcttctcgttgtcctgcgcatattcgtccatccatccatgcaccaagaattaatcaagatgtgtacagccatctctctgtacttactccggtgatcgatcaccggcggcgaaacgtacgtaccttggtcatgctgatggcccagaggcggcgggtggcggagttaatgccggcggcggtgcggagcggggtgaggcggacggcgcgccacagccagacgtggtacgccatggggacgaggaggctgagagggatcaagatcaggtccaagaagctgtccctccactccatggcggatcggatcggacacacgattgacgatactatcgatcaaatcgaagatcgatcactcttttcttagatcacgtactaattactattgctagctactatatgtgcagaacaaatatatgcttcgatagtatatagtacgtgataatattgtcaagtttgtgatgatatattgtgcctgcttaggattgagaattgttagctttccgatcttggagatgtctgtgtgcggcgtggagttgatatataggggagaaggggatactatacatgcaaaaaggggaaactgttttaaacactcgggtggacgtccacccgtttctttcatgtcatctaaatggttataaaaaaattaaaaaaattgacatgataggttaatatgtaatatattacttcacaaacatacaagtccaaattcgacttctataaattgtaacaaaaacaattaatttaactgtgaatatacgtataccagttagagtttgatttgttattttcgttacaacttgtagaagtcgaatttgaacttgcatgtttgtgaagtgatatattacatattaacctatcttgtgatttttttaaaaaaaatttcataatcatttaggtggcatgcaataaacgggtgtacgtccacccaagatattagaattcatcctcgtgtaaaaaggtgcaagagatcacaccatagtggcatcttacacaaaacccacaatcttcaatcaatcaaaagaggtatgtaaacctctaaagtcgggaaattaaattgctagagtaatctcgacaaggaaaagcaaggcagattgcaatagaatagaatgtgatatccagcagcatcgacaacgtgtagtattaattcgccgcatcccattcagctacacgcccttatattcccctgaatatcttagcttttccacttaactgcatccaccgatttcttattatgcatatgcgaataaatgaagaccggccggtaagtactgctaaatgcttcctcagtttcagggttagacatacgtataaatgtgagcaaaactagaaagtcttataatatgaagcggaggtattactagtgtactactccatccttctcaaaatataagagattttaattggatgtgacacaaactagtactccctccatcctaaattagatgttatttttaactttttttacaacgtttgtccattcatcttatttataaaattagtgtaaatataaaaaaaatcatactcaaagtacttttgataataaaataagtcacaaacaaaaatgaataataatttcataatctttcaaatatgataaatggtcaaatgttaaaaaaaactaaaaacgataagtattttgggtatcaagacagagagtttgtccagattcatacacagaaatatgtgtccaaattcgtagtactgttacattcatccaaaaatcccggacggagagggagtagtagtagctgatgtagatagttggctagctgcggttagagtaa

SEQ ID NO: 16464 - DNA, 3530 bp, Oryza sativa
  unsure (1)..(3530): unsure at all n locations
gctggccntttgagtnagataggtcgcatgcctgcaggccgactctagaggatcccctttggttttgggtgcgcgcaggacgcggaggtgccgcccgttgtgcccggcgtgtgcgtgccgccggcgccgccgacgcagcagcaaccgggggcgggattgggggcgggcgacgtgcgggtgttcggcgatcaggtgccagtgggcatggcgcccgcggcggcgccgccgccggcggcgaagaggaaagcctagaacgcgccgaagctgtggctgaacaacgccggcgcagcctccgaattcccggtctcctcccgcgccaccaaaatccgccgtctcgtgcgtactctaactcaaatctccccccaaatcacactagcggcgtatgccatcaactaactcgcgtcgtggtgcgtgcaggacgcggatgtgccgccgcccgttgtgcccgagctgtgcgcgccgccgccgccgccgcagccggtggcggaggtgcagatgcgcggcgaggaggttccggtgatcgccgtgccggcgccgaacgaggagagggcgatcgtgctgtacaagccagacgacgccgcccgcaacctcctcctcggcccactccgcccggaattccctctccgcgtcagccccgattggatccacggcctcaagagtacgtaatccaccaaatccacgcctaatttgagtcgaatttgtttcaacctgaagctgctgagatcaaattaactgtggtttgatcctgcaggcaccgcgctgcgagaggcgagcgaacaccgtgctctgttcgaggagctagccatggacgagacctccaacctggccatggtaccatgggttcccgtgccctcaaactcccaggaagcctccacgtcggccgccgcgacggcgacgacgacgacggagatgatggacgccgaggacacgtccatggaggtcgagcaggacgggggatcgggaggatcccacctcgccgccgccggcgaggcgccctactaccagtggccgcagcactgcatggcgccgccgccgcagccgccgctcccggcggtgagctaccagccgagcccggtgacgtggtcatggtgaagcgcgtgacgcacgcaacgcacgctgtttgtagattgtagtaccatagacacactggtgggctttcatggcggtctttggctttcatttgcttcctgctcgtgtagtttttcctcgttttggcagcgcagtggagactgagcaggagttggagtgagaatcgagatgagatcgtacgtggtgttcttctctttctgtaggagtagtattgtccttgatcagttcatcgatcagtggagaggggaatggtgtattggtggtgaactggtgattacgcggagttttgttctgcttgtacatggtcagtgtggtactggtacggttgacgcctcgacggtcgtttttttaaaaaaaaaatcgtacgtgctgatatttttgctgccagagcttgtaacgtgaaagttgaaactgatatacgggtacatagactgtatgggtggtaagattatgaatgttgacttcacaatgctcttgctaagaatttctccgctattcacactgtgcgcccatctactggttttggatgtgtttggctcggtctgactgaattaatggatgagtaatgtgggtagaaacaaatggatttttttaatcttgaaacaaatggaattttaaccacacttgaggcatactatttgattctctactctaccaattctatcaaaatctaaaacataagcaatttttagtactatcttctacttcttcttttggacctaccaattctatcaaaatctaaaatctaagcaatttttagtactatcttctacttctttttttgggaaagttagctagcccatatttggtttgataccaatgcgaagtatggtaaattttattagtacggtgaataagtttgtagaatgtgaccaaattaaatatgtgcactatcaattatttggctttaatgatttcaatccaaaatggtccataagtggacggggataaaattgcctctacaaaatcagtgcctctacaaaatccacatgactataataaatttaattaaaataggcttagataagcttagaaaagtatatggatatggttgacaataagcaacctgatccatatttaatcctacaattgaagcgccctatgtatagatggctaaatgggccgcgtggcctggcacgacccaagtaggactgggcccagcctgaggtcagtcgggtcaggccgtgcccacccacgggctacaccaactgcccaggcataacccaataagactcgagccgtgccgggctggcctaaggcatgataacccattatgcttctctatgaataagtctattttcctccctcgtctctttaggccatgtcttatatggttgggataagtctacttttgtattcctaatctctttggccgtgccttaaatgcccaatatgtccattttgggtccctcaactatttttcttcacgctcattagaccgtgcggagctggcccaccatgccaaggcatcggcccagtcatggcctaactatcatgtcgtgccatgcttgagttgtgccgtgggccagggcatcaaaccttgggccttatggccatctataactttatggagagtatagaaagttcgtacaaagatatccaactaagaacaaaatcagaactatttttttccacgatctctacaattccttactctataattgatctagtgtgatactagtaacatatgctcatgctttagaggcctagttttaatgactatgtgttttaaaaacatgtgtagtaatgctctagtcatattattatcttattgttattagtgtacggtgacataatatctagtcacaacataacaccctcgaacggtggtccatagatgaaaaataaatagttacactgtttaatacatagtcatgggctcatggcaatttatatcatcccaaggagcatatgccccgtttgtataatgacgggtggttcatagatgaaaatagcagttacatcgtttaatgcataggcatgggctcatgacaatttatatcatcacaaagagcatatgccccgttcttgtaatgacaggtgacacctaaggtctgtgaaacatactcctatattctaattatatgatggcgagtgacaactctaagaaagtgaagacaaactgataactatgggtttgtttggtagaactccaacctctaaatttaacttaggagttgggtctgaagtgaagttgcgaacccaactccacgtctaaatccaactccacctctgtagtttatttcgtaataacaactttactttattttctggtgaagctaaaattgtttggttggagctttggccgtgccaaatggaagctgagcgcagtcgtccctatgagcccaccgccaaagatcgcattgacgaaactacccctgtctgtgccacccatctctccagattaggaccagtgaattacattttttgccgatcccgtc

SEQ ID NO: 16465 - DNA, 2308 bp, Oryza sativa
agtgcctcaagaatttcctcggcgttagactcctcgcaagtaagttcgctcgcccagtggcttgcgcggatctcaatccccgcaagctgagcagggggagggcgccgcctccgtcgtcgtcgtctgtcctgctgcttccgccgcatccccggtgagcacccatccgtcacgcacacccttttcctcatctgtctctacggacgttttttttttctcttctcgaatttgcgttaaccctagcttcgcttctagatctggaagctttttgtcttaatttgccctaaccttaatactgcctcccccactaaaatgtttgggggtttcaattgaacacccatgtcccgcgttagatccgcccctatgctcttctccattcaatcagcttagaaatcgttaagttattactgtctgtgtttattcccatcgtgatgattaactgctgccatttatactgattggaatctatcgtagtagtttagatgtgtctgaacaaaaactgtatgagctgattctggagctcgagaactctaatttactcacgtgctagacagataatccatacgaacccattttctgaataacaaggaggtgtcaccccacgttttgcttctgatattcgcggttgtattttgggggctgaattactgatatgttgtggtgtgattgggtgaagtgcgacacaggggcaaaactaaaatatgctttaccaggaaagcaaatggagctcatcttgtcaataacaattatagccacttctgtctagattatctttatttatctccagttgcttctttttatcactgtcagtgaagtgaagtgaagtgaagtgcgttttattgtttattatgaatgacagttttttattcataagcactaaatggattgggcttcttatttgctttgtatgagatggcatgttttacgtctcttatttgttttgtataagatatcatgttctatgtcaacattttcttatggttatcaactgcaggcaaatcttgtaaaaagcctatgggaaattcaaaaactcctcaaccatcaaagaagtcccgaattatgttgtcagatactgatggccaccaactggacaatgatgagttttcatctgaaagtgcatcaaatcaaatggttctgttcaaccctgaaactgtagctaaagggcaagatgaacttggagagaaccattcaccatctttgcagaaatcagccaataatccgaaccgaggaatgccatctattggggcattcactgtccaatgtgccaagtgtttcaaatggagacttattccgacaaaagagaagtatgaagaaattcgtgagtgtattatacaggaaccttttgagtgcgaacgagcccgtgagtggagacctgatgtaacatgtaatgatccagaagatatatctcaggatggaagcaggctttgggctattgacaaacccaatattgcactacctcctcctggatgggaaagacagatcagaataagaggcgaaggaggcaccaaatttgctgatgtgtgagtaatgcttttctgccactgatctaacctttttagtccatgtttctgcaaggacattgatttcattatttatttcctgacatttctgtatgtaactaatgctctaaaataatagaaactatccaagtagcccatgcgttcacatggcaaactttactattctcttacccattaattgtttcaatttgttttgtatttttatgttattttcccccaatcattggcttcctttggactgttaaccaattctctatgccttagttatgtacaaactttgactagttcaacttaggtagaaggtagtagctacagtagtggtgagcacaggtcactccttggtacttgcttatccactctagttcaatcaaatgaactaaatacacaaatatgcattaaaaagtgcatcttagttgactttgtataacaaaagaaccgtaccaattaagtgatccacgcccattgataagctgcagtatcgtcctttctattattggctacctaggaaaatgttatactatgtgtttgtagctgtaatctctttatatgatggtatttgagcctattgcttgctgtaaaatgtgattattgctgaccagatgtttaattagtccctagcattgcaataacctcatcctaattggtaatgaagtgaaagttgtatggatgaacatacttaatttgttcttagtacatcagtctaaaccaatgagaggcagttttggcatcatgacgagaatcaagttcttgacgctgaaaagcaattggtgggaactcggtcattttggttg

SEQ ID NO: 16466 - DNA, 6793 bp, Oryza sativa
agagagttcgaatattgatatccacttggtaccctccaagttaatacaattgggaatcaagacagtgaaggtactgaatcatgtagaagaggatacggcgtttaagacttcacatcactgttagcagtatgaagtataaactccaacatttctactggcctttgtttaaccagtgagcatctggttcatgtagggttccctgcctatgcaatctagcctgtattatagatatttttatttcctcttgatttatgtgggaaattctagtctcgtagaattaatatggtggtttctttcaacattttgggctagtttggtttggttccaaattgtgccctaccaattcattggcaattttcaatagagtttctagttgtttggattggtgccaaattttaacaacacatctcttagatagtaaaagttttggccatccgaatttggtagtgccaaaagttgcccaaactttggcactaccaagattttggtatggcaccaaaccaaacttgccctttattttatatttgatagtagtactgcctttatatgatttatacaaacttttgtcttgatatatttactgaagttattgtatttatatgacactcttttactttctttcaggtattacacttctcctactggaaggaaactgaggtcactggttgaaattgataggtacattattatgttcgatttgtcaaatttcccctttgaattctttcactgcacattttatgttgctttcctcttcagctcttatggctggacaagtggatattgtaaataaatagaatgtaattcagtatgcccatgctctaactactcaatccatgctttgcaggtacctcttggagaatccggattatgttgcacagggtgtaacattaactcaattttcattccagattcctaggcctctgcgacaggactatgtcaaaaagcgccctaagatagtgaatccaaatgatgaagcaagtgtagtaacgaccaagtccgttaagccggaagaaggtgtgtaatggcgtataaatgaactcatcataactagttagcacataatcagtattaattctcaataaaaactttccatttgcatgctgaacaattaatgggtaagtcaccagcttcgtggttcactgccacgtcccaccaccctggattattatcccgattcgtgatatgcagttgatctggttcatcatcctgatcaatggttgggtcatgaaccggatcaccatcccctatggttgctacagaaggatataatagatatggaggtggggttcaagatatgtgcccgaaactagttggcagctatagattgggtaattgacctgagccatcgacccaatattaccggattcatgtcctgcatcgcaaactatcgtgctgaaaagatacccttccgtaccacatgttttggcaagtaaaatcctgtggccgtcaaccccgtcccttgaaccgattgaactgggttcgcgttgacctgctatggcttaaaatatatctacacacacagacccccaggagattgattggttagtattttgtcattatatggatttctgatcatgtagtccagttatctaataataaataattaaaagtaaacataagaagtcaaattagtttccttaaacttgagttgcataataactgacatgtgctggctagtggcgtgtactaaaagttactatgtaacaagctcgtgtttatgttatagaatcatactacttgctagatttatctttatccagctttgttttatgaaattagcttacgcaacaggttctataacagacacgtaagtctgtcttggatgtattgtattagtcattttggttctttccaagactaacttgctagagatcggtacttcctcttttagtgaattgatcgtagaaacttattcaacaatctcttcactcttttagagagatatatttatactataaactactcgagctgcccttaatttgttactgtatgtatgtccgctgaaggttagctctatagcatgccaaacgaactgcattcaccatttgtctgatcctatatgatatttttgccatttgtctgattccatgtgatgtttttttgctttagtgagccccatagcctgggcagcaccatcggtacatcaggagggtgaagctggcgaacgagcttctcatgctgatgagccacctgaagcagaagaactggagctaacacgaaaaaggaaagcggaaagccctctgttcgaagaggcacattctaaccatgtttctgatgaaccaaaaaccaagttagaggatactcaaaatggaggcccttcagcttgaagactgcaacacagtgataccttaagctccccatccatggttttattgattctcttttgcgcttcataatttgggggccagtttttcctgtaatgcaaggccttactggcctttatatgtatcatgccacgttggtgccaggttggaggctgaatctgactcaaaatcaagttttcggacacgttacaattgttgtatccaaaagccatgttggaactcttttcaggagtgtgctttttctagtatgggcctaggtaggaaacctgccgtgtaagattagctcctctccttgttttctctttgtaagataaggaaatgttgtagggacatgtttttcttgtatgtgggtttgatcccttttattatctaagacatgccatttctgatggtgaaatttctggttgagttcgtcaggcagtcaagcatggccaaattggagcatgatccatgcccttgtagctagtaatataatttctgtggcatttttggctgagcttcttttggaagttcaaagttggcaatgctcaacaatctggctctgcagcaatacatcagcttgtcttttttcactagttctttgttggcaatatgttatcttattcacttgacaaatactccctctggattcaagtatttgtcattcctttgttggcatatgttctcttattcacttgacaaatactccctctggattgaagtatgtcactggatattatgtacttttatttaatttcgaccgcctgtcccttttacaaagtttatgtacacttcaaggtataccatattggcaaggtgttgtgccataagtacaaccatactactttcatttatcgtaaattaattgtttgttaatgatcaaagctgaaagatcaatagcgagaagtaactgaggactgagtatttttacccagcccaaattatgacacacagcattatcacgcactgatgcatgaaaactattgcatgcatgctaaacagctacacacacctcaataacagatacacagcaagctcatcaaaatcatggtatgtttatcctgaatcctcctctttaaacatgtatatgtgacaaaaatcaaatggaatgaaaatgtacactatggtacaacaagggctacaacaaatttcccaaatcccataggcatcacacacacagttgacacttccctcaaaatccgctactcagaaatacaccaatgcaaaccacagctcctcacactgatgaagaatccgttaatctgtatagctcacgaggcaacagcaatggcaatggttggtttgcattggcaatagcgattgcagtagcaagaagatgtatacaacaacacattgggtgaattctttaccgtggaattggggggaattgggggtgatctgttctagctttgttgctgctgatcgtcgggcttcttgtaggaggggttgaaggcggcctgctcggcgcagtcgcggttgtcgccggagtgctcgcggccgacgcccatgaggtcgaggtagtactggtagtgcgagatgatgacgttcatgtcgtcgatgtagcccttgccgcagatctggtcgccgtagagcacgttcatggtggcgccgaacccggggaggcgcttggcgagcgtgtcgttcttggtgggcttccagttgcccacgaacacgtcgtgcgccgacggctgcttcttcttcatcggcgtcatccaccgccacatcgccgccatgaacgccatcgtcgcgttctgctccaggtactccgggtggtggagcaggtcctcgtgtatcccgtcgcccgccgcgccatagttgtagttcctattccgaatccgaatccgaatcaatcatcaaatcaagcgatcgagatggcggcgacgaagcgaagcttaccagaagacggggatggcgccgcggccgtagtactcggcgccctcgacgcagggatactgcaggttcgtcttgtcgcaataatcctccttagggctcatctcgtggttgtagcagagcccccacgccgtcggcccgccggtcgccacaccaaatccacctgcacacacacacaaatccccatcaatggcgagcttaaaacctcaaatccaaatcaaaccatagcgaaaacgaagaagctacacacatgaggtcttggagccgacatggccgaggaaggcgcagagctccatcatctgcatctgcttgccgccggtggtgcaaaagccgaggggctcgaagagggcggcggcggtgatgaaggactggtagtcccagaagccgacggcgtgggcgacggggctgttgcgcttggagaagaggttctcgaactggtacaccttgaagaagtcggtgatggtgtcgttgcagcagtacttgctacccgagcactcccaccccttgtcgcagatcttctcgcgcgactccttcatcttcaccttccatgtccccgccgtcaggatcagcgccaccgtcccgccgatcaggatcgccgccgccgacaccagcagcgtcgtcaggattatcttgttccgagtcttcctcttcatcctcgaaaatcaaccaagaaactgcctctctctctctctctggatctcgagcgagttcgtgggggtgaccggcgatctggatcttgggggggagaatgcggcaggtggtgggggatctggtggtgggtgggggatgaaattgggggggaggagtgtgaggtaagcgaggaggaggagggagtggaagaaagcgaagtggcaactgcagatgccgacgcggcgaaggcgaagctgctggtgaaggtggtgtcggtggcgggaggaagaagagaagaggcagcaagcgagagagctccgagctggtaagacgttgccgttgtgtgtgtctcgacggctgagcattctgtctttttttttccccttttaacaactgtctggagtttttttttttttgctttttttcgcgggaaattgactgttttagggtgaaatttgggcatgattttctcatcaagattcagatttttatctctattttcgttggcacgttttttaaactacaatatgtttcatataaacagaaaacctagacaacggtatcacgttaccttttatgagatagtacctgatacctgttgtggtacgagctgtatggtacccgatacctgtgatacctgttacctggaacgtatgatacttagggcctgatatctgtgatactcatgcaagagaatagttaatatgccttatcccgttgcaacgggatcccgttttgtagcagtcctcttcatataaaaaagttttatatagaagttgccttaaaatatcaaatatattcatttatcaagtttgtaataattaaatttaattaatcatatgccgatagctttttcattttacgtgcgtcaacttaattttcatcttcgtcagttttaaatatcacctttgtgtgaatttggttaatacaaaaggaaagaatatgatttttggaatatctgtttcctcacctgactgacagtcacggttcacatgggtttgtgaataatctaatggaatcgagtggttgatgtggggtaatcaaatcatgagggctcccaacaaccaatctgatcatggttttatacttttatccggtgatggcatagccggtctgtgaggactggggaagaaggatgactagaagagagtagttcccctattccaggctggatgttatatattgcagaaatcttctcgctgtcactgtgtatcgtggaggagtatcttgcttggtcactgtcactgtgtgttctcttgcatcccagctaagcattttttaacacgataaataactgtttgttgtagaagaaaatgaaagtatagatggccttatcgcccgaggcctatggtccggtccgaagcacgccattttggtccggcccaaacatggctcggcctaactggagtcgtgcctgtgctggcctgccccgacaaccgagccgtgcctgggctgcaccctcggtacggtgggccggcccgacccggcccgatcaaataaaaaactatagggatgcaaaatagacttaaataaccatataaggtaaggcccaaagagaagaggaatacaaaatagacttattttccagccatttcacacagcccacatagttgagggatgaaaaatagactttttctgtggagcagcacgatgggctatcgtgccttcgggtcggcccgacacgatccgagtagtattgggtcgtgcctgggccgtgttggcccgactagcctcggcccaagcacgaccgggtttgggccgtgccgtgccgggcggcccagttggccatctataaatgaaagtagggaagcattattttacagtgttctctttacttccaagctcaagatttattaacactaattaatttgtttgttggaaaagaagatggaattagggaaagcctcgttacttcattaaaaaaaggctaattattaaaccaactagggactatttcatgtcatatcatt

SEQ ID NO: 16467 - DNA, 6585 bp, Oryza sativa
cccaggaaaggaaaaaaggggcacggcctgcggaaggaaaaggggaattggcccgggaccggcccaaaaggaagagagaaggttttaatttgtttttcattttatttaattgattcaatgaactttgtgccattaaaattatttcttgagctccgaaaattcacggaaaattccggagagtatattagggcataaagaatattacaaaatattctcggccaatgatttttaaaggaaattttaatttcctccataatttcacttgattaaattgatttatcttttatttaatttctagacaatgcattattaaatgatttttaatcctgaccgaaaatcggggcgttacaaatctaccccccttacaggaatctcgtcctgagattctgggatggctagaaagaaaactggttgtgcgggcagtctgaccgatctgactgatctgcacactgcactgtttttttttctgtttcggattgactgattgactgattgctcgatggaccaaacctgcataactgaactgatcagcatcgaccattctgttcttttgcttcaaacaactgaactgactggcctcattggattagatccctggagttctggtacccaacacgaccaattaactgatcaaacctatacgagtgatctagctggattcaaccctgctgtcccattgcttcccaaaactgaactgattggttctgcttgaactgacccaaactagggctgcggatgcttgtgaaactctcttatcttgggctgaaccgttgatactagcaatttgataacctgacagttcaccaagctggctagagaaggatggagttgttcctaaaacttatctctggcattcgtaaatcattgacccttaattcgcttgggctgctcttgacatgaacggtaagtattctaagaagctgcttgatcaatctttcgtctgaactgcaactgtccctgatgttgcttctctaagcggagttgttgaactagcctcacgggtgtaccttagaattcaatcggatgccctgagatcggtgtaactctgttgacaccttgcaactgacttattcaagtactacccgaattgttgcactaggttgaaccttcaactgaaacagcgatgaggtgagccaaagctcatctctacgacctaccccccttacaggagtagtcatacttttcacctaactaggaacaattgaactgctggccttggaaaaaaaaccaacacttctctgattttaaaaagagtcctggctttgaagactgaaaacttcgtcgatcaatcaacatgaaacaatgacggtgcactttcctcccgacaagatttgaaacttaacttcgttgatgataggaaattccatacagaggaactctcatttagctcataaacatactgactcatgactaacattcccaatcagttctactgctggcataaccgtcctgcttctagcctgacctcggtgccgtatgcctggacagattgcatagtcgacattctttgaagcacacactgaccacttaatggatcaaactcaagagtccttctcatgacataaccccacacgtcgattattattatttttttgctgactcttcctagattgatgaactgtaaaccctgtaactgctttcccaaaaatattgtaatctgcgcgactgccagaagctgactttgatgctgccgagagtttctgttctctagtcataacaacttcgctttcaaattttcggtaaagatgatccgttgaaaggggattctctgccatataccctgcttgactacacatttttgaacttgactctgtatacttctgacccatgtattagaacaatttgtttttttcaacttctgggaaacctcatgaggattttctggaatttatagcggttgccttgaactatggaaaccattcttgtttcgtaatcacaccactagggtgtaattgccgcttaccattctctaacggtttccaagggtagagattccttgtatgatgttacttccgaatatttttttcgttactccttacacttgaatacccttgatactgcctttggatagatttcatagtgtcgagcgccatggatccaaccattgtcacttcattggttaatcctttctttactggctcacaaacaggttttggagcagaacaaaagtgcgatgagttagaagggaaattcttgggtttcttgtaacttgcagatacacatgttaacttccttttgcatactcaaaggtgaaaagaagagaaccgcttgactcctactctattcaatattcccttttcaactatatcactggattgggacttctatgcacaaggaaggtatttcaacaccaaaggcctgtgcacaattgttgactcttgctgacagaactgctgatcagtagcacatttacccattgtaattctgacatggttgacttgtccttttgttggttactagctgaagctcccacaagaacaaaactttgacggatgacgttcctaaggcaaacatcaatcctcttggtagctgaaaggaacgaaaccttctcactgtcggtgcaactcttctgttaattacttgccagacatctgagttggagtagcatgagatgcatggctgatgttgataaccacattgaagtctaatgcttgagacattgactgcagtcgatgctgaagaattgagctgtctctctacagtaaaagtagatcaccgattccctaacattgattgcccttctaatgctgattttgtagccttgaagcggttgctagcgaaacaatagaatctttatcggtgcctttaatgacaattcagcaagatggaaactttactatcaagtgactattggaagcactcctctttctagtgtcattggactggatctgaccacttcatataggaactgatgtaacttgaggaggcaaaggcgttctaaccatgttgctgacttgatgagactgacgctttggcgctgaacaaccttttgggagatgataggtcttccaacagttggaaacaatggtggactatctttcttgttctcgagagtagacccttactgaggtggtgtcccggctcgaggcgattgagacacttctcacttgatggatctttgatgtgcactcttcctgctgtgcatgctcccaactgaaaccagagcaaataactcataaccttggtgacaatgttattactatcattgtgggttgccgcgacagatggagctggtggaagggcggaagtattgcttctgttgttactgactgccataagttgacgaacatgttgcaaagttgtcctttggtctcattgccttagctagtaccaaactcagttgattatccttgagcacatggtatattccctctcacaagaatcgtgcgtcctttctctgccaaagactggactgaggtgtaccatagtttttgtaagcaagcgggcctggacctttcttctctcctgggcacggtgccctattgttggtcgttttgacaaataagtccaacgggtgattgaacacttggcaagaaactacccttgaaacccataccttctgtaggtatcacttgttgctcctaggattagtggtggcttggctgtgctggtctgctgaagacttggtggcgtactgtctgaggttgcaggttgtaacgctccgcttttcgtgagacattaaaaactaattcggcaaaatcctaattgcgaaaattttcgttctttgtgtcagagtctaagtcgtgccaggatctcaattcaatcctgttgttccctctcatcgaaatcaaaattctccacctcgaaattcctccttcgactcaaatctccaaatcaaattccgaaattcaatcgcatcctttgaatcctcggcaaatactcgctcccaattcccaaaaatatcaaaccctaccttgagtcttccttgattcctccctgaaccctcgagttcgaatatcgaatttgaatctaaatacaaactccaattctctccaaattagctttccctgcaaaagtctattttacctccctcgggtgttgtgggccgttttccccccttagcccacctccctctttcagccgtttctcctccctcagcctcgcacgtgcgttgcacgcgccgagccgagccgagagagagctctctcgctctctcgttctttctctctcccatcttcactctctctctctgctctctcccctcccggcgccgattcccgccgctgcctctgaattccgccgctccctcgcattgcgcacgcgctcgcccgcgcgtggcagaccgcccggtcgccgccgcgtcagccctggccgcctgcgccgcgtagccgcccatgccgcctgccgctcgcccccaccctgtgcgcgcgtgcgtccaagacgtggaggcagcgcgactttttgcctcacgcgctctcctctccctctcccattccccgtttcggcaagaacagagctcccttttccccctcctttttccattttgcacgacaccgcctgtgacggcttgccgccgcttggaccatgggtgtgaccgcaagctcctctccttgacttcctctcccgggagtcggttcgttcccctcgaagctcttcacccggccacctataaaaccagagcccctcccctcgaatcctcctctcgtttcactaaacataaacgccgcactattgttgttgctcgctccgctctcgccgtcgccgttcgtcgccaagcaccggggaggccggtgcgtgcgaggacgcgtgacgcgggactccgagcaccccccttcttccccttccccggcctgagaacggagaactcactcccgcgccgtcggccactcgtcaccgtgccgtcccgactcggtagtgactccctccgttctccttcatcgttctccctcgccctctctagcttgcgtggtagctctactagcccctcgaacgcgcgtagacgccgccccgagctccgccgccgctcggcatggcctcgctgccattgccgcccgcttccggaggccgccgccgtcgctagccctcctcggtgctcctccgccccatccgatgccggaaacggatttcttaaccccggacatgctcccaccgccttgaattgaatccccgtcacccctccgccgtttcccccttttctcgccgccggcgtgcgccgccgcgattcgtcgtcgtcggcccctctccgaaggatccgagccgttggctcaacccctctcatgcttccctttgtaccgatgaactccctctcgatcgaatcgccgcgtcgtgctccggtgaaaccccgcgcgtcggccaccgttggttggagctcctgttcttcttcctcctctcgcccggcccgcgtggctgccacgtaggcgccacatcggcgccacctcgacgcgaccgggtcaaagctgacctcggtcagccgcctttctccgtcccccaccctcgcgcgcggtggaatcggtccaccgggccctctctttcccccgcgccccctctgttgggccgcctccccgtggccgcgcccggcccaatggctcggccgagcctccttcaaccctttgggccgcaccaatgccacccgagataagtccaaatcacatccctcacccctttaattttccaagggatttaataaatctttttcctttgttccataaataaaattctttattccaaaattccatgaatcatttttctttggtcccgcacgtcagtgactgtcaataatattcttgagaatattatttctataaattccataaaccatttctcgtcttccagaaattccaattaaacttccaaaattcatatcttcccaaccgctcttccgattgactccgttcaacttccagtaattccgtaaaattgagatctatttaatggcactattatttagtctaaatagggtctttttcttggtcttttgtttaggtttttgtttgtttgcgtatagttgcggttaccggattttcgccgatcgcgggttttctcgaagattcgtgaagctccgtgaagaccttgagcaaggcaagtcaccctttgaccaattgctcctataattggaaaatcattattattttgtttgcaacttgcattattagagtcacacacttaacttgcttggcctcggtttgcgtgccaaaccgacggacctacccagtagtcgcactaattcctataggttgtactaccctgattccttgtcgctccacccttttggtacttcggtatctgtgctctttgagcgcgtataccaaatatcccacatacactgttgattgtcgaaaaattgggaaatgggtttgagaagccttgaaaacccgacctgtggtgtcggtgtgtttaaaaataaaatgtattgtgaaaactcgcgatgcaggggttgtgcctgcgtggcactgtcccgtattcgcatataaggaccgattcctgtgggaaattcatcaagcataacaaagtgcaaccacaaggtggaatgggacaccctagctaagtaactagtcggttcagggaaacctcgcatgccaatagttggggaacgccggggcggggtcggttggagccaacccgggttcctggtaaggcaagaacgcg

SEQ ID NO: 16468 - DNA, 4072 bp, Oryza sativa
  unsure (1)..(4072): unsure at all n locations
aatttgttttgattccctggttattggagtaatgttgtggttagaccgtattaggaactagagatctatgtctcaagctatcttgacctatcattctcgatgtaaaattcccgtgatagtcaatgtggacgtaaaatgcaccttcaatttgtgtgatgcacaaccataggatcaccttcgatgtcacctaggacatcaaggtcgtcctccgccgtagcaccaactattggaactcgttggtaacgaaaatctttcttactatcatgtcttaggcagggcaaggcaatcagggcacacacttgcgcctgtgaagtgacctccattgatatcgtgcatagtaggctttggtttaattgtgtaatatccacagagcctagcccatttctccacagccctctacttgtgaatttactctcgttcctcgcgatgaggaccccatgccaatttgctcccctctagctattacactcttcaattgtccaacttgcaagttgcgagtctttctactctaaactctgaactctgaagtctggaatccccttcacactttcacactttcacagccattgcgtctagcatcctgataataagttttctagtttttttttcttttgggattcactgttacattctattttttttttctgttttaaggatctggtttagggtaagaaagggctgaaagaaaaaggaaaaaatatattgctaatttatttgattattcaaagaaacatctatatatataaaaatctttacggtgtcattaagacaagtaactgaatcaaacagggctcttagctcaatcatacttggcttagtgacatttgcagattcatctctgtttcttgagcaattgggctgtgaaatgctcgccccagaaatggaacttttaaccacagacatatgcttattcctcttcgtctttttttggcgataactattttattttagggagcagaaagcgagcaaatcatctacgagattcccttcgggcacctaggagattccctgcgagcgattgtacgaaagtgacgaaggaaggaccacgagattccgtgggcgctacgaacgcgacgaacggccgagaaaagaaagagtagccgtttcgaaatttggtgacaataactggttttttttttgcgcaataagaggattaggcttgtgctgggttaattagcatgtgggctgatcagtaagagccagtactccctccgtccaaaaaaaaaagacaaaccctggtttccgtgctcaatgtttgaccgttcgtcttatttgaaaaaattataaaaaaaattaaaaagacaagtcatgcataaaatattaatcatgttttatcatctaacaacaataaaaatacgaattatagacggagggagtaccacactgccacagtagggctctgctgctgtctactgtgtattgttgctgcagagtggccgtagctacagccagccagttgaaacttgcagatatcatttcgaggttttctaaagcttatggtaataatggtatatgtggggctggtttgctttatgacctaaaattgaccttactaatttttgtcaatgtcaaatttttgtaagttttggcatggctaatcttggcaaggtaaagttgtgtttggactgaagccaaagcagtttcatttcattattgaaatggcctatttttttaggcatgccaaaatttggtttcaaaccaaatagacactaaacactattgaaattgtcaaatattggcaatgccaatttaggccacaaatcaaaccagcccatggttttttttactccctccgtcatataaaaaaccaacctagtaccagatgtgacacatactaatactatgaatctagacatacatatgtccagattcgtagttctagaatatgtcacatccaattctagattcgttttttataggacggagggagtacttacctactagattattgaaatgtgttctttgttatacgtttctaaaaatacatttttaccaaacaaagtttcactgtatttttcaatcagttggtttaagttatttgttaattttatctctaaaacatatctttataaccaaatcgataatccgatgcaataatccatttaataatcaaacttttcgttaccaataatttggtaaggccaggaacgcagctcattctaaatgccacctaaactaccggggctttcacacacctcacgcactcgacactttggaacagaagacaatagtgcatcgcaggtaaagaaaacgtgaacacacctcacacacacaaaatggatatcctagtctggccaaatttttggatgatctcatcgagcatttttatagatatttattttcgaatatcttatccacatctactcatcagcctaatacactcaaaagttaaatggacattatctatctagaaatatcttttccaccaaacacaccataagatgaacagatccacgtcagaaccagttgcatccaacagaagcctactcagcatccacgtcccagtgaagacagttaaaggcgtagctcccccgaaaaaacaattaaaggcatatctttatatactcatgatagacatacagcgttcaagacacttttataatattatactacctcagtcgctttgtcttatttcttagttaatttttttaagtttaattaagtttaaagaaaaatatagtaatattttcaagttaaattaacatactagtgaaactaagttggtgttatagatgttacttttttttataaacttaaataaaattaaagaagtttgaatagaaaaaaaaatcaaaacatcatataatatgaaaaaagagtaagattttaaatatttatatatttttaaaaggaaaaaaagatagcaatcaacgaaacgacgacactaccggtttaccacgccgcccacgcttcgccagggccatttcgtctttaaatacggacactagaccagaggcctacctgtaacctgttcgtccagctccaaagtctcaggcgcacgcgcactgacagcagcagacagggcgagcatggcggcggcggcgaacaacggcggcgagggcggcgacggcttcgacgtgatcgtggtgggggccgggatcatgggcagctgcgcggcgtacgcggcgtcgacccgcggcggcgcgcgcggatcctcctggagcggttcgacctgctccaccaccggggctcgtcgcacggcgagtcccgcaccatccgcgccacgtacccgcaggcgcactacccgcccatggtccgcctcgccgcgcgcctttgggacgacgcccagcgcgacgccggctaccgcgtgctcaccccgacgccgcacctcgacatgggcccccgcgccgaccccgcgctccgcgcctccatcgtgaacggcgccgccaccgaggtcgcctccgacgcggcggcgccgtggccgtggtccggggtgttcaggctgcccgaggggtggacggcggcgacgagcgagatcggcggcgtgatgaaggcgaccaaggcggtggccatgttccagtcgctcgccgccaagaacggcgccgtcgtgcgggacaggacggaggttgtcggcatcgccaagcaaggtaagacaccgatcgatcaagctagagcttagcttagcttagctatgtcgtcgtcgtcgtcgtcttcctctcgcccaaccaaccaaccaaccaatctcgttggaagtatccgggtagctcttgcatgattgcaactttgcttgcatcacgtgatcagtcgctgccaaccaaaatgccagcggcaaccaccatgcgagagctgagtgagctcctgctccttgcgggaccattgttcttgttgaatagtaccgcaggagagaagataaatattgaacacattgtactgagtcttagagacccggtatacataagagatacatatataaatatggggaaaatatgtagtgcaaaccacatatgtagtggaagcttggaaactactgttggatcgagcaatagacgtccgagattcgtccacggggatcctctagagtcgaaaggcggngcaccaagattgnggttgttcattntcaaanggacgcgcg

SEQ ID NO: 16469 - DNA, 33916 bp, Oryza sativa
  unsure (1)..(33916): unsure at all n locations
cgcgcgattaagccttgagaatcncttcctcgcnngccngcangncgactttagaggatccccgttaaaatttaactcgcagatcattcatgagttaaaattttactcatggtaacgtagacgaatctcgaatgtccattgctcgatccagcggtagtttccaagtttttactacatatgtggtttgcactacatattttcccataaacatgggaggagtccacataaatcaatcctattataatatgactttaactactggtcgttgttcagtctggacaatattggaacaggtagccaaaaattagagggagggggttcctaatggatcgctattattggtagttaattaatatttgaacaaattaagcaatagttaatgccgtttactccatcaaaattcctcccattctaattttgtcactcggaaaatcaattcctcccattccaattttcctcctatcaactaactaattttcctccatccaaattaatgcgtgattttccatcttgtgttcttatctcatctcaatggtttacacatgtgcatatagtttccccccaatcttctactctcatatcaatactgtactatgagaatcaaaatattcgtgctagtattgagagtgtgtcaccatgacggtaacactactgatctcttttaacatgaataaatattcaatgtaatttttattgccgtaggaaaaacgtctatcttaaagtttacaatttactataccttcatagctactactatagaaacggagtcgtcctcctttcgttctctcctcccactgctcgtgcccagcacaacataagagcataaaaggaacaaccattagatcacattcttaacctattctcagccatataaacccgttgcaatgttcagtcatgttactagtatatagtacaaaaagaaaaaaaaattaaatttagggcctaaacctaacattaagcgtgcatcacccaacttccaggcacggccttggctctatattcccaagtcagacaagggtgaaaacaagaaatgtattgtctcattatttaataaataaataaatctggttagcatctttgttattgcattattacaaagcatgtgtcagcttattgtacttttaattagaactgaacgtctgttttaattttatagcccccctattgcccacatgacataaactcagataggtcagtacaagattctagtcaagtagctatttttttctcttaaaaaacttatttttagtttttttattcaaactgcaaaacctatatatgtgtcaattaacaaagttcttgatttggttggacatgcatcaggaaaactatattttaaaaaagaaactcgtcttttataaagattgggtaccagcaatccgttattgcactaaaaaaacatttttcatgggtttaatttccattccatttttatttatgcccttcagaatcatatatactagcttgcacataatgttagtgaaatccattagctgatttagaagtgaaaaatcttttactccattagcatatcaaacacttaatttgatcaggagacggatcgatcgtggtgaagacatcgagcggcgaggagttccatggcgccaagtgcatcatcacggtgggcgcctgggccagcaagctggtgaggtcggtcgccggcgtcgacctgccggtgcagccgctgcacacgctcatctgctactggcgggcgaggcccggccgcgagcacgagctcacgccggagtccggcttcccgacgttcgccagctacggcgacccgtacatctacagcacgccgtcgatggagttcccggggctgatcaaggtggccgcccacggcggcccgccgtgcgacccggaccgccgggactggctcgccggcgccggcgccggcctggtcgagccggtggcgcggtggatcgacgaggtcatgccgggccacgtcgacaccgccggcgggccggtcatccggcagccgtgcatgtactccatgacccccgacgaggacttcatcatcgacttcgtcggcggggagctcgggaaggacgtcgtggtcggcgccgggttctccggccatggcttcaagatggggcccgccgtcgggaggatcctcgccgagatggccttggacggcgaggccaggacggcggcggaggccggagtagagctccggcatttcaggattgggcgtttcgaggacaatccagagggaaatctcgcggaaaataaggtcaaaaattaggtcctcacaggtatggtcgcctgcgaaaattggtgcaacgtgtgaaatgtggttatcagtagggggtttgtttaccgtaaatctattgaacattgtatttcataacttctatgtgtgctttatactcttggatattggtagattgtaataatttgcatcttctctgtccttgtgtataagattcaaaataaagttgttctgttgcatttcttcatctttttgcaaaacacaaaatgttcctcattttgatcttcactttttttttcctcgggagagaatcacactagtgctgttttttttttccctcgggagagaatcacactagtgctgttcctattcccagtcctattcatggtagatatgccgttggtgaattgaaagagacttgggtgttcgccattgtcggattcaggcagtacacgccgcaaacctcacaaagttaatcctttggaaacaaagggttattttggaggaattttgaagggattcaattctatagaaaattttctcatgtgatcctttggataaaagaaatagctatctaaaaatcctatgaaattcctttgggttcactctaaacatacataggggatttgtaggaatttcaacataaggtccaacccgtctctatctttctctcttctaattcctgtatttcctatgctccgttcaaacagttacatttttatatttcaaatgctcttttaatccataggattagagatgatagctccaatactatattttttttattgttcctacattttaagaattctgcattccaaatgggccctctgagcatgaggaatatgctaggatttgaatagctccaaaacgttgagtctttctaaatacgtcacgtcttgctgcaactatttcttagttttaatcatgcatgttgcatggtgaagaattatcacttacatctagctataacaacatgtgttacatgctagctgatgggtctcattcccatgactcatgagtgatgagtgcgtcaagtcatgtgctgagaaagtgacaattcacttgttgtttttgttaaacaatcaaagagatgggcacaatatctttgtatcttttcagtctgatgtaatggtgcaagtcctaaaaaatcagtagtgacaatcgaattgagccacacttcggttgcttgtcctcattaggtggcatcgatatcgcacaagtgaattaatgcctatcgatctgatctgaagacttggctgttttcaatttgcacaggtcatgttcttgatcttatcatttgatagattgtcgcatagtgcgttgtcatcttgatactatccaacactccatctgtatggagtatctggtgagacagtgatgctttagctttcgcagtacaaagctgtctctgttattgatgactggtacagtaggttcaagactgaagaacaacaggctagtggagatgatgaaatttggagtgatggattgttggtgtaattttcagaaggaaaaatcaggccggtcctgtgcacagtgggcacttggcaccattgacttgacctggacttggacttgttttttttttttttgcagggactggacttggacttgttaaagttcagcgtaatcaaatcagtttgggctgtgtttagttcacaccaaaattgaaagttttgttgaaattgaaacgatgtaacggaaaagttggaagtttgtgtgtataggaaagttttaatgtgatggaaaagttggaagtttgaagaattattttggaacaacacacggcgcaaatgtctagctgaaattcagtaaattcagttgacgaagtacatgcatgtgtctcgtcaatgtgaatatttctgaaattctgtccatgactactaatgtttctactatctagcaatatatttagatcttctgaacttgagtacaaagaatagaaaattaatgaatttaatcactgctaatatacacgaagaataggactaatctctgaacttctcgatcaactgatctctgacaagccttcttgatcgtgaactcgtaatctcttctttggtgcagttaattactactaggagatgacttccattaatggtgtgctcaaatttcccaattcttcatgcttcactgtcagatcagaaaaggaagacgagcagtagtagtagcagtagcagtagcagaagccatggctgggtgcatcgtgtgctcgccgacgacgccgtcatcgtctcaggctcatgtgctcctccaccgccgttgtagtatatcggcggtctactgccgccgccgccgccgccgccgccgcggtaagccggcggcgcatttccgccatcgccgtcgatgatctgtgctccgaggaacacggcgtccgacttattgatcctgcagcaagaatcacacagctattaaaatttcaggaatttcgatcccctcgaccagaaattatttcggctaaatttttgtttgggtaagacaattttcattcagatttaaccaaaatttgccctaatgtaacctttttggtccgaaattttcagaaaaccctgcaatttccgaaatttcgcttcaatgggtaaatctcagcaattccacttctatcggtaggttttccacagttcccaaaattcatgcaatttccgatatttcacttccattggtaaatgtccgcaatttccgaaatttcacttctatcggtaagtttccagtccctgaaccaaaacctgtccaagtgctaacttttttcaatccaaacatttcccgaaatttcgcttctatcggtgtatttccgcaagtttgaaaaattctcctggatctatcggtaacctgtccaagtgttaacttttttcagtcctagaatttcccgaaatttcgcttctatccgattttttttcgcaatctccgaaatttcacttctatcggaattttctatcggtgaatttccgcaatttcgaaaaattctcttagatctatcggtaaatttcagaaatttctcttctgtcgtaaatttcggaaatttggcttccgtagctgcatgcgtacccggaggtagggaggcagaaggcgatggtgtagtcgtaggcggccttgcaggtgaaggtggaggtggagtcgtcgtacgcgtagctgtaggcgcgcgggcacgccgtcttgaagatggccgagtacgccgtcggccggcacgccgccggcgtcccgtactccccggcgcagcagtacctgtcctgcccgaacgcctcacacgcgctcctgcacgcgatcgccccgccgccggcgcacttcacctgcaacttcctcggacacgctgcacacatcgtcgtcgtcagctccggcaatggcgaagtggcggcggcgtggcgcgcgttcgtgcgtgcacttacagcggttgaggtcggccatgcagccggtggcgttgcaggcggcggcggcgccagggatggcgacgacggggaggttgtagccgtcgacgaggctcacgtcgtagaagtcctcgccgccgcccctcccgagggtgacctcgaacagcgtcgccggcggcgcggcgccggcgccgcggcactccacgcgcccgccgcagtcgcccgtctggcacacgccggcgccgtcggcgtcgaacacgcaccccgtccgcgcccatatcctccccgaccaccccgccggcgccgccagctgcgccgtctgccccgggtcaagccggaaccccgtcgtcgacagctgtggcgtgccggcgccggcgagcgtccccggccatatcgggtgcgaacaatagttcgctatagtgaacgtcatcgccatggaactgcacgaccaagaagccgccattgccaccacaagaagccatagcttgcaagctcttggctctcccatggctcctatggctcaaaatttgggaattgatgttgataggaagaagattgagcagggaaggggaagaagacattgagagaattcttgcaagatttaaaggtgcaagtgccatgatgcattgcatttttgcatgtttgcatgcaaagaaagctttttcttggtgtgcttggtttagcatgttgcacggatggggtggcctaggaaagaagaaataccttttgggatgatgcaagcttatgatggtgacatgatcttagcatcaagagaggtgaatcttctgatgcttgtgctaatgcagataccttaattactagtcaaacatgctatgttttgaatactctgtagtctgtacacagtctgaacatttggacagagtacatgtttgtgagtttgagcaaccgggaaaatggaaatgtacagaatacttttcttatttggatacagaaaaaagacttgagctgaactctattacagtattagaatcagtagtcaggataacagcatgaagattctgaatttgctatcatatccatgcgctgcaagcctgcaattctcattatccttcttttttcttagtctttatttgggtttgatttactgctcgagtagctgctatctcagaacattagttcgctacatgtagttctgaacacttcaacctatcggtaagcttgtaaaatttatgatccatttttgcgtcagacatgctcttcaattccaatttataaaatcaaggtgcaagactgcaaattcattttgtctacaaaaatgtcatgtgttttgtaaaaagcgtacgatccatttcatacaagattctttcaggaggcaatcatgcctttggaggaaaactgcaaggaaggaatcatacaagaaaactatcaacatgaacaaccggcacaaagatcaatgaagatgacaaaagatgcacctttttgcagttccataaaatcaaataaccttgcaaccagaccagataaagaatctattctgatttgattgcacaaaaaggaataatcaagctggaattgtgacgcttatggtagctctctgtatattgcctacctttcaagatacccttgactgaacaaaacatgtgtgaactgtaagctagtccatgagaactcagaaaaaaatccatttcagaaagggttgagaacagctaactcatagtgcagcactacgaccttgtaaattattagaacccaatggaagattacatgattaggaagtttccatattgtacagtactcatgatcttatcagaggcacaacaaacaagtggagacctactgcagcatcactcctctgacacaggttcctcagcaccaccttcgggaacattggagtcatcaacaaccgtgacaccctcaagatccaaggggcgcccagtcatcggatgaattgggcgcctatcacgaggtccaccctttcgagccatagctagcattggaggtggaggcagaagcccagctcgaaaaaggatgcgctgcacaggatctgatggctgagcaccaacagacagccagtacctgcaacagaagtataattgtatgctgttacatggccttgcaagggagggaaggacatcatagcattcttctagcaattaactcaaagaaagaaatattgggaagatcagactcttgactctcgacaaggtgggcaatgaacactggcaactagacaatacaggatcaaagatactagttctgctattgatgaaactaagcaccatgcttgaaatgtctgaaactttatatctgtaattttcttccctgttacggatactgttaagcaaatctcatatgcttaaaatctctaaatccttttctgctatggatggatgccagtaagcacatctacaagctacaaaattcagaacccttgaatccatcattttctacccagagaatggaaggcacggatggttggaaggtacatggtaattggcaatacaattaaatagtacacagaagcaataacagcaccccaactcctggaacgaagatcgcattacaatgataactgaatcagtccattttgcctatcaaacaatcagtttccatcaaagaatcaggctgctatagcaatgtcagtcctagactagcatcagcaaaagctccagcacgccaatttttctccagaggaaatactagaacacatcaaacactccaaattacgagcataagcaaatgaaactcacttgaccctgtcgaatttcagccccatcctcttgccaccatccttccctgcaatcagcaacagaaagcacatactcctccatcatccatcaggcattcaatcacaagcttacagccaaattctcacgcacgtacagaaatgtttcacactctactaatccctctccaatctgatccgattcaccatttcaccaagacgttgaggccaacgccaaccaacggggcaaagacaacactcgagaacaagccgatccaggaggagcacgagggggggatatggaggaggagggctcaccggggagcgggttgtagtagccgaggacctcgaggtgcttgccgtcgcgcggggagcggctgtcggcggccatcacccggtagaacggccggttccggcagccgaaccgcgccagccggatccgcaccaccatgctcgcctcccctcgcgcctcctcctcctccgccgccgccgccgccgccttcccttccccttctccggctcgggtcgcgtcgtgttcactcctgtgggagcaagggttttggatttggattctggagaaacccaacaaaaaaagaagaaaaaaaactcagcgggctttacctctgtgatgggcctgatgtcccatagagtatgggccttccagctagagcttgttcacacgagacttctttctgggctttagcccatgggccaaactccggcccacttatggttatacttggttaggctcctgaatggttattagccatttaagctgacttatgcattggccaatcaataattcaatagtagctccatccattcagtgatgaacaaaattaacacgataaaagctcacataaactgtctgtaaaattaatgaaaaaaatcaatagtctgtttggacaatgtgcaggaatactgaaattgcacaagaatcggcccaaaagaagggaactgacaaggccagaattcatttgtagttctctgctcttaacacatttgataacctaactaatggaaatcaggaagccctggtctgtgttttgctgaagtctggaggcctggagaatatagcttgttgctcactcagtcacacccaattgatcattgtcatggttggtagacgaatgctttttcctgcacaaaagatggaagcacacatgctgaactttgcccaagaatgagtgcagtaagaatggaattggaagagaaggatgaggcacaaaaaactgaacaagcaaaaggcttacttgtttgtattggcatcgctctctaacaaaaccgaattggcaatggtattttgttgtctaacagacacaaaaagatccgtactggcatatggcatgctttttctcacctaagagcacctaaaagtgaaacaacctgcatgtaaagtcattttcttgctatgacaaacagctaaggaatctgtgtcaaaacaaaaaaactgattactcctttagggattagcatcactgaaatcatgagagaataaaatgatgtcttacattcaatgaactgatgcatcaaggaccttgtacctgtagaagtaggacccttcagattaggctgctccatgtttgaagaataaaactgtgatttagtcatccaaatgcattcatacatgttaaagaaggcaaaatcttttccatcacatacttttcctagcattagcatgaacaaacaattactgcgaacgtcaagaaagtaacagaggttcaaaaatgatataaataaattagtagatgatgcctaaaaataaaaacgataaagaaacaaaattttatatgcatgtcaggttgagagaaactctaaatgaggaagatgtattggtatgtctaggtagtttatttacccttctccctttcttttctccaactcccaatgtttaactaagatagtctatctcgcattattccacaggcatctattgccacccataattttatgtcccatttggtaagaaaaatgattgattgctgaacccagaagtactgaattgaattattgctagacaggttacttgtgctgccaacaatgtccatattgagtactctctactatgctactgctagatgtgaaaaaatatatatactcacacgttttccttgaatgtcttaaaaagcaaagagaaagtacacaaataatacaccaggaatacgaatagaaagagatgccataaaaaatatatgttctctggaacttcagtaatgatcctgtaaaatcaataatcatgaaagctacccctgtgatgcattcatccagaagaaaactagatactccacattgaaacttccaaatggctagccaatgtgaatttcataattttatatctctgttagtttctgtgtgcatatatgaatacttagctaacaaatcttggcagtggagtaaggatgtcgacaacaagcgattgcgtgcctaagcttcttacaaacaactttgatggcaatggttactctgatctggtcgttgtttggacgctgacgttaatgattttgcaagtttatcagtaacccaaattgacgcgattctatcaatcagtcacccagagtagttacgggtcaatctctctcacgtatcagtgatgtgtgattgatctgttcaacttcaaagagcacaaatgaagcccgttcctactttttgttttactccatggacggcttgcgcacggagtttaataataatgtggtcacaaacatgagtacatgactgccatgcaatttcatattatgaagtgcttgacaagtaaatatcattttcatcacaaaaggttctttgatgatatacattggaacttatgctgtgcattttgcagtgaatcggggagcataagaaagacaaacctgcattatggcagtaatacagggagcacaaaaagggaccacaaccttcactaccagaatacatgagtcatttggattaaattggggagcatataagggataaatctacattattgcagtaaaccagggagcataaaggggacaaaccttcattatcaatagatgagtcatttgggttgtgctgtgcacttctctcccttggataataccattgaataatatgcgtgtcagcaaagaaataaaagttttctcctaatttattagatttttcatcacattctcaactgcagtgcttcacatgggacacatgcaggagatgctttagtccataacatttatagttcacaagagaaaaaaaacaatcaagctctagaaaagagagtacaaacttaattataatttctgaacgagtagacaccgaccctcttctcttaattagaaaaggaactttaacaccaatctttgttttgcattagtttgaaatagcattccattttttctagccacaagcttcataatacttttgtttcttttagaaatataatgctcctagttctgtattgctttatttgtaaaacaaggaatattaagaaacatgaatgtgacataaaaggcattcacaaaatccttcttcagcgcaagtttttttaagagcatgcaaattgtgaaaacaagatcatattttctgagcccagaaaacatcagaacaaaatggaatactctatctattttaaaccactgcagaatcagatcacatctaatcaaggcgacatttctagttcacttgtcaaaaagtttaaatctggtagtaatcccagaacaggtgaattatcacattatatgcattttcttgtctggaaccagggacctagcacttaatcaaagaaatttgattacctatcttggagcaaaagtagaaaaataaattacttgaccaactagtatactagaacatcaaacatagaagaacaaactccgggctgcagcaacaatcataactccatatccagctttagttataacgtcaattcaacaacctacattaacacaggtgttttcttgcactgcattgttagggaaagaatacaggttgctacttcattggcaaagcataaatcagttgtgcataacaaactggttccaccaacagaagtaaacatgtacatattaccttattaggaagtgagtctttgctgtaaatctgcacctcaccctctagacaaaccaaaatgctgtctccagattacccagcacagaagtgcagtacacagctagctagcaagaagtgatcatgaagctgaagacagaatagagatttagttgcaactcaatcattagaccactaacatgagtacatggcacctcaaattagtattcatttgcaggctactttttgttggtgtattaaatccattttttttccttctgactaactcataagtacagtgttgatttagcaaattacatacagagaatttacaacctctatacataacagtagaaagatgtaggtaacaatcatgatatcaatgctgtggcatcatgataatctgcagcagtaaaaagtaggctctttacttgaacactttcccagagattagaattaataacttggaacttcatagcgattaccattaaggcttcaaattttatcccagtcagtagcaggagtacctgtttcttcttgtttgaacagaagaaagaaccatttgattagctgaaaatagttcagaatgccaaaattgggtattggtaggaaaggaaaccggtttccttgtccttactgtactactccttctgtcccgaaatatagctacctttgtacctttgtttgaactacaaaggcaactatattttgggacggagggagtatgtgcttagtaatgagatctaggcatatctttgtaaaatgccatctgttgctagaggcctagaagcatcggagacaagcaagctagcactttgttacagtgatatgtttctttaatatacacggaaaatacactctacaactccacctgtcaccaaaagaaaaaatattacgatcagttacctatcatgatatcttcctgcttgtcatctacaaataaaattttccatcttcatggcagcatcatgttggattaagtaaaaggattatacgttaaccttccatctataatatagttcaacgtctgcgatcatctgtaactctacgcttctacagagacactactgattacgatggatacagcaatgtgaacatgatctttgaagtttgcagcctgttaatcttttcagattaataaaacataaattagatgagggaggtagaagctacctttcaaaactgtagtaacaaatagtttttccagttttataacactacatctttactgtgttagttaaaacttatttcttgtactcaaccaccattaacttctcacgttcagggaaaacacaaaattatagtagcttcctgtgttctaaaatttcagatggctgggaaaaacagttcatgatgttgaatgaaaggaaataatctgcagattaatgccatcagacacattttcaaaacatttaagtgaaatgctcataaaatccattcctggtcatgttatcgtctatgtcagtttgaatcaactttgcaagcattcctatcatccaaagaggtcagctggaaatgtaacatcctgaccgccttttaggtgtgcgttttcaaagaaacatatccatgcattgaaagaattgtaatttttttggctgtggagaaaaacagagggtggtagaaagctccagtgtactttcctccagcaaatgaagtgcttcacaagttatgaatgattcactgaagccaaactaactaatgtcaaatggttggtttgccagatatgaactttcgctaacgacaattttgttagcaacagcatcaatatcataggatgctgttcaaaataattgctcaactaggctaatacctgtacttcaaacatttctgtttctgaactaaaaataattatgtgatttgagagccgttaaaccgcccattcggaaagctgaatcccaaggttcttggccttcaccttcacattcttccccatcactactgataccgagacacaacaacctgaaatgtagtccatcgtaagcagggacggatctaacttgggccatggtggttcagttggaaaacccccaaattcttttggggaacaaacaaactgttacttgtagtagtagagaagctagggtttaacgcaagcatatccgatacaagagagagagatgcggatgctcaccgggatgtggctgaagcagcaggacgacggcgcccctgttcctgctcctgctctgctcgctcgggagatggaaatcggcgcaggcggtgggcgaactcgctggagcggagacgagacgggagttttttcttcttttcttttttttctttacgctgagtttttttaaagaaaaaggaaattgcgcataattaaatgagtcaggggtactgtttgctattaccagtgatttgctctgcgtcgtaggttggtccagccgacggtccgcaaacgatctgtagtgtcatattttttttcttggcttatgcttttatttattagccaaaatttgaatttttaatcttagatttgaagttgattttagggggttttttatcatattttattttccaatctttgcttttagatcgttaagaacacgtatataaaagttttattcacaaattatttttcctttgcaaatatgccatttggtttattcccccagtaagccaaacaacggggcgctcgtctaactgattcaattttgatcatggacagaaaaaatgcatctaaatttgaacttttttggaaaaaggaaagtttttccaaataaatgtgaaattttaagaaaaatgcatctaattttttgttaacggataaagattgctcggattcgggtaaactaaaataaatgtacaaataaattactcgtcgttttagctttgtcataagtaaattgatgattaaagattagatatatttaatttaggagagaagtaaaacaagtaatttagaatggagggagtatcattttcatccagccaacctttggtctggtctttcgtgaaaaaaaaaatccttctcaatgcaacatggacacaccttgcatgattgttcaacgcaagatccttgactccatgcaaagttagcatagagctttcatgacgcaatggaagggaaataagcacaccactgcagtttagaaatcagatgaaatgaaatgttctgctagtatttatgacgctttaacattaacctttgaattaaccataaaaaaaactgacggacagaatgaaatctgacaagagcacagtgaatcagtgatatcttccaaaatggtcactagtacaacagcataactcatcaagtagtttgttgtgacacttgacctacactagttcttgcatacatctgtagtccattctctctgaaacagttatcatttttgtcatatggtgcatgcaagctatctcccatgtatattctacttccaaacatttctatcattaggagcagattaatgcaaaccgcaagcaagttgtcaagtgtttgtacgattgacagtgaggttacagcacatgcatgacacatccttaattaggagaggcaaaaagaagattaacccacaagaaacctgacataaacttgtgagattaagcaaaaataaacataagctctgaagaaaacacattgctgccagtcaggcttccaacaacaaccacgatatgatctctatcagagtcactgcatctgcagctaattaagcctctctcgagcgaactgtcaattcctgaacttgctttcacaaatcagccgtgtaaaccttaccctgaagaaatacatttttcaaaaatctcaaatcacctgagcagttcttgacttcttcatcccactatttcagctatcatctctctttctcagtggcccagtttgattgttctgaatagatgaataaatgacagattttctaattgtgtgatgaattttgagggtacgaatgaataaaattaactagtgcaaagtttaaagttatctttaaaaagtatttgaagcaatttatatatagaaagtttttataaaattcacactatttaagagattggatagtgtgccggcccgtgataatctatagtctgtttgtgaaaaaaaatgatgacctataaattctacaaaataatcttgtcagaacaagctcaagaaacataagacacaatcaaaatctttaccattcagtaaacatactctgtcactgaaacagtcatcagatattcacatatgtatcagtgtctcccaaataaagtggagtacatagaaaatgaaaggatgaaacatgacaaaactggtcagtagcaggagccagcccaagagggcaatttgaacggtcaacatgaacaagaaccctagatttaggaaataatattaaagaacaaactgtttttagggaataatttgggtactgtgacctggtgagtgatgatcaagaatcagattatttatctgaacctctgcctcggccacaagtgattaaattgctgtagtccttttagtcaagattgcatgatcctactgtcattgtcgtgatatccacaagacctggctcaatatggattacaggacaaggcaaagttcctgcaaaatggacagtacacaccattgttttctgctgccaacaattgcctacttgcctgtcactgtttgcaccagtgagcacgcactggtgcacctttcgttttggaattgaaggatgagattacaaaaatctgttgatttaaaatatctcacttttcaaaataaatttgctagctaatcctttctctaagcaacctgtaacagtcttcaggggaaatttatatggttatatatatgttcagatcatgcttgcgaatcacacaaactaattaagaagcactgctgattccctgtattgataaaaatgggatctttgaattggcaaactgatgtgatacatgtattacattaagtttttgaaaaggtcaccggccggggtattacatcaggtaatcaaagggaaacaaaccattcggccatcttgttaattacatcaaaaatcaaaccactccaatttctcacaatctggcctccaggagtgtatgatcattgttcgtttatcacgcccaaaaatcaaaatatatagctaaaattgtggatattccgatcaaaccttagctctagacgaggaagcacgcgaaaatacagttaattggttctgcatatatcaatacaagcattaattaaattaaaaagacaacaagaataacaacagaagttacaaaaccagacacaaattaaggatcatttgatgcatcatctctgtatgatccatggctctgaacagctagattacacactggcataaacactgtttgccccccaaaattattctacgagttggttgggattagaggagacccagccccggcgccccggcctgcctgaccgactgcctgccttcttgcctagcccccgggtcaaaggggcgcggtgggcccatctgacgtgggacccacacggccccccgggccccacccgcacgtgtcctgttttgctgagtcacgcacgctactactgtctactgtgttcatgctgttcgtcgctacgtacgatgactactcgtcggtgtgaactccacattagctgattaattgtgtgtcatatactatgtaaattagctcgatcgatcgatagatagttttgctgcgtgcgaccagcgatcgcccacggaatcagaagcagcggattaattatctgtctcctcttgagtggtaattaacgcggtttaatggtaatatagtcgatccgtttgatggtttctatcgtttgacttcagaaatcttcagagagaacttaacgcaggcaggttgctgccgtacgtgcctgtactacatacaaatacaatgaaattatgcaaaaacactagttcaacaccgaagataacaactaagccccatatgatatataacaattactacctttcgtctcaaatatagaaacttactccttttatgattttataatatagtaatctataagtatcatatgtatatgtgtgctacaaacctgaatatgaaaagtgtccaaattcattataatagaatgtgtcacacacgatactcatagattacttatattataagagcgtaaaaggagtaagttgaaatagcacacacgatactcatagattacttatattataagagcgtaaaaggagtaagttgaaagaagagctgaagaagcacagtaaaacctactttcctggacatttagagtactgtcatcattcacacattgatcatttcttcattatatttctattctcctattctcctagtcgaatagcaactcggtcgcgttgccgtgataggcgatagcttaattttgtccacatagctgaagagaccacaccgtcaactactgttgcatgcggcgacgacgacgacgaccacgccgccgggctagctagctaggctagcaaacggccggcgaggcgaggcgagcgagcgcacgcgtacgtggaaattacaagctgacaaaaggccgatcgcttgtagctgacgacgcccggttggtacgagcgtcaccaacacatttccgagcctccccttctttgtctccctcttatatcatcatccttctccttcgcccttactttcatggaaaaaaaaaacaattaatccgatcaaaattaaagcccaaaagttgagatagctagctagctcatcaggagagagtgagagacaatatccagcttgctaggtagctagctgccgtttgcgtgttcttctttaatttcttcgtcgcataatctgtctcgtctctgataaactttttatcttctttttttgggtggtcatgcatgctgcggccaattcgttcttgaattcgttagctactccattccatatatagattcgatcttgtcctagctagatacctagctgctgctgctgcttcttcttcttccttggtgttgaatttggttcagccgctgctagctatagctttgcgcggtgttcgtagggttagggtttttgctgtgtgttcgacgatggctatgggaatggaaggatcgggaggaggagggtcggcgaaaaagaaagaggagagcttgccgccggggttcaggttccacccgacggacgaggagctcatcacctactacctgcggcagaagatcgccgacggcggcttcacggcgagggccatcgccgaggtcgatctcaacaagtgcgagccatgggatctcccaggtaattaattaattaattaaacaaacatgtgtttgcatgcatgatcttgtgaaattttatatgctcctacttaatatctccccttctctggctctctctcctcgatcttactcacttagcttgctttcgctgtggattagcttttgtgttcatatgatcatattgaataattcatttttttcctgcaatatatgaatagtttgtactacatatattcagaagtgcatgtttgttgttggctatgcatgtatatgcatgcctagtccttttttcatgattttgagcatatatttcttacctatccttgccctgccagaggtaattagtcgcgtctagatttcaaacatgcatatatggtgcaagtttttcaatagctaatccaaaagtctaagctcttaaaactactacatgtgtgatcctaaaagaaaactatgggatggatttcaagttttctatggtattccttttttttttccttactgagtcttgcttgcttaaaacatgtgaatatgatatcattggtgatataatatcttggtggtacacatgcatatataacatattcaatcccccttctctcccttcccttctattagtgtgagtacgtatatctataatctatatttgcatcgtctttgttctcttcttttttaaaaaaaaactttcctgcaagagttggtggttaatttggaacacataaacttcttattgttatttctaggggtcttatattagaagctatcttaattctatgttctttataaaaaaaagtaaaatatcaacagaaattacaaaccaaagctctagcttcagcactgtatgtgcatatgcatcgtccttactctcatatatatatgtaggagatgtttatgaggttctgaatgttcaaatatgtggtcacattttttcacacttacacattcacaatctatatgttctatgtattaattttctctaataaatgtgctccagagaaggcaaaaatgggagagaaggaatggtacttctttagcctaagggatcgaaagtacccaactggcgtgcgcacaaaccgagcaactaatgctggttattggaaaacaacgggaaaggataaggaaatcttcactggacaaccaccagcaacaccggagttagttggaatgaagaaaaccctagtgttctacaaaggaagggctccaagaggtgagaaaaccaattgggtcatgcatgagtaccgactccactccaaatcaatccccaaatcaaacaaggtaaacaattcaattgatagtattttcaaactcactactatacacatgcttcactaaatttacttgtattaattgaaatgtttttgtgatgcatcattttgtttatactcattatatgacaggatgagtgggtcgtctgtcgcatatttgccaagactgccggcgtcaagaaatacccctccaacaatgctcattcccgatcccaccacccatacacactagacatggtcccacctctcctcccagctctattgcaacaagacccatttggtcgtggacaccacccttacatgaaccccgttgacatggcggaactctcccggtttgctagaggtacgccggggttgcacccacacatccaaccacaccccggttacatcaacccggctgcgccttttacactatcaggccttaacctcaaccttggatcctcgccagccatgcctccaccaccaccaccgccaccacaatccatcctccaagcgatgtcgatgccgatgaaccaaccaagaagtactacaaaccaggttatggtaacagagcaaatgattccaggactagccaatggtgtcatcccacagggaacagatggaggttttaccacggatgttgttgttggaggcactggcatcagataccagaatttggatgtagagcagctggtggagaggtactggcctggtagttaccaaatgtagtcctgaaggaaatgcttggggtactgccaagcaattgttggtctattatgtaggaagacataattatttgagctaccttaatttagtctatggatattgtatgattacttagctaatgttgtacccttgctttttagtttctcagttctcttgtacctctagattttgttttggttgtaacttgtcagattgtagaaactagaggactgtttgtttgacctgattgcttgtacatacaccttatatattagtgatcagatcatggatagtgctccgctgtgagattgtgaggggtataggcacatagacaaccaaagtttaaggctagttcgatttggaggaatttcacgggaattttggagaaatcgacctgttttctgtgaaaatcctataaaattcctacgttccgggattaatcaagatgatgcaaggatggaagaggattattcgaccagtatgtgcacgctagctgattgcattattgttactcgagagtttacgtactctttggcagtaaattaatcaatatgatgccaggatggacgtgcaagatagatttgtacagaatgggcataataagttagcgcaaccaatttcaatcatcaaacgtctgaaaagctcacgtatgtacgtacgtgcatgaggaactagtctcagaagaagaagtagcagtatacagcactaaatcagggcatgccatgacatgacataaaactatcagagagctgacacggattcattcatgaattgcgtcttcatgtagcaaggaggaagagaaaattaagaagaacagaaacaaaaaaaaaacctggagtaaaacaaagctgtacaaacttcagtgcagaaacaaatctgagatctcgagtggcaatggcggcaacaaagaactagcaaggtagcacagcagttgaaacttattaacaaggaagcaaacgattccagactgagcggtggagttctgttcgcccggtgtgcctgcagttcctgactgacttaaatttctcgccgggccccggcgtacggaagaccttgccggcggcggggggcgccggcgttgaagggggtcacgacggcggggagcggcggcgacgtgcttggagagagagacggatggggcggttcaccaaaccaggcgaacgacttgttaggggccgtttagtgtgacgcatcctacttgggccgaaatatgttggcccaatttcggatctccaccgctggtagtggatccatattcgggtgggctcaaagcctcaaaactctggcgagccaaactgggatgggccaactggatcattcagtggtactattacggaataagttcaccgaaggtctcccaacttaacagcgatgttttttgagctctcttaaccacaaaaccagaaatgtttacctctaaacttactaaaatcgttcactcaaggtcctataacagtatatatggatggtttcgctgacgtggcatcctagtcagtatttttctaaaagtacgtggggcctacatgtcagctgcacattttttttcttctcttttctctcctctctttctcttcttcggtgagagaggccggccgcaggcggagcggtgcacgcagatgcgggtggcgcatctgagggcgagcgcggcggcggcccgagcagtggagcgcgagcgtggcggcgggcgagcgcggttgctgccaaaaaagcggagggcgagcgcggcggcggaacggtggagggcgagcgtggcacacgattaactgcatgatgcatgcacactgtgcagtatgaacatgaccgattgatttaatttggggtacctcctcggtacgtgctgttgctatcggtgaagcagacgtcgccggtcctttggtcgacgtcgaggccgttgtggaagttagaacggcacgccggcggcctccgtcgtcaccacctcggctagcccgcctcgcaccggcgccctcaggaggcccaggtacgcgtcagccacgtacaggtcgccggaggcgtggtggaactacagccccagcggccggtcggccgcccgcacacgctctccggcaccaccagcttcttctccggcgagcaaacaccgacgctcctagtggtgaacaaatcgtcagtgcatacagcagcggcggagggagaggaggcagccggcgacggcgagctcggcggcggcgagctcaccttccgacacatcgcatacagcgccacgagcgccagactggccgaggcgtagaaggccagcagcggcgcggtctttatcccgtaggcgtgcgcggcgcgagcgggaaggaaggcggatgcgcggcggcagcaggaaatgacacaggagaggagctcggcgtcggggcgaacgaccgcggaggtggagaagagggagagggcctcccgggggcggcccgtggcgggagagcgcggaaagggtggtggtgtaggacgagtaggcgaggaagggagagagggtcgacggggagagcgtgtcacttgccggcgacagggcccgaggtcgagcacccggcgcgttcgaatatctctgccgctgagcttgccgtggcgccggacgccacctatcctctcccgctgctgctgtcacattggccgcctctctccctctcccgccgctgccgtccccgctccgccgccggacacctctccccttctgttgccacgcctgctcgagagaacctggagagaagagaagccaaaagaaaaaaaaagagagaaatgtgatacccacaccattttctcacttacatgtgagccccacatattaattttaattatttttgctgactaaaatgtcacgtcagcgaaaccaggcttctatactgtcttgggaccttttatgcacggttttacatagttcaggggtacacatttctggttttatggtcaaggaacctcagaaaatctcggtgtaaagttgagggacggccggtgaacttattcctactattactctttggcagcaaaaaaaaaaaaagaggatcgacgtgagaagtagattagatctgacagccagattaatcatcatgtctccagagcttacatgcataaagaaccaacaaaagtagtagcaactagcaagctccacatccgtgcatcccatgcatatcagaaagaaatcaatcacagcctcgacgctgaattctgtctgttaaacatgaagaagtacaatactacagtttcagtaagtgagagcccagaaaacgaggcagggattacacaaccacacacaagctctaaggaaaacgcatgaacaaaaactagaagacatgaccaataaaatgaataagcacatacagcctccatgtccactaaatcctactcagcgaagggcagatcgacagttacagaaccgcaattacaactaggtccatacatggggggcaaaaatacatagttcttgtgtgatctagtgtaactcgttaataatacaaaccaatgcttagcgatggcccgggatatcctactctgtatgccatccgagatctgcacaaatgcacagtacaaatcaatgtcaagccaatagcagaagcctataataatctgtttaggcctttataaacctcactctggtctagcttttagttcgaagtcatactgacatttgtaacaaaaatccgttcaagcatactttctttttataccgtatgaattgagaagagactctgtaacttcagagaaaacgggcaagcatatggttcgattgatccaagattccatgccacaagcagtatatcgcgagctagagcacattacatgaatcggattttaccacttaaataggaacaaagggtgcagtaccttctccaactacaatgtggcagaccagacatgaccaaaatccaacatatatggtctatttgtcagcatgccggcgtttgtgtttccgatggccatggttagcattaacattccgtgtggctttcttcttcttcttggagctacaaggaaatgaaaatattaagcttaaataacaaataaaaaacagatatactagctgataagcaaatagaaaacagaaataccaaccagaatgtttcaaccaggacattgtaaaaaacataaatgggcataatcagcaaagcagaagcctgcaaaggtagttaagacattatattatggcctttcatacttaaaaccacttgaagcacagttctattagtgccctaccaggtaccaggccaactcttcagtcgcaaattcttttgtcaattcatgttggtgcaggtagtccaagacagttgcttgagcctggaaaaagaacatatctgagattccggaatatatcttgaaaccgatatgtagtgtaccacacagaagaaatggtattccatgcatctaccaaacagtacacaatatatactgtatgcaaagagaacagacagaatgaggtttgagtatcacgacactgttttgtccaatcaattagctaaggaaattttggaagaacttgcacaaaggaacatcacactatggaggtgattttatccaagtacttgtgttacatccatagcatgaccaacaccaagcatcaaccaccagaaataatagaatttggagcatttataagcattaaaatgaagaactctcaagaggtaagacctcagcagtcactagggaaaatgcaccgaatcactattattacaacaatacaaaaggtgtgttccacacagtcttattctccagtaggataaaaaaaaacatatggaactatggaagttacttgacatgctactaattaagatcaatcacagctaccctaagaagcaaagagtttctgaattcaaaagcaatgggggaagtatggcagaagcataaagtatgtaaaccaataagctgcaatgcataggaaaaaatggaagggaaaaaagaaataacaatcacctgttgatgataagctgtagccttctcaagaaaatttccatatatatggactgctctttttgtataaggcttcaaataaattctaattttctcgacatgtggcttagtggccttagcaacttgatcaatgtaaggtttggatactttcttggcttcctgaaaaaagacgcaatcatctgattataaatcaatgattatatatactctaaaaaagaagctgcctcctatcctatcataatcaaactgcctcctggcatgtacaactgtgaattcttgaaacggcaggaccttagatgtacctggaagtagggatcagcaatcttatgtgctttcacaacatgaggtaagacaacatccttagatgcttgatagagctctatagattttgctgagaccttttgcacataaggctctgcgtttgtcttcatggtaacccatttttccttgataacaggtatccatttcttcaaaaggtaaatgccattgttagtgaaagatgatcaaagagtcaaaaacttaacagacttgtgatgctatatcacgtgataacatcaagagttgtccataaatacgtgtgattaatgcaatttttaaaatatctcagttttactctgcaaccaatttcttgaactgcagtatcaggaacaggtaataatattaccgtcttggcagcttctacatgtggctcggcccatttctttgcctgaactgatttctctgatgcctgcagtgatttagttcacagaatataaacgactgcataaatgacataattgacattttcaatgtttaactaaagtaatatgctcggtagcaccttctgcaataaactgttaacagcaggtttcccatgttcattccagtgacttaacatcatttcctgcacaagtcaatgactgatgagaacaagcaaactaagaagagatatttatactttatcatcagttataccttagcacgagctgtgtgtgtcactaaccaaggtggcaaccaagctccatgaacctgcataagtattaactggtagttcagtacgacacttattgcagtgatcagactgaaagtagtaggtgacttccatgtaacaatgggaagattacttttgtctcatttattctacagatgtaataggggctctaccctgttaatctaaggaaaacaatagaaatattacactcattatatgctcaatcatcatctaacagtcaggagttcctaattctcaggtaccaaatcatacatgatacattcataataaggttcagtggttagaagagtattgcgacgcacaattccgtcagaatttaacagctgagatgaccaactaggctgcattttgaacatattgttcaaaagtcaccggtacccctcaagtccagtttaacattggtttggatggcatgtcaagtttgcggagtaaatagctagggcagcctaaagtctgagtaatgttatcttactggcatagaacaaatctaaatcaaaacagatagcagatgcagaagaagaatatttacctctttcagctgatttaattgtgttgttgtttctaactgcaccctcataagctcctcctaagaacatgagaagcaaagactgaagagaatggcaccaagaaactatatcagagtaatcgcatcgatacaaacctctgcaactttaagagcatgttcagtcttctgaatcctacgcttttgctcatcacttgtcttttggagctattaagaacagtataatataaagataaggagaactgtaaccaaaaaagagaggtgctgtaaatatattaagaacaattaaaatataataacgttattcaacagataattaaaagatcatgaagggatatacccatgtttccaccaaaactttttaacaggagagcgaaagaaatgaaaacatacaggctcatctagcctgtatttgaagttacttcatgaagtactccatcaacttttggcaataccgtgctagagaaatatcaccttaagttttcacaggaatgcattgcaattcaagatattcagcaaatgcacgtgtgcaaattttctttgcggaaataaagaaatttaaaaccattgcagtaggaataaaaaatcagggcagctgcatacttactttctccagcttagcattcagctcttgcaccttcttatctgcatcaccagccctagcctccacagttgatttcttgctattttgtgcttcaatatccttcttcagtttttcaatctggaagaggttgaatcagaaaacacagtatcctaattgtcacactagaaatctggacaaatcatgcttccgctacctgcttctcaagctcaatagcccgggcattggccttgcctgcctgctcctctgcagctaaagatctctttgtctgtatatgacatggaaaaggactataatcacttcaagagtgtaaaaaaaatgcttcaaaagtattatcttttgtcaatagatacctcaagtgaagttatctcactctgcagggtagcaattttctttgacttctcctcaataagcttttccagcttctggatgccgtcatccttgctcttcaactcctgggtctgttttgttatgctcgactctgcaggatgaaaataatcaagctcttctacactaaactgatgtcttttggaagaatcatgcggcatgcatgctttaaatgacctagtcgaaagatcatatgattcaggctttataagaaagcccgaaaggaggtccatatagaattaccagaaattgatacaatccactctcaagtcacaacttatcgagactcggtaactaaatatgcatctgctagggacatgctggtagctaacttcttcagacttactggattccctaatagcagaagcttcctcgagcattataacctagttccaagcaagggtcactcatttcacgtgcatccttttctagactgaaaattccggtacatctcacgggaaattcatgacccgttacaggccaaatcagcaaatgcaggtaacgaccacaaggcttttgctcagaattgaaaccatttaaggagatactcccagaacaacctagcattcctccaacaattccaaatcagcatcaaccccctcactctaaaccactgaaaacacctaagcccccattccaaatcaccaaatcaccgaatcgctccccacattgcccattcaatcgcgtaagctccccctagccgcccgcatctaaacgcctccaaaaccctaacaggtcaactaaaacccatcgaaccccaaatgaagcagcaaaagcggggggcgcataagcgtcacgaattcgaatcgagcgtagacattacacgcacgcacctaaggcggagatcttcgccctgagctggcccagctcggccgcgagcgccgcctcctccttggccctcgccgcggtcgtctcctccgccgccacgtccccgagccccgcgttctgcgccaccgccgccccggcgacgagcgccagcagcagcagcagcctcgcgatccgcatcgcgagatccgcgcgaacctgccttcctccccgcctcggcgcacgcggcgcggaaaagtggagaggagatgggagcgctcgccttcgcctcgcctcgcctcgctcgctgtcgctttctctctctctctcgggtggccaagccaacgactcgttttatatggagctcacgaggggagaggggagcacgtgggcatggctggcactggcactggcacagtgcggcgcggcaagtggcggtggccggcgtgaggcatggggtcactgcccggtgggccccacccaacccggccagcggcgagcggcaccggcgttgggagagacctcggccgcggcccatttagagcccatcaaagccacaccccactcgcctgtcttaggtgggcgacgcgcggcaccgcaccggcgctggaagagacctcggccgagggcccatttaaagcccatcaaagatacaccccacgcgcctatgttaggtgggccgggcccacgggtaagggagatttggcccatttaggcacgggaggtagcgaaagaggaggaggagccgtcaggccgtcagtgtctttgctcctcttttttcttcttcttcctccgccaccacccgactcggcggcctctgctcctccgctcgttcctctcccgacaagggtgggtgggttgggttggggtgggggttcctggtcctccacagtccagggagctgagccgcgccgccggccgcaggtacctgcttcgtgccgccgtgcccagatttcttgtggttttggcgtgggcgtgttgttcgtctttgattctttgctttatccgtctagacgggtgcggtttgggtgtggcggtgtgcccttccccttctcaatcgctgtgtgatctctgcgttcccgtgcagaggattctgggagagaatcttggtaggaacgggttgcgtttggtgtggttgcttggtgtcgaattctgtttactgttcttggttggttggttgattggttgcctggttggccggcctagtcggttccacacttcattatgtttgtttgtcatggggataattgttgatcaagctaatgtttgcagtgtcataattgcaaatcccccgtttctcatcttatagtgcgtagtgcgttgtttcatcttaaggcagagtcacagagatgatttttcttacatgtccatgatgtgagtcttctattgttgctctgtgtaagtactaaagtgcccaaaagtccaatttctgcctgattcggcctattctatgctgtgtttaacaaggaaatatattgttcttgctccgatttgttcgtgtggttggtcagtgtaacagtgttcatagtaatgcataaacagttaacacaccttgtattggacaattgttctgggtcactagatttcaggatttcttaaaaaatatctatggtttcaggatgtcggatttcttagggaaaaaaaaaatctaagatcatcttttctctcagatggaatgtagagagcttttctgtatgtgagtaaaagttttagcaactataattatgaaacacccctttcattcaggcttgcttttgcaaagatgtttgacaataaataccatttcttgaatcatagagtacagaagtggtcagcttgttgggcactgtgaaggatctgttaacctctgcctatatcatatttttgtatctatttatgtcattgatattatttggcaatctagtttcctaaaagaatatttgtcaatctatttcttattgttgatcaacaaaatgtaatttctaatttctaacctttattctttgtttgttagccttatgacagacaggaatggaccatttggtaggctccctgaacatctccttgtagaaatatttatccggttaccaacatgcgaatgggttcaaatatcatgtgtcagcaagcactgggcaagcatatttcaaggagaatgtatgtggcaaactgctattgcaaggaactggccatcagctggtttacggaaacgctggcctgggccaattcccagaggttctgctagaaggttagttttgtaatctgatgttgcatatcttctccatcatttgatggtgttggaaattttaaagttttgccagagtctgtctgacgcatgattgcttgctgctgtatttgagtatccactttaaaacaaatacacaaatctgaaacaagatgaaaaaatctcagatatcaaatggtttgcatcaagtttattaccttacgttcctttagtaacatgctttactagatgcctagatctactttaagcagctgagtttgaagcggcataaagagctgtgttccgctatgcatgctcactatcccaaaatcttaagaatagcttctctcttcggatacgatcttccatctgaacattcaataaaaaaaagtatctctcggacatttataggagattccaagcattatacgtcagccagaaccttgtctcatctggtggggatattgatgaacttgttggccacacttatctctatttgaaagaacagcttgagcgcccagttgttgctccttccagcatactccatggcaccatcatcggtgaggttttctgttccaagttccaactagtccaaatatagagtttattgtagttcatgtgttggcgtgctttttgtgttgagtgatcattatgaaaatcttttctcaaagataaaacacatgggaaggatacgattaaaccatgtcaggtacaggaaatttcgatagcacatgttttgtgtctgacattacaggaagaaatggttgatcttgtaggattggtaacaatagtatgaactcgtgattcaattgcatggcatgctgagttactgcaagatttatgtatgttcttacttttttgagaaaattttgttctccaataaaatgaaacctgggcagattctcaaacaaatgaagttcctatttttcctaagtggattcgcgtctcaaagaggcctttaaagctgcttccgatctaaaactgataaccatggattgaattttgtggtacaatgagactcattttcagcatcaagagtagagcttcatcactgagtattgcttatactgacgttattggttgctcacactgaatttaacattgcctcacccttctatgtacagatcagttcattgcttgtggtaggacaggagaaaaggcacatgaacttgcttcaaagatatggcttgcagttattgacaacttggaagaaaaccagcaaactttcttgctgttaaaacacctttctcaagaaggagaagtaagttcagcgtcccaattttatttatgacctgtgtactcacatttgacatgtcaatacaatggacgtgtcatccctcccttttccgtaagttatcaaaaatatctcttgcgtgaaatgatgcatttcatacttcttagggcctggctaggtgcatcttcataaaatagctatagctactatggtgcattctgctgttatttcgttactagaataaaagtaaataaaatgaatgtcatatttgatatgcaactgtgcaaagtgcaacaacttgctgaaaactgttatatttcgctttctgcttgcagtttttccttccattcccatactccagatcatataaagtcttgtggagggtgttcgacaagctgttcaccgacttccgtgactgcttcagccgaggggattaccatgatgcactagcgggtgccaagtctaggtttcagccagtaccatctgcatggcttggccactgacgagcagttgctgctcttgttgtgcactgcacattgccttttagatgtagcagctatactttctgaaatgcaaaactggaccgaaggatggtacttccattccaatggatgatttgtatatcttttagtgtcttagcaacttcagaaacaccaaactgttgtctgatcgaaaaatatattctcttgtaaattctaaacattcagaattacccgacttctccattttcggcttatgatggaacttattatatgaactcttacctatatcaagtcagatgtggggtattggtacaaaacttttacttgaatacaatgtgtgctagtttctatacagaattcagtcctctagtaaaatgataaatcggtgtgctggaggttaaccggggatcctctagagtcgacaaacaggttccaatatagattcaaatggcgcatc

SEQ ID NO: 16470 - DNA, 2663 bp, Oryza sativa
  unsure (1)..(2663): unsure at all n locations
gagacgagcaactcaattattgcttaaactatcggaggagggcttccccccggcttccgggcggccaaagcaaaagatgcttccttcacttcaacaacggactgggatagccgcggaatcgaccttccacaaggccgggatgggaaaatacggcttcttcaatcccaaccaacgggacacctgggtgcggttttttttaatttaaatcatcatcatcatcttcttcttcttcttcttcttcttgtggtggtggttgttgttgttgttgttgtggttgttgttgttgttgttgttgttgttgttgttgttgttgatttgaggtgtttggtttgagaatgtgggctctaatggtggtttcttgtttcttgatttttgtttgttggtgcagcagcagtggagtgcctcttcgagaccctccgctgcctccccggtggctgcgagcgcggcgcctccacctgcatctcctgtagctggttcatcatggaggacgacgaactgtcagccagtgtgccccttttgtgaatgatatgatattgttgtatgataaattcttgccatcccctttgtgaatgattgctatatgagatggtgatgcggtgatggaggataatgaactgttggtcagtttgaagtttttgtgatgtggtcagtttgaagtttttgtgatgctgtcagtttgatgatagcaagcaccaccattgtagggttttttcacacctgtgacgggttgcaatctatttttctttttttttgctggattgtagacatcactgacagctcacaaattaatgggccgtttgagataatagttacctgtgacgggttctatacgtggcccgtcataggggctggtcaccactgacggcctttcacccgtcaaaggtgaagagagttatcactgaccactgatctctgacgaggggccgaatccgtcagaggtgatggtttagacccgtcacagctagcatgggccggcatagtggaacggcatcccgacgtggaactcctcgacgtggagggcgctctccaggccacgcacgtcgcgggcgagctcccggagcgggcggacggcgccggcgccggcgcccctcagcgcggccgccgcatccccggactcgtgccggaacctctcgcgctgcgcggcggggctgaagtccgtggcctcgtactcgaggagctcctcaaggctcgggaaccacgtcggcatctcgcccctgagctccgcggtctcctcgtcgctcatccccgcccacgacgccgacctctgatccgctcccacgccggagcagctgcgctccacgcgcgcgcgggacgaacgcagtaggggaggatgaggacgcggcggcggcggcgtgcgggtggcgaggacacgggcgcacggcggcggcggcggtggcggccggccggaggaggaacgcggcgtgcggcggctgtcgcaagagatgttcaccgngcgcccgccatgatcgatcgatcaacgtgtgtgcgtggttgaccgatggatcggattcgttctgaccgatgaattcacctgacaccgtatatatatatcaagatgcagcgttcaggattccattatctaaccgtgtatcaaatcgaccccgagcagaagtaacttcataattattagagttgtttggcaactacaacttgatgaaacatcatatggggtcgtgggtgttcaaatcctaatgcttatacatattgcgcaagaaaacgggtggacgtccacccgagatattaggatccatctcctcttctttgaagttgtgggtgttcaaatcctaatgcttatacatattgcgcaagaaaacgggtggacatccacccgagagattaggatccatctcctcttctttggctttgttctccaaacgctgataggttatcatctagcttcctaaaaacagtctgaatttctgccaggccattttaaggcgtctttcgggcaacataatgtataattgcatataagcagtcgtattcttttagccaaaaatatacagtaataaggggtgatacatcatgaaggcaaatcagcatcagacatgagaactatggatgttcatatcctatccaaccttacctgtgaaccaacgcacccttagtatatttcactgacactcgatccctcttgtctactcgctatgcaaccctcctctcgctggtggtgtccacaataccatggtgttttcagcttttttgaaggcgttggcgagtggcaacattgttggtttggtcacgtttagtgacacatagcggcaatcggtgcagttctagccctttggtgtgtggtggtatgttttttcacttttgatttcgctaaaaattttggccattttggtagacccaaaattttgacgcttttttggaccatctttttaaaaaagaattaacatactttaattgaatttgactaaatgttgaccaaactcacaaaaaatggagaaaaaccgaaaatttcagacgagataataacttggggtggggggggggggtccaaagtttcgaactgaaaatgcaatcattgacaggggggtgttttttttttctgattataggctttcaaagttataggcttttttttttccatatcaatatgaaacatcgtgcactgtttgatcttggtcggtttaaaaaaaaaaatatttcacctgcataaa

SEQ ID NO: 16471 - DNA, 1424 bp, Oryza sativa
  unsure (1)..(1424): unsure at all n locations
cgctgcggatttgttagactaactcgattgactacaggcgcgaattcttctttgtacccctatcagcgccagcattctcctatcagtctataactagcgaccatggccatgtttggatctgaaaacatggcagcctgagctttctgtgcttcctctttcgggacatgaagcaatccgttttcctacagcgtactcaagaaaggtcaaaataacacccaaaagataatactcgattcgttagtggagtaatgcatgttagtatcaaatcaaaacattcagcaggcacgaagtccatcctgagatttcttcaatgcagattacaacatatactgatgatgtacagtctctaataactacaaaaaggctagcctttacaaatccttacttaattgggacagtacactcagatgcttcaagttgaattacctcgttagtgtaataaaccttgcgtgatttgaaggccttggccgggatgtactgcgaattgatcctcaggttcctcgccctaattaccacttgcctgtgaacaagcaaaaaccctcgcatcaacatccaaacatgaacaacatctgaacatgaaaaaaaacagacgcaatacagcacgcgacacgctcgtagaggctaaaattctaggaaaatccagcaacggggaggccttcggatctaggtctcgcggcgtcagatcgagcgaaatcggcgagcaaaaacagatcgcggcaggatcgagagttggaaaagcaacgaaccccttcttgacgagcttggggtcgggggagggcgacgccgacggggagcgcatcagcttggcgacgaagtagcggagcacgccgatgagcaccatcaccacggagagcgggacgaggacccagtcccggatcgccgtgtccagcaccagctcctccgccatcgcagccggcggcaaaggcctctcacgctaaggctaacccccccacctactagctgcggactgcgcggcggagggcggcggcgacccgggcgacgccgacggcgagaggagatcggggtagagagagatcgccgccgcgggtggattgggccgatgcggaagaggacgcgacgcgaggatattcctagccaacccgcctggttattgggtaatgggtcgggtcgggccgggttcttctcaccttttgggctccgctggaggaggaggcccattaggtttggatattgggccgagttggattttttttcttggaataagttccccggaggtccccctcaatttaacagagagattttttgaggtcccttaaccacaaaaccagaaacgtctacccctaaacttactcaaaccattcaccggaggtcccttgacagtatttttgcccggttttgctgacgtggcatcctagtcaacaaaaaaaaatannaaagtagggtaggagtgttctaccgccagg

SEQ ID NO: 16472 - DNA, 9718 bp, Oryza sativa
  unsure (1)..(9718): unsure at all n locations
cctacgctgcctacggtctactgccaaacggccgcgccacaaaaccttacccacggaaacgaagacggtgaaaaccagacgacgacggcggccacggggcggggctgctccgcctgcagcctgaaggagaagagaagagagagtaaagaaaagagaagaggagagaaggagaagaaaataggagaaaaaagatgtgaagctgacatgtgggccctatgtgtttttttaattttttttttgctgactaggatggcacgtcagcaaaaccgggcaaaaatactaccaagggacctccggtgaatggtttgagtgagtttaggggtatacatttctagttttgtggttaagggaccttaaaaaatctcgctgttaagttgagggacctccggtgaacttattccttttttctttttccccaaaatatggcccatattcttctcaaagaaaaacgaggcccatgttgcgcaatacgcacactagtattttttttctttagtttttttttcttcaccagattatccccactttcttaggtcacgagatcctaacaaacaaaacaaattctaggttggtagacttctatctgttttttttaaaaaaaaatgagctttggtcaaaccagatattcaaacaacccgttgctgtctaggacttcagttacaatgacacagaaagtgaaatttacaggattttgaggccgaattcttcgagctcggtatttggcaatcgttagacaagcagtcaagcggatagtcgtgtgcatgaacatacgtgtacgggggcaagtatcttatgttggtgatgacatgggcatgatgaacagttgaggacatctgtgacgatataaagtactgtagtcctctcaccgtaccaaggctttgttcatgcgagagaagaatatttgcgaaacgagaaaactcattaacacataattaattaaatattaattattgtaaacttaaaaaagagatttatttatttttttaacaacttatatatatatatacacacacttttggaaatgtgctaacgagaaagttgaagtttataattggagtatagaatggagcccatgtaggcaatttctgtgcaagaatccggcattaggttcgtgtttctttccaaaaataccgagtcttttgtactgtctagcgtagcaacttactacacactgaggttgactggtcaagtacatgtgcgagttttttaatttttaccccctttgcaagggaactacataatttgtctgagttagttaacgcatttaaatggttgaattgctatagggagacagctaattcaacacacaaatgcattgcctagctacccattttgttgacagatgcaatactagacatgtagatgtagtcaactatgatttggaatgaactatatagagttaagtgtttgcatgaacactttagccatagaaacctctagctaaagagtaaatggcatttgatctttttgctagtgggaagtggctagaaattatttatacggtctactttattcaattataattaatttagaaacgtatcctatgtacacaagttttccgtacgcaccaactagtaaatgtcgtaaaaaaatatataaaaggttggactcatactttcaatagtattacacctatgtgtgaaatcttatcttaaaactattatatttttcacttttttttgttacgactaaaatataatgaatttgaatacgagactttgcatatatgcctaatactattagaatacatgtccatctttttgaaaaaaaagtcatgatatttgatagttagtgtgcacggaaagctcgtgtgtacagtatatgttcccaattaactaagagtgtgttagaatgtgagtttgggctgggctaatacgcacttaccgtgagcacgcttcccaaactataaacaatatgtcgcgtgtaaaaaaattatataacagttatattaaaaaaagataaaccctttaatttagaataatcaatacataattaatcatgctctaataattaatcatgctctaatgactctcctctttttcgtgccagtattcagcctattcttctttcccaaatgcaacctaaatatcaacataaaataagtctgggcataatcactttgagtgtgagctagataaactatgtaggtaatgacatacgagtaaagcctaaaaataataaacgccaaacaaaaaggtaattatatgtgtagcatcccacctacaatacaggcaactaacctagccacccaccaacaaaatagatggtgcgagaccgacaaaatgcaaagcgccagtagcctcagatgctagcaacaacggttagtgttattgtcagcaattccaaaaggcgattgacgtagaaagtaaagttttaagtacacgcaagcaagagataatcacaacacaataagagtaatgtgtgcgcgcaccaactttcctatcagaaaacaaaatgctccaagatataccttttgctacacaaatatcagtatacataccaaactatcaacgtacatcctacatcctgtattgttctacatcattccatcatatatataataacatggaaatttcatagtaatatggagatgttctggaaaaaagttataaaatggagatgatcaaaatggctaaaacctatgtagtgcattcaggtaggaaaaacaacccaaaagaaacttgtaagaaaaggaaaaaactaccctaccctagggtacgcatagcaattctcctaggaccctagaagttgccgtcacctaggccaacgacgaggctacgcaccacaagcccattccggtcatttccccctccccaatccttccacccgcccatccctccccgcacatatctcaaaacgagggaaacaaacccgggattttgccataccattctcggggtggaaaggcagaggagggaggaagcggttagggggtttaaaaagggggatgcatgcaacgccttctcccccactcatctccacaccacggacaaagtagagggaggagaaaaacaaaggtagcaaaggagccaagaaaagcttagtgactaagagataaaaagggaaaggggagaaagagagagagggggtggagagcttggcggtgcgaggtggttggagtggggcacgcacgcaacacatgggagaggagggagagagagaaggatggaactagcggtgaaggcttggtggttggtcatcctagggtggcagtgcgccgtcctgtcatcgcaggggggagaggagagagagaagggtggagctagcggcaaaggcttggtggttggtcgtcctacggtggcagtgcgccgtcctgtcatcgcaagggtcagcgaaggtgaggccttgtttcctctaactcaattatgtgaacaacacagtttttatgtctataagacggtagaggtaggcattaaattatattgcacccatatcaaaccaatgtgaaaggggtggggtcagcaaaggtgagagtaaggccttggttccctaactcaattacgtgaacactgcattttaactcaattatgtgaacattgcatttttatgtccattttatgtgaacggtgcatttttatgcctataagatggtagagacattttttggaggcattaaattataccacaatcataccaaaccaatgtgaaaaatataataaaatattttccttttctattaccaatccttgaactcaagaccattggcaaatcattttatgttcaatacgctaaccaactcaatcccatatcattacttatatgtttgtgcattgtgttacttatatttagtcccttagtgtacattatcattctaagaagtgtctctaaagagtttaaaatgtctcaagaaaatacctttacatattagacacatttcaaagtactaaaaaaatgcctctacaaaatgtctctaaaaaaatgtgctgaaaaaatgtctctaaagtgcctctagagtgaaatatttttagacatttttcatgtgcctctaaaaagtgtctctacactataaaactcatggttttagaggcaattagcaaaacgcctctataaaagtgcctctacatgagatttttgttctagtgccatatcaaagtaaagcaagtccggtgataatcacttcaactatgaactagataaagtatgtaggtaccgacatagaaatgacaatgaaagcttaaaggtaagaaacatcaaacaaaagataattatgcatgtagcagttcacttgcaaaataggcagctagcgttgccacccgcaacaaaacaaatggtgcgagaccgacaaaacgcaaatcaccagcagcctcggttgctaccagcaacggttagtcttatcgtcagttccaagaggcgcttgtcgtggacagatgtaagtacacgcaagcaagagataagaacatcaaaacgagagtaatgtgagagtgccaactttcctaacataaaaacaaatgctctagggtatagctcttctcgatgaaaaatcaatatgtgtaccaaattactgatatatacatcgtacattatctagtaaatttatgttgttccatcgtgcaaataatagtatgggagttttatggtaagacggataatcacatacgaatgacgagtaaaacctaaaagtaaggaacgcctgacaaaaggtaattatacatagcacccacctacaaaacaagcaactaaccttgccgcccaccaacataacagatggcgcaagatagacaaaaatacaaagcacaagcagcctcagacgctagcagcaatgttattgtcagttccaaaaggtgcctgacttggaaagatttaagtacacgcaagcaagcgataaacacatcaatacgagagaaatgtgagagcgccaactttcctaacagaaaaccaaatgctatatggtatagctcttctcgatgaaaaatcaatatacatatcaaattaccaatatatacatcgtacattctctaatagccttgtgtcgttccattgtgcatataatagtacgagagtttttatggtaatacggagatactcttgaaaaagttgaaagcatggagaggataaaaatggctaaaacatacttggtgcattgagattgaaaacaaccgaagagaaattattttttttagaaaaaaagtgaaatatagcactaccctgcctaccctaccatggggttcgaatgcgagtttgggttgggctaaaacctcgcttactgcgagcatgctctccaaattgttaaataacacatcgcatgtaatatatatatatactgaatgtagcaatccacccacaaaacatgcaactaaccttgccgcccgctaacataacagatggcgcaagaccgacaaaagaacaaagtattagcagcctcagatgctagcaatagcggttagtgttatcgtcagttccaaaaggtgcttgacgtggaaagttctaaatacgcgcaagcaagagataagtgcaataaaaagagaaaaaaaataagcgtgcgccaactttcctaacggaaagaaaaagctccgagatcgctacaaaaaaaaaggtacacgtaccaaaccattaacacatgcatcctgcatcctataccactctatatcattccatcatatataatgataacatgaaaatttcatagtaatacgaagatgttcttgacaaaaaaaaaggttatagcacggagatgatcaaaatggctaaaacctacgtggtggtgcattcagatcagaaaaacaacccaagagaaacttgtgtgtctaaaaaaaaacaaagaaagaaatgtcactaccctaccctggggtatgcgtagcaactcccctgggacccaggcagaattccccctgccgtcgcccaggccggcctaggaacggccagggatcacaccgtacattaacgacaaggcccctcgcaccccacaggcccatcccatcccacccgcccatccctcccgcacgaatctcaaagcgggggcaaacccgggattttgccgcgccccattcccggggcggaaaggcggaggaggcgggcgagaggcgaggagggaggaggaagcggttcgagggtttaagaagccttctcccccaacctctcctcggactcaaagcagagagaggagaaaaaacacaaaaggcagcgaagcggccgcgaaaagctcgactcggagataaaagggaaagcgagcgagaaaaagagaggagaagcattggtggcgtgaggcggttggagcggggcacgcgcgcggcccaaggggggagaggagaaaagaagccggggtggccccgacgccggcggcaaaggttggttgtcctagggttcctgtcgttgctcgcgggaagggtcagcgaaggtgagggcctttggttacccctaactcaattatgtgtgaacagtgcttctccgtttgtgctctgtttatgtgtgtgtgtgtgtgtgtgtgtgtttattgaggctttgagtttttttttcttgagggggttgcttttgctgtacaggagaagatgatgtttaagtttaatttaatttaatttattttttttactcgctgcggtttgagcgttcgtggagtggtatgtgttgcgagcacacgggtgggtttgtggttatgaatgtgtgtgtgtgtgtgtgtgtgtgtgattctgtgcaatgcttgatcaggtggcgagttcctcacttcggtatgttttaaatttatcctttttcgggcttcgtttgatgttgctctgcggtctgcaccctctagcttggtttaggcatgagattgtatgcaaggtgttttctttttaaccaatttcgtgatttttgggctagttggagacttgtttctgttcagtaataagtatttggggcagtaaacttttcttttttggaagatgtaatttctgttttcgatgggcgaatgtgtgcgtgatctcaccagcaagtccccgcctttggtgtgcttcacgtggtgtcctccatggcctcatggggcaggtttctctaggcggtggattttatctgctgtgctggatcacaaaaaccatgggtaaaaactaaaaaatcgcatttatttggcattttgctatgatgatttcgatggttaaagttcttgagttttttttttctttttgggtaatggagcttgcatatttgcttgctttgtagcattacatgtgtagttagtctgtactcgtataggttctaaaattgaactgaacttacagaattcagttgagaaattatcactaaaaatgatcaccttttgttgtccagcaaaatggctacagagagtgctcggccgttgagtggaggaactggagcagggaagtggccaccaagcaaggacacgggttcctatgattctattccagctagcctttcagaagatgagttagcggagttggccttcatgccaaatagtggcggcatttttgggaagtggaggggttctgtcctggaacgcagtggaagcgctcctcctaccatggaaggttctttagttgcacttggtcacctcacaggtcaaccgagtggcaaccttggggccatactgccaaacttgggcactgaagctaacaattcagagtctaaggagaatatatattatgattcggcatgcgtcaaatactatatgtccaaggtgaatttgaacccaaggtttcctccaccactcgtttcaaggaaccagtttggcaagtctgaagaacgaaagccgttctcccttgatgacagcagcagcaggtccttacttcttggtcatcctactctgccaacacacaaggaagaacctgaggacgaaaagtcaccaagtttggattcaagttcagcagacgatgctcaatgtgattctgcccaaagcacatctaacttagggggccacagtccaaatcttgtagattcaattaaggtaattcccgtattaattcaagaactagctctgattgttttttccacatgcactcaaacaaacttcgtggcgctgttcggttgtgggttttgcagcagctgcacctggtttctgcggctgtggtgcacagctgtggctactagtagcagctgcagccgcagccaaaaaaatggcagccggagaaggctaatgttttcatccgtgacataactccatctttgtatcctcaaatattaaagtcaagaaatctttatgcacggctatacagtagcagtcggcttcacagaccacaagaatggcagtcagctaagacttagtaaggtgaaataatacagtacaacatatgattaatgccccctgtgatatacaaacaaacatttccaatattcagtggctaagacgttttccaaaaactcacttatttgaaatagtaactggaaattctgatttaaactaattgatctttattatgtagtatctgctaaataaaatcaaaacatgtttttgtttcaaggaaatgtgatgggaatcgcactaaaccttgcaattccttaatacaagtacgacaagaaaagaagtattgattgtactcctccataaacattgttatttaccaactctcatgcatgcagatgaactccctaatatcttataatcatgttctgttttgctacagagtttgttgctgcagtctgcagatacttattgataatgatttctttttgtttaggaaaactttcatcggagcaatggtttgtatgataattcttccgatcttttaaatgcaaactctggtgatggagggtcgatttattctggcattagttcattgaagaattcctcactttatgttgtccagtcatcagacttgaatggatttccaccagatgctcatcagcgttcccctagacctattaggactccagtcagtacaaaacttactagcgacagtctgccagcttcatctcctcccacttcatcctgttctgactacagtactattactgaagcttgtcagcaaagaaatccaagcatggccgttaaacctggtgaaccagttggtaccatgcttgatagttcagacttcagtctgaagaatttgaatattagtccggatatcctaagtagttcatatgtcatgcaacagtggcagaaaaatgccccagtgtggaatggcctatcaaatgtagtccatggcgatcatgtgccaatgattcctccaggaattaatcttcctcaagttccatttgtggacaattccggttttggtcatatgaagttccctggtgatgttcaactgatgtcccagatcgggatggcaacacctttttgtacaccaaattcttttgggataccatgttatcctaatttgcagtcgcctagtgtttgggttcctccattcggaatcggcggctatggtttgcctggtccatttgtcccacctgttataactaacttcactcctcaacttcctggttttccttcagcagtaaatcttgctgcagcaactgacttatttcacccatataagatgtatgagcatcttggggtacctatgccatcccctgttcctgatcagagccttacgcattattttcaacagccccctatccatccgtatggtgttggaaatccatatgatacaatggtttcaagtaataattttgtagggaatcctgctggcgtttttggttcaccaatcattcacccatcagagcagaagtttcagataccggttactactgtagctgctaatgcctctactcccatcaaaggtggaaaggggatcctctagagtcgncntgcaggcntgcntgggaggngttntcagtcaatcaatgacac

SEQ ID NO: 16473 - DNA, 11321 bp, Oryza sativa
  unsure (1)..(11321): unsure at all n locations
aggtgggttagaatcatcntcacnccagcacgccngcaggtcgactctagaggatccccgcaggtccaacattacatgggcaacctgcttctggaacatctcctcgtgacaaaaggaacgatgtcaagggattccaaccccctcgaaaaaatatgcctgttagttccgagatacaaggtcagaaagggagggagaagtttgatgatcccaaggcacacttttctgttgaagaactaatatccagcagaactcatagggttgagctggctgacatcaaaggacagatagtgaaatacaggttagttttgattttggttgtttcattcactatctagatgcacataacccaatgaaaagcttgagatattaattgttattatgttcttgtcctcagctcggaccaaaatggtagccggttcattcagcagaaactggagaattgcaccattgaagaaaaggatttactttttgccgaggtccttcctcatgctttggaattgatgactgatgtattcggaaattatgttattcagaaggtatagtatttccttttcttatatgattcattttatggtaatttttttatgaatagtacacctattgaacttgaacaattgtacccccttttaagatattacagtatcatagcagcaattatgaaaaataatttatatttgtatgaaatgaaaataacatgtagtacatgcagttcttcgaaaaggggagcccacagcaaaagagagaaatagctaataagcttgccggtcatgtgttttctttgagccttcagatgtatggatgcagagtaattcagaaggtagtcttgacttctttatgggaagtataactttatttctgcttaatgttttggataccatatcatgaaaaccttttcagtggcacactatagcatgtattgtctgaggcggtctgagcaaattttcttcacactgttatgctatccatagacttatttattctcaatatcagttggcaaagtattatctgagtaaaatttcttcagactgttattctatccatagaattgtttattctgaacatcagttggtaagttttaaagtggttagcctgtgggacatcatttctcatattatgcatggtaatcagcatacattcttttaataagttgcaatcccactgtagccagctattcatggattagcatgtgttggaaatgaaaaataatgtgacttataagttgcaatcccattatatcccgttattcacacattttacttgctatattcctggagaactcattttcagatgagttttgtgttattctcatatataatggatacatagaaatgctctcttactaccacacacagactaagtggttgcacattaatgtaattaaactgaatcacaactaaaaagatgaggaacacacaccagacaagacaagtagtcaatgtcaggttatgtgtgttcgcattttcatcattcgtcgtaagtttttattagcaattatgctatttagacagtcttgtgaattgtttgttgacactgctacactgtcttttctggacgttatcgctatttgaactcaaatgccaatttcactgcctacttcactgctacaattgcaggcccttgaagtaattgatcttgaacagaaaattgttcttgttggtgaactcgatggacatgtgctgcgatgtgttcatgaccaaaatgggaatcatgttatacaaaaatgcattgaatgtattccattggaacatattggttttctggtgtcatcttttcagtgccaggttgccaaactgtcaatgcatacatatggatgtcgtgttattcaggtgaattggtaacgatgttgtatttttgttaatttcttgtcattttcttgtggtgttgatcatattcacattctgcttggcagagaatcctcgagcgttgcagcaataattctgaatgcctttgcataattgatgaaatcttgcagtctgcttgcatcctcgcacaagatcagtatgggaactatgttgtgcaggtgattttcttcttattctccaaaacttagtggctgatttgactaaattttcattaatataaaccatcagcatcttgttgctgtaatacggatagctattttgagttagagcaagtgtaacttaagtagctgatgttgaatttggcaacctgcagcatctttgcctttattataaccatgtgtattttgcagcatgttttggagaaagggaatgaacatgaaaggggccaaatcatcactaaattggctgggcaggtagtgcccatgagccaaaacaaatttgcgtctaatgtcatagagaggtgttttgaacatgggggcagtgcagagcgggaacttttggtcaaggagattctgaagcaaactgagggcaataactatttgctggtatacattattactgtaactcaccttttgttttttttcctttgccattccatgctcttttgagccaaatagctaaaagctcttgtttgttcaaaatttgactaatgttaaactcaattaaaagatatggtaggtaccttcatgatccaaataattgagtaggagttttacttaaattgaaacatataacagaagcccgtcattttttttggataacagaagtaatcctcataaaattctggcgcggctactgtttctaaggctacttggtgcaatacaaataacggtgtttccagctatttttgtttcgttatttgtgttattagtctaaatctttactcaagtaagcgatttacgaattacctgcactgctatacaggtgataatgaaggaccagtatgctaattatgtggtacagaagatgcttacaacatgcaatgaacaacataaggagatccttcttcagtcgtgtgaaaatccatttgccattattgaagaaatacacctatgccaagcacatcgtcagcctagtcgagcgcctctgcggtgacggggagtcgtccgcgtgccactcctccagccctgctaaatttctcctcctgatcctctacttcaattggccccaaaatttactgctcccatatatgccatttttcaggagctgtgcagtccgaatccaaaaaaactgtaaccaagggctgctgaattcgccacaggaaagccgactcttttctgccaaccctgtcaagttcagcgtagaaggcctatcagtcgcaaaagtggctaacaaagcaaccaaaaaaaaaaactgtcaacctgtcaccatagatcatcatcatacagatatagtcgttccaagcggtttgtccgtgtatttaagctaggaaatgatagtgtcatactataggaatggtaataatcatctgtgtgggctgtggctgtggatgctgcgtctcacagaagagagtctgagtgtggtggtgcgttgccgtacagtacatatcccgtagtcttgagtcttgtacccctgcttggtgatgtgtagttatcgccgcatccagcttgcttggtcacttgcttctgtgtgcttccgtgcttgctcactggtgcgcgtgattgcgcctaccacctcgcccggatgcaaatcctctacagcactgtcgatgtagtaacaatggctgacatgtgggtccagacccatacgttaatatctagtgcatgagtagtactgcagacaatcccggccggcaggacgatctctcctactcccccgtcctataaaaaacgagtctaggaccggatgtaatatattctagtacaatgaatctggacatatgtatatccagatagtactatatatgtcacatccggtactaggtgccggccaatctctcctactccctccgtcctataaaaaaacgaatctatgaccggatgtgacatattctagtacaataaatctggacataaatctggacatatgtaccggatatgacatattctagtacaataaatctgtaccggatgtgacatattctagtacaataaatctggacatatgtatatctagatttgtagagggagtactttccatttcataatacaaaatgctttgacttttgtaagtcaaattttcttaaatctgaccatatttataaaatattatagaacatctataatactaaattagttttatttaatctagcactaaatgtgtgtttttttgaacactaaatgtgttttgatattgtattgaaagtgttgctacattattctataaatttttattgaaattaaagaagtttgactttaaaaaattcagaacattctaataatataaaacagagagagtacccacgcagccacaagcttggaacggagatttgagagaaatttcacaggatttgatagtattcacctgaagatcaggtagaggtacatgccaacattttcagccattctcgtgtgtaaaccccacggttaacacttagacaacatgtaattaatcaggcattccaaattagcgagaaacaacacatgctctcccagccaccagccaaaaaaaagaacagcgtctcctatctagccactttttcggcgtcatccagggtgggactcgaaaactgggaaaagatcaggaatcccaccgatacaagaatcttgtaactcattattgttttctacgttgcaaatatgcaatgcgtcaggttgcagttgctcgatgccacattccccttaagctttgcgcttgtccttgtccgccaaaaggatgtccttacaggcctcgtagaacatccaggtgatgccggaattgggcatcaccttcaggcagctggccccccacccgcggtagagccccgggaggccctcctcctggatcacttctgccagggccgcgatcatgtggggtgggcacttcccttgcagggcacccaccatgagccgcttccgcgccacctccagcgggaagctgattgtgcttgcggtcaggcctgcagattcaacagccagatatgagcaatgcaaccagctgtttggtcaaatttcaagctaacattttgtttgaaggagcagtagttttgcatcttcattgtatgtagatagtagagaattgcacaagtcaaaacaggggataacctggtacacagattttaagacagtgctgaaccggctaatgaagatggtgaaatgatatagatgtagatgaagcagaatcatttacctgacagagctccaataactagaagctcaggccgagtcaaagacgtcttcttatgtaagcggcagtaagaagtcttgattgtgtcgtacataaagtaatagcatgtgctataaggaagcatcccaattagtgttggacagaggccagcatagagaccacgaattccatcagttcggtatatcttgctgaaggtgacgctaatactaggatagacttctcggttaatagttaagcgatcctgtcataaaatatggaagatatcaggcgaagttatactgttccaaagaaaatgaatatatggaatgacaaatagtttttattttcaacaggtcagttcagcaatcaccttaatgacttcaagaggatgacacaccaatgtgccagctattccagcagctgcaccagctacagcaacaggagataaaaattgaagtggaaattcaattttcactttaccaatttgtatctttgggcatccatcttctttccatttctcttgcgcttccgccattgtccttttgacacactcgaatgttccgagctcaattgcttgagttggaataatacggatcatgttgattgtgttacctgcccaaagcccttgccatccattttgttcgatgatttctacaaagctaccaccgatatgcctagatcctactcctacaaccattcttgtcctgaaattaataacataccaacatattacgacacaggtacaaattagtctttgatatgcaacaaactgcatgcttgaacaacacagttgggaatcatatatctaaaatgatgtatgcatacagagactacaatctccactgctcataggaaagcaaacaatcctacaaatactggttatgttatgcactaaacaaagaatatgtttacacgtgaaaatgtgactattgaactttgagactagaaatatttcctgtttaactattaaatggtgaaagttggttacaacattaaactatatgcctcaaggagttaatttacagatgatgaattttggagcatatcattgcgatggtgtttgcaaaggttgtagcacgttatatcttttggtttttaagatttacatctaagttgtaagaccatgctcaaatgctttattagagagagagagagagagttcgatagatacctgatagtctcgagaggagcaagaacagctttagacatagcaccagctaatgctccactggcaaattctctaacctctcgactcctaaaaaaggcctgcaatgaaaatgaaagggaacatctcaaaaaacagtgtatattgtataggcatcaaaatcacccatggatattattaaaccatgcatatctgtgtgataaggacagattcagagccattcagttaagtacttggtcaaatttgttttatatagacaggcgggttcagaataagaacatttactacgttatctaagcccatcatcaatcatcaatattacagcaaaatctctaccaaaggtttggttggtcagtggttaagaatgaaaaaatggaatgctgaaacaagagctagatcacaataaaggtatctttagtaaattcatagtcacatatattataacacaagtatgcaactcaattttgtagttggaataagtaattgtaaaaaggactaaaagacaattgattttccacatgtttggacgcattcaagatactttggatgaaaatgacacagaactttagcaccgaagaagaaatattgttccatctgtgaaaggaacagctttgtccaaacctgtcgtcgtggagaataaccccaaacatagtcaaagttctttatatatgttggctaagcgtataaaattagttgactgaatcaagtataataaaacaaaatcaatattgaagcttgtttttttccatttgactctttgaagccccttaatctttcctaacattttctgtctccataaaccagggtataaagtggggattcgggattcctctgccgttaattgttcagtatcactcccgcttgtagcaaacactacgacgacacatcgctatctaaaattctgaaatcagatccgattttcacctaaccagcaacgtaagttaacaaaaagaattgggaaggaatatggccacaggagtacatgacacatgcgtgttggttgtacacatcaatatggtcctaacaagtagtaaagtctcatctgcatctcttacgtgtcaacattaagtcggcagatgatgttgggtctctcaaccaaaagaacaggatagaacttgcttttctttatgaagctagactgatatgaacgcctatataagcataatagagagagaaaatgaactacgcaacatgagaccactgccgttgacgagattagagatgcttgcttgttcgagagtaatctctggtaagaacagataatcaaccatggatcctggtcgaaatctttcacatgttctgcagcaaaacagctcgttcatgccacgaaacctgtgaatcccgagcaatgtttcgaatcgtcgtaacaaaaatcctaaaaacgaagcaaacgcgtcgcatgggggggaacagcgccattcgccctctcaatcggattggagataaaaaaataatcaaaccgagcaaaactgccaagatttcccacctttcgccgcacgagcaaccaagaaacgcaggcagggatgggcgagggctccttaccctcacggccccttccacgtcgggcagccggaagccgaggacgtcggcgaccttgccggcgtcgaggtcgtcgtccttgggaagcgccatcacgagcagctccttgtaacccccttcctcatcttcttcttcggcttcttcctccaacgccgccgctccccccgcccccggcgccggcgaggccgacgctggcgagcagcgacagcttcccgcccccggcgccgccgcggctcggcgcgtcgtggagacccatggcggatggcggcgcgcgtgcgtgaatccgcttgcctcgcggggcttgccctttggatttgggagggaggggcggggttattaataggaggatcccgagggggcgaggcgcaaaacgctgtcgctgactcaacttttttggctcggcggggtggggggagtgacatgtgagagtgtagagagtggaggggtgagaatgtaaaagggatccagggctacggttttgtgggaacgggaactctggacgaaagcgtatacgtacagtacagtggtggggcggacgggcggtgtatttaccggttttacatctatatatactccctccgttgaaaaaaaatcaattatctctcttgatgcaatgaatttgaatatattgaatctgaatagaccatatgtccagattcattgtatcagaagatgtcatatccttttataggttgttttttttaagaaaatatatacttactgtatctatcagatgtatttttgtttatgggccggtcccatctgtcagcccgctttaacaatccagctcagtgtgccaccgtagcaaaatcatcttgggggttaactagtttaaattgagactgaacatggctataaatagtatttgctataaaagttatatttttttctctagaaacttaatggattatccgttaacgagctcggagagctgcacgtagtaatcgggcgtaagtggcgtcacttcagcatttgatatcttttgcgagttgtgtagacttatttcttcaatctattggataataaatttagccataacgtaagcatgttttattgtgctaaaatttgattagcgatgtggtatgcaaaaccataatagcggagttatgccatgtgacaaaacctcgtggtttactaacttggatcgtaaactctattttatttctattacacgaaagatgcatgcactttgtactactatacatgtgtcatactcacacatatgtgaatgtactttctaagatcatctccaagagaggcctaatcctgtttctaaaagttaaatttcagaaattaatggtaaaaccaaccctccaacgcgaaaaggctaagccctcctccatgtggtttccttttttagcaccgcattgcttttctactttacgcacctaaaatttgtacacctcaagtttacacatctaaagtttagagacctaaagtttataagtcaaaagtttatatattcgattcaaatttgaatttaaattcaaatattttttatatatagtatttctatatatctaaagtttgtagacccaaagtttacaagtcaaaagtttacatacccgattcaaatttaaatttgaattcaaatattagtttatagacccaaagtttataagtcaaaagtttacatacccattttaaatttgaattcaaatacttttttatatatagtatttctatacataattttttccaactttgttttttatttttttaaaattttatagtgtagtaggaagagaagaaactgaggagaaagggggagaggagcgtataggaggggatagggggtgatcgctccaagtgatcgatcgcccgttaaccacacccccctccaacaggctcccaaaggaggtccaatagttaggtgcatccaaaatctatccaaatatgagctaattctgggcacctccatgcactctcaactggagaaaaatcagtttaagatgacccaccagtgatgacatggtagattttaaagttctcttggaatcaagtaatgggatactgttggagatgagggtgatttttgagcctaatatttttggttagtcctaacacatgtcttttaggtgcctaattttagacatcttttgagatgctctagcacatatttatagagctggggattagcaaaatctcttgccgaattatccgcaacatcatcattatccttaaaaaaaactaattgtaatatctccaaatataaagattgtgaatcaataagttttcattattgcgccgtcatgtaatgtaatgtagtaaatactagtaacaacgatcgaaaaatccaatcaagagcatataagtataccatggttcaaggacttgttcagtttgccactagtattatttttcaacccaaccaaaatttagtacgcgacactgacgccaaaaaatgataatgaaacaattgaatcatattcaaataccttatcataccattccataacaaattttgataatttcctaaaatctcccacaaaagaattggtaagacatcaaaccgaacatcacaccacgcacaacataccttctaaccttactaatttttttcatcatcaaactttgctaagttttgggtagggtcaattttgccatcaaactgaacccatcctataaatgtactccctctgtcccataaaaattgtatttctagatccaagtctttatcccataaaaattgtatttctaggcatgtggggcccaaccaattgattcatctatataactttccttccatcccacgtaatttgggctgctaatgcttgtaattttattaagtatgctaattatatgggttaattctctcaaacttctttttaatcatttgtatatatggaatgtgtgcatacagtgggttcattaaataaggttattgtggttattttccaatcctactattttgtcttaaattagctagaaatgtaatttttatgggacggaggtagtattatcttgccaaagttttttttccccacttggtgctggctgagatacggtcatattaggttgtgtttggcagctgagtttcttaatttatctctctcgtttttccatacacaccttttaattagttaattgatatgttttttaaaaggtttatatacgaaagctgttaaaaaaacgtattttcattaaaaaaatacgctaataagtcgttctttttgttgtgcgcaggagattagatcccaactaaaagaacgaacgcagccaaagtatatacggaaccccggcgtacgatacgatcatacgggcatgcggccatacccaattcgtcttctccgcccgctcctggcgcgcgcgagaacgcccgcggcctctcgcggatttccccccaaaaattgcagcgcccaaaatccccggaaatctgctacgcgcacccaacccncactaacccccttttccccttccataaattccccggggcgcccgtttccttttcccctttcctttcccccgtttagaaattctctcttcctaaatatatcgcctcctttctctct

SEQ ID NO: 16474 - DNA, 23614 bp, Oryza sativa
  unsure (1)..(23614): unsure at all n locations
aggctgtgcatattgtgattgtaatgtctcaggtcattttcattanagtatcccacggacggctcgttgttcgctctagatattctatgtgcacgactgttttttccgtccttaaggactgtgttatcttccttgttttttgttgtgggtgagccacccccactaaccccctctccccctcccataacttcgcgcggccgccgcttccctttccccctccccttcccccgcttggaatccccccctcccccactcgcgcgccgccgcctcgtcggaaccctaggcccacccgatcggtggcgcggcgatggcaatgacggcgcggcgggttcagctcgccgaccggtggcgcgggatccaggaggccgaggaggccgatgacgacggcggcggcggcgagccgtccgcgcccaggcagcgccgcctcaaccaggccaaggaggaatggtacggccacgccacgcatcgctctccgctacacatcacttcgcggcgatggggggcgtaacgtactctacgcggattagcgcgggtttagttagtgtttggtgtgtgggtttaggactttccgctgatcggagcgagacgacgagtaacgcctgtgctgacggggaatcgccgaatcgggcagggtagctgcatgttagcacgcttgttttgtttgcgtggttgtttgattagataatgcgaatgtaggttgctatgggccgatagactctcaccttcgtttcagacaacagagtggattgatatattgggtggaaacctctgcagggctcattatcattttgagcgtgagcactgttatgcacttatgctattggtagttttgtcactccgtcttgttaggggtatgtgctatcgatatgcagaactgagcaatcatttgattacaatgtagacttattgggatgtcaacagcatttcttggagtaatgttgattagaaatgtacatagctgtgtgaagtccgacttatcatggaccaaatatatatcactactcccttatggtcatcccatttgccactatttcttacactagcgaagtacccatgtgttgcaaggacgttgaatatgttcttttttcttctctctttccatagcctggggaatgaataatctacatgcttcactgttcaatggaacccacatgtcagtttatagtgggagttggtggtggcagattcaccaatttcaagtccccacatgtcggtgggtggtggtagattcaccgctcaccaccaccattagagtttttttttttttaaagagtgtagattactggcttgttgctgtacgcctccaacgctgtattgtactttgtagtcatttggttgaagtaacttttagttaacaatgatgtgagttttcaaatgtaaggcatatagaaagtcacagagtattattttgcttgaagtttttacaccacatgaaatgtgatataatgtatatgtttgtgtctaaaagacatttagtttatttggaatttagctgtgttggaacatcaaaatttatgtaaatggacagttgctcttcttgcaacatgccttgtttctagagtcaagagtcaaagacatgccctaaaatttcgcttgacagtcctaatgagatttgatgtttgtgtaaccacctgcaggttttcacattgttttaattttctgggaagtttgccaaaagaagagcatatttggtgtggatatgctgatattatgggaccatttctggagaccttccttggttactttgatgaccaagaggaaaactcacctcctaggacaatatggaaacggatttctgaagagctgaatgtttgcgcacaatgtgtttgcgaacaccaccaggcacagaaggattttgattctgaatatcggtctggcgttgacgccctcctgaaagtgttacggcttctcgatgaagagagggttacagaacatcttaggcagatgaatgcaaaagcacaattaaaggagtacaaaccttcatgccatgatgcagaagttagcataatgtttgaagtatgtatcgtttatgtgatactttttagttttccacatatacctcaaataaagatactaaattccttctaaaacattttaatttcttccttttctgtttatgttccttttgcatgcatatatatttataacagcacactacggctaccaacgttgtacaaaatctctcggcactagtatttatttgacccttttcaccgtaattgcttttgtagacatgtagtggcttacagaattgctcttagagtgaactgaatagagtgctctttttatctatcaatataatataatggcatttgtccagttgagttagttgggcttattttgattagcaggatgttggtatccattgaatcatgtgcattcctgttctctgaattctcagaatcactttgctaatactgagaatacaagcagcacataattagtctgcccctgtgtttctgatcagtaatggtgcagcttattttctttctttctttttcctttgatactttctgttatcaagcaatttcaatatcttaacgagtcacatttgttatatataccatcacctaggaaccagaaccctaagtttcatgcagccatgataaaccattgctcttctatatttgcaggttttgatgtatcccattttgttagatgacctgtcactggctaatcagttccagacattcattgaaagaattgatgaaatatttgaagtgagcctttctactaatcagcaataccctgtaagtcacttctttccttgaagataaacttagttttttaaataatcaagtaatccaggatactattttttattaaaccaggatactctatttacttctcaccgattggtttttgggctgttgctcaaaatagtatatattaagtttctttcctcctcatctatcaagttcacctgtctcacagtatctccgaacttacaattgtagggtgtttatgcattacttttcttcaaaagttgtaaagctcgagcaattgggcttcgcttagcccggtctatggggaaattgaggtaatgtgcttgccactttcctgttcattttgaatcaataaagttaccaattagatccatacacggaaatgcatctacatagtgtaccatgtaggaatagttaggcaatgtcatagaactgtgcctgaaggtggaagcttccaaccatgtgtttgatgatgctgtttgactttgtcatagtctgatatttgttaatagcatattacatttacagcttttaaacctatacaccgaacatttaatttgctaccatatttaagcaggatcccatttcccttgttttccccagatcattacaatgtttgaacaaaaatacttgccaatctgactactgatgttttccgtggccaaaatttgcattaaaccatgcatgccctatatggtcatgaaaacatgccaaaattatcaaaatgccaatcttttcttctttttctgctttaactcctacatagtgtttgtgcaacagcaaaattaagctttggaaagccagtcaccttgtttcatagacacgtaactctttagctcttggcaaaataagtaagataagagatagaattgctaataggggtgggcgttcggtttttccggttttatcggttcggtttgttcggtttagtagaagatcggtttcacataattgctagctgaaattcctcctagaaaaattaaaaccgaacctttttaaaccgaattaattcggtgcggttctttcgggttaggtttataccgaacttgattttgaccactccatcagttcatcacgctgccaacaataatcaggaatcaacaacatataaaaaaagaagttccatcatccatcttaggggaaattaagagtattagtatataccattggccatagaaccagaacaacagcaagatggcagcaagatgtcagagaatcgaaaagccaggagtccaagattagcacctgctggcctatgaaggaggaattgatcgatatctgactgccaccgctatggttggctgagccgtctggccagtcgtctgcgagggccgaggagccaaggacgagctcgttgggcggtgctagggttggataaagttgcgctatctcttgggctggatggaaggggatgagttgggccttgtatagttgtattaccttgggctgtcccttcctcggttttctcggtggaccgatttattcttttgaagaaaccgacgcgatgaccgaacaccgagctacgttaaaataaaaaccgatggaaaaaccgtagaccgcaaaacccgccactttggtgcggttcggctcggtgtccggttttcggtaatttcttgcccacccctaattactaactacaggcctagagccttatttaagatatcttagcaagatccaaaacagtgattacatgcaaaaacgttgcaattaaggacatttgtttgaaagattgtggttattttttcttagaaagatatgatggttttaggaaacagaaacggaagtctgaaactgtgggtataatacataatgccgtgaaaaagcttcaggatggaaaccacgattatatccaacttgtaccattaatggacttgcttctggctttgacttagatagtggttggcaactattaattttatggaccaaaaactgtttcacgccacaaggtggtgttatgtgtaataccttagctgattactcataagattttcagattttgcacccttttaatctacaagaagaatcaaatgctttgttctcatattggataatataatgcctctttccatatttaacactggaaagttctccctgccattccttttacatttgattcaatcttcaatgttccattagtatcacttatattttttttgtttagtaagaatattaagtatgttgaaatctgtagtaggatctgacctctataattcaactcaatgtacaagttgtgttcgatcaagtgctctaatatcatgccaggaggcatgttgagattggtttagccttgtatggctttaacacatttggtctgatttgtctgctttaatttcttataactgtattaacattaacagtaatatgcaggaaagcagttgacttggaccctttgcaacccttactgcaaaaatatattaattttttggaagccgaagttcttccatctacttcagaatctccaaggcctagggtgcagctcaaaagagccgatatatggcttggatttaaatcactgtatgtaagtttaacacatgtattacatatgacttaccatgttgcttcttccaattttttacctgtcaatgtattgactttgtttttgcagccttggatttcttgatgcacctgctttcgaagatggaatcttggagagataccctatattcctgaatattgtacttaaccatgtcagtgatgatagatctgatttatcatgtgctgttagttgcctgaaagcatcatttgaaatgcttggtaagtgtaactactatgagtttttgctgtcctatgaggctatgatgaacttttcctgttgcaaacttacacattttcttgttttaggttgcaaactttggttgagaacaaccctatcacctaatgtcatgcggaacacattgttgggccattgttttcatactagagatgagaaaagccacaaagaaatttttgaccttttcctcccatttctccaggcatgtttgttgttcctttgaatccaatgatattcgcatatactgatcattagtgcattatgatgtgctcaatcttgtatgcagtcacttgaagcactgcaagacggtgatcatgaaaagcaaaggaggaacatactgtattttcttctttatcaagtaactcggagtagtaacttcagttctctgatgagaaaaaccgctactaaggttagcttcttttgttgctaactggatattcactttagttatttgacttcccatgtaaatgcttactaaaaataacttgattgtattcccttatttttactattaagtacagcatatttgggacttttaaccatttgtaatatcgcacattgtttgatatcatacttcaaatcttaaagatgctagctgtataaaacagtacaagacctatacccacttcattagttgattacatatattagtcatcgactttgctacagttggtgatgaggtgggtgagtagaagtattcatggaaagccattagagccttctaggttttgtggtctgttattccttcagtgctgaaaggattattccacataagttaaatattgctgtcagtactactgttgtacttgtggtcatctttgttgttgattttttcactcaccatgattggtgtgcttgctgctctccatcgcaatcactggtaacagttgtcgttggcagctccatgggttacaacagcagaggacacgcaagggggagggagggaaggagagattgcatttccctctgtaattgctgctgcatgctgatttttttcctgctgtagttgctgattcatgctgtttatatgcttacatggtgtcgattaagatggcttctaaatcgcctagatgcccaggcagtgttgcagtgcctccctgcgctcatgattatctaagtactacatttgtattgcaaggagaaaatgcaacaaatcattttgagtagttttgtagtgcgacatggtagttgacagttataattgtttctcctaagttgatgctgtgctttaagcctgtggtttgaactttcaaccttttggtaggttacattgaaaatatcatgtaagtccacagtgttagaatgcattctatcactgtttctaggaatattataaaaactacagatttcctttcacattaatattttcatacttatttataactaactaaatatgaaattctgaccaagctatgtacaacaaaagaaaatagcctttttctacatactttatactgtaccaatcatcaacctccccgcagtcttggtttactggaatatttattatgcacacttgccatttaatgccctgatgtttttccgtgtttccttccagattgctcttcttattgtacaaagagggtacacaatgaaccctccttgcccagcatctgaatgtgtccatatgtggtaaggaccaaacatacttctcttcacaacgtggcaaatatcctactcgttggatgacaataaacaagttttactatacaagttttactatggtggctgaaccgctgaagtcaaaactgcttctatattttattaaaacttatcatgtatgaaaaccattgttggaagttggcccacttctagatatcattgtccacatattcgatatcttgtattcttgtttctagctaacctccgtttttatttgctgctggatttccctatttaatttctattatgaggttacatttatttctctactgttgcatatcatcccctgacctggattctgtacaggggaccatctttgattggctcattaaaggacaaatcattacataattctttgcgtcaacctgcactcgatctcatcaatatcctcataatttctgatgcttctgctttgatctcttttaaaatgaagtatgagtctttcacaaagggcgatgtaatcaattctgtcatatttgttgatgatgacgatgaattgcctgtcttctgtgatgctgaagagatggattacggctgttggaatgatttcaatgttctgtacaagttgacatgtcgggaatgcaaggattggagatgtgtccctttgttatggtacctcataatggttcagttggaaccttctgaactgcccatggccttttcaaaagcagtgttttgggctctatctcatatttctgtgttggagcctggagtatctacagagtcttcagtgcctgtgaatgattggttgtcatcacatgctgaagaagtattgccaacattttcatggcaagtcccaaatggtgcagatgatggtggagttggaaaggagtgtatcaatactctcaaggtgtcacaatcttgtaccctgctattaaaaatatttaaaaggttgactctattttaccagttcctattcatcttaaaatctttccatgccatatctcgtacttattgtaatccataaatcctgaatttctccagtatattgcacttgaattctttctagatttgccattcatgtcatcatgcaaattgagcaacgtgggcttctaaagcaatgggcttgggaatcaatgatggcggaaagcttgattttgacactagttgatcataatgatgtaagggtattgctcttgtcttccattctaccccttgcgcatctgagcacttagtatttcttcttcttgctatacccactgtagaatctgcggcaagttgggcgagctgtcttggagcttgcgtcacaaggacggggtttgacatctgggcttcaatttctgtgctcgagtgcatcttccctgactgccacatttttgggtctaagatatgcagttcaatcggtaagattttgatttttttacatttatttttattgatgttgggaatttcctggttgctggctggtgggtacaggtttctggcgctggcaggaggaaccccaccaggaataatagttaaaagttttaggctcaaatttgaataagaaccaattgcctgatgagactgtccagttatcaactacaaaccaatgaataccatgaaagatcagagcacagagatttgcaaacagatttcacattgcagttcatttgatgattcatctttgctagtttctaatggttcattcaataatagttccgcaatagatgtcatattagtgtctcatattgtttgctttggcaccaatttttttagcatgttttttttagacagaaggccaacggcccagcttatattgaaagctagaggttttacatcgctgggggttacccagttcaacagctacacaaaaacagggggggtagtgatccttacatcagctttatagctgagaaaaaagattgcacgcaggccaaaacacaaaaaaacaaagccctaagaaccgtgataacatgtcatcccacaatcaatcttagcaactgcacggcagccatcatcttctcttccaactgctccaactggttccttggcgccttccttagtctacgccactgtctcaaaaagaaaatcactcgaaagatcagcgtgagaggcgtagaagggatcttcttattgaaaatcatgtcattcctgggtagccaaagtgcccaggctgacgcccccaacaacattagtaacaggttattagatttatgtcctggtaagccaacaaactcttcaaaaaactgttgaaaagaagagggaggggctcccaatctagtgcatctcttagaatacaccacaggaaagtggccaaagggcaagtgaaaacaatgtgatcagcatcctctgagctgtggcacagggtgcagctgtcctctcccccccattttttcttagttaattgcgaagtggactgaattctatctctgatggccagccaaagaaagtgcttaactttcagatgtaaagtagcctgccagatgtctccacacacgtgatcgtcgcctatgtcttgcatttccaaatattagtcacaaatctttctgaaaattgcaaattggcaactaacttgttgcagacctccttgttatggctgtcaaaactcaaaacaagaaacagtttccaacgctcacgtccaaattgtctgggttgagcaaagtatttctagtcacaactgttataatacatattgtgcattatggaacttaatgcctccaaaatccatttgctaaacatgcacccaagtaatttgctaagcgtgatttgcaggcaaaacttggcgatcatttcctaatggttgaactaattgttgttatatcaagtatatgttccacaaattgaagaagtgggtggacatggactgcagactttgtattctaaaataaaaagattcagacttaaactttaaatagactgccgtgtaagcattccaaatctagcccaggaaatccagtttgttctggttatcactatgccaggaaactgatcctttgcatgaataacacagaaacatttatttgatattcaaagcttcatttatttacctgggtttctgaaggaaaatagcattgctcattttaaggagtgaggattatcaatctctttggttccaatataagcatggttctctgagagggtctaaaaaaatattatttcaatctctgtagctgttcagtccaaacattttttcctttaaactggaattttttttgagaattttctttaaactggaaataatcatgttctaccttatttgaaatgttcaggtggaaacaaaatcagttttggcagattttcctagtcttcatcacttgttttttgtcatatgcaaactattaaaggatgttgttgttcaacaaccttcagttgcactgcaagcaaaaccttttgaagggggtttcctgcgccagtccttttcaaatgtatcagtcaacctaccacaacattcagttgacattatttcttgggagaagttcagcaccttgctttcaggagctctctggccttttattttcacatgcctgcgaaagggagatgatctaatcaataccaaacagtgtcaggtacatctctattgctttgacttactgtattattgctgtgcacatcttcatttctttgtttcatcatgatctcaattttatttcagatatcatgtgttcgattgcttgagttggttccccttgtgtatgaaagggtttcttcatattcttctgccaagtcatgtggcgtgccaacaatggttctggaccctactgatattacgtggctttttcacttgattaattggggcaaatcatcactccttgtaatcattagacattggaagcagtgcatgctatctctaattaaaatattaaaaggttcacttggtggtactgttcaacactacattgaagatcttggtagtatcatttcacatggttagacctctaatattttcagttctgtatgttgtttagatgtttcaagaaatgtttggtagcaacttatataccattctttcagatgcagtcaatatcgatgaactcagcgagaaaatttcagatctcaaacttgcattgtccaaggaggcttctgcaaaatccgaaaggagagtggtagctggtgtatcaatgttcacagaaccaattgctggtattccttctccagctactcagacggctcaggagagaaatactggcagggacaatgttgaaaccatgaagtcttctcgatcgacatgtactgaacatataattcttctgtcagatagtgaagaaaattcattgacagctgatgtgtctggtgaggatgttttgtcatcagttaaagatagtgatggatctggtacttcagatatgcagaaagaagtcgagcattctgaaccaaggatgcctactgaagatagacacgtgtcactaaaacaacagatttgcagcccggccagtgatattgtagcatcttctaaacctgtatcaaaagatagaagtataattgctgccaaagaaggattgggtagagcaaaaattccaactgttccagtgaatacaaatgatacttcccttttaccaaagaagattaaaccacccgctagcaccatttctcagccatcgcgttctaatttgtcatctggtgctgaaaaatttaaatcaatcttcagagatttatctgatgacgaagatgatcctttagaacatgcacttgatagctgccgaaagccacaaattcgtttaacaaagtcatgcttattggttcctaaaagacaagtagtccagcttcctttgtctgctgaaaagagacatacttctggaagaccagatgctagttctcgaagactgaaacctcctaaactggacagctggtttaagaacatcttggaaatggattattttgctgttgttggtctaccttcttctgagataataaagaaacttgctttgaaagaaattccggtatgctttgattcacaagctcaatatgttgagattttccagccacttgttctagaagagttcaaagctcagttgcagaatgcttatgtagaaacccctgctgaagacatgaattgcggctccatatctatcctctcagttgaaagggttgatgagtttcttgttgtacgtggccgcccagataaaaacgactgtctgaaatccaaaaactgtatggagaatgatttaatattgctcagcaaggatccactgaatagctctggacagcaagttcatgtgcttggaaaggtatttttgttgcccatgaatatttgttgccccaacaaagtatttttgctattgcgtaacacatttactatattttcaggtggaccggcgtgagagtgataaaaccaaggcgttaattcttgtaataaagttctttctctctaatgagaatgcacgtctaaataaagtgaaacgtcttctcgttgaaagaagtaagtggttcctgaataggattatgagcatgactcctcaagttcgagaattcagtgcgctttcatcattgaatgatataccagtgcttccagtaatcttaaatcctgtttcttgtaagtcaatccaccatggatctggaaaagtgcatcttgataaactttcacaccctatgcgaaaagttttgaagtcatcatacaatgacagccagcttgaagctgttagtattgctatcagatcaacaagcttgaaagcaaaattcgatctctctcttattcagggccctccaggtttgtcctttagttacgtttaccagcaatttgtcacaattccaggcataaacaaaggaaactttacacttgtgttttctgcaggtactggtaaaaccaggactattgttgcaattgtgagtgccttgctttctttacatgcagccaactcctcacaaagaaatgaatccttcgctagtgctgaatttaacaagccaagaccaaggctaagccaatctgttgcagtaactagagcttggcaggatgcagcccttgcaaaacaacttataaacgattctcagagagaagtcccaacagatcggctttcaaaaggaagggttttagtatgcgcgcagtcaaatgctgcagttgatgaacttgtgtcaagacttagcgaaggattgtatgacactgatggaaagctgtacaagccttatatagtacgggttggcaatgcgaagacagttcattctaattcagttcctttctttattgacacacttgttgagcaaagattggcagatgagttaaagaagaataatgatagcaaaagtttatctgatactgaatcctctagctcacttagggctaatttggaaaagattgtagacagaattagatactatgagttgaggcgaaaattattggaggctgataaaacagaaaatgactcacttgttcccagtgattacgagacagatgaagtttctgatgatgcaattggtgcaaagctcaactttctgtatgcacagaaaaggaaagtttctgccgaacttgccactgctcatgcacgtgaaaagaaaatagctgatgaaaacagatttcttaagcacaaagtgcgaaagtcaattcttggagaagcagaaattgttgtgacaacactcagtgggtgtggaggtgacatttatagtgtttgctcggaaaccgcttcagctaataaatttgtgaatttttctgagcatgctttgtttgacgttgttgtcattgatgaagctgcacaggtattatcgcaatactaacttttttcttctaaatgatgatcgcactatgttttattgaattaaaactaagtttgtttgggcttattctgtaggctcttgagcctgcaactttgattccacttcagctactcaagtcgaaaggaactaaatgtataatggtaatttctgttacttcttttcctacaccttcatgcaattgtatggcacttgcttttgcttactgatgtcttgcttgaaggttggagatccaaagcagctacctgctacggtgatgtctggattggctagtaaatttctttatgagtgtagtatgtttgaacgcctacaacgagctggttatccagtgattatgctcaccaaacaggttattttccgtgatatgctccgtgatttctatagtatagattttttatctgtaaattttgcagtgtggaagtaaagattagtgaagtaaacaggaaattttgcaggttatttttgatttggtaaaatactatatcgtagctcagtgatgcttggttacttgtgtcagattgcatggtcccatgcccttgttagactggttcctgagatttagttctatgcgctaattttgtgcatggactcattcctatatatgagcaaaccttagcataccatttttacaaaacagactcagttgttaacatgattaaaaggaaccaacatgattttgttttttttcgtatgttaaaaatatatccatacttcatagttcatacagagttccaatgtcttttagtatgcagctacgtacatctgtatgtgagaagagcagtcagtgtaaaccatctgctgatttatgccaattattatttttgactgcagtaccgaatgcatcctgaaatcagcagattcccatcgttgcatttctatgaaaataaattgctggatggtgctcaggctgctgacaagtcagctccattccatggtcatgactgtcttggtccatacatgttctttgacgtagctgacggccgtgagcagtgtgggaaaaatgctgctacacaatcgctctgtaatcaattcgaagcagaagctgcacttgaaatactgggatttttaaagaacaggtaacaatattttcttcttcaactacatgcttaaggattttcattctgtagctaagtgagactttatacttgcttcatgaacagatatccatcagagttctcctgtaggaaaatagggatcataactccatataggagtcaactctctttactgcgttcaaggttcaattccttttttgggcctgaaattgttgcagagatggaaataaataccgtggatggatttcaaggtcgtgaagttgacatcttggtgttgtcgactgttagagcctctaattcatcagacagcagacatcacactggtgaagcgcgcagcattgggtttgttgcagacgtgagacgtatgaatgttgccttaacacgtgccaggttttctctatggatagttggaaatgcaaagacattgcagaccaattcacattgggcttctttattacagaatgctaaagaacggaatctgttcatctcagttaataggccataccgttcgttgtttgagaaagttcgttcacattcagaagatattcatggttctaggcatacctactatacaagtcattgtaagaagaaggaaagtggaaaaaccagtatgaccaactcacagaaaattgatgcacgaccccacaaagaacatgcaagacatactgtcaggactgtggaaacagcaaatgaacgtttaccaaatgaccaagcaaaaagagcatcacgctgggatcggaagagtccaaaagctcatgaacccttccatagaaaatctagcaaggaaaaggaaccagtaattcaggatactgaccaggacaatgcggtgagaaaggaaaaggaaggagaagggctgactatccataatgataatagcctggagcttgctaatgttataaggcagagggaactgaataaacctgtcaaaccgaatattcatacagatgctggtaagaccttatgtaaccaagattctcttcagaattctgaggttagaaaggatgtcaacaaaaaatatgataatggaaatgtgaagggctcacaaaatcatgatacaaaagcaacagtcatgaaaattgatgcttctccaccagcacaagacatgcagaagttaatacaaaaggctaaaggagcaaggaagttctctgaaaaaccaagatttggtaattcgagtcaagttgattcctcagttaaacatgaggcaactctggaatcagccaataagaatggtggtgcttgtacaccaacaaactcagaaatgaagaaaatggccggtaaggccaaaaaggctaggaggttctctgagcacccaagatctgggaactcaaataaagtggaccattcacttccgtcttttgatgaagaaagtagccaaatgccagaactaaaagaaaacaacttaactgcaactcgtcaaaatcatctgactgcatctaggaagcgacaacgggaggatattgagtcattactttcatcagctcttgtatcatcaaagaagccttcttcaaagtgtccttccaagaaacaaaaatgagatcctgcagcaaaggtaagtttttcatgctaccttcaatttgctgtattataacaaagttaatctgttctgaagttagtgtttgctcttttttttaacctgatacagagggggaatccttccatttggaagtcagtattgttgactttagaagtttatattcttttatgcaaacgtttcttgcactctatatacaaaattccatacctgtggttgcagtacatttaaggactataaaatagaattggaagaaatcaccgaagcttagctagtagtggtagtagcctgtctgttatgagctacttcctccgtttcatattataatactttctagcattatccacattcacatatatgttaataaaatctagacatatatgtgtgtctagattcattaatgaatgtgggcaatgctagaaagtcttataacctgaaacggagggagtaatagttagtaccaatcatgttcctggtctatttggatttgctattattttcttctacatatatccccctctaaatactcgtatggaggctctacttaccctataactgttaatcagctattcctactaatttgaccagcccccatacagttggatatgcgtttgtactttggatccactaagctttatatgctcagttagacatgtaaatcagtgatcctggaacctcagcttgtgatacaatttccactttttttggaacgcatctgcgttccacctattggtggttcacttaattgctgtgtgctggatattttgacatgctatcgattcaattatctgaagctaatactcttatcttcaaactcaggtggcagcagatcatttatccgctcatggacccttgtagcttttttgacatgccgacgagttcatctcatgagttctgcggttgctgtaatgtgatttctccaccgacgccatggaggcacttggattttgagactcataagctaacatagcaagtgattttcagagagcaggaattcttctgacattgatagattgttcttcggagcttttctccctgccgaccaccgcccaatctggatgtgaaaaaccaaacaagacaacccatttagacaacatagaaggtcatttttggatgctgcttgtgtcttttgcctagttcagagatgatgcttgtagatatgcaagccaattttgcgctgtaaattatctgtacatagtgcacatatagcatgaacatgacggaaccatacacatgcttgtccatgtccaaaatgaaaaaaaaaggacgtggctcatcttccgaccagggtgaaagcttgatgcaatgtagctcctcttgtttggactccaaattcatcagtacttgtagtactttacaaactttaaaatgattgcgttccttaacatggtaaagcagtacagaataagcacaggataatcagtgtcaacattttcccagacagggtacggccttcagctcagtcccaaaacggcccatgggtcatcagaccgtcagctcagtcccaaagcggcccatgggccatcaggttaactgcgtgggacatgatcaggcatgcagtcagcacatgagacaggtgcattatccaatatctgggaagaaacttggtgcttaagtatatcactgacgtagggacatctcattgtacgtacaccctaaatatgaatgaaaatatgatccagacaggggcatctgattgtacatcctaattttgaaaaatagagaattccttgatagacataataggacgagtaaaaaagcttgagactgtcatgcactttccgtctctttgttttttctctactactttacaatgtcataaacttatataagaggggaaagaccagttcggttgtttcgaaggccgtgtttagttcacctctaattacccccaacttttaattttccatcacatcacatcacatctaaaacttttctacacacgtaaacttctaacttttttttttaaaacttccaactttttttaggatctcaccatctcaccatctcacgccgtatattcttctgaggtctcaaagtcgaagcccttgaagatcagagggatacaatattttgcatatttcttcaaacctttcatttcccaccagactgaagataaatacatgaagaaaattgccagcctgcgtcgcatggttaacaggaactgcgtaagcaattaggcatgaaataacttcaactgcatttcgcgaacgcgccattacttcaactgcatgcttgacatgtccaacaacatcacaataagtcaataagaacacaaccttcctccctccaaaaatgtaaggcgcataagctttttttacgtggtctctaacttaaaattttgattattgatttctttcataatatatcaccaatataaaaagtaattgcattagtgatatacaaacttattagatgtgtgcaatttaatatacgaacttgtaaaaagctcattttgagacacaaacctatctaattcgtgtgaactaggacaaacatagcttatcaaggttaatattaccaagttaatcttgattagtagtgagtatgcataagacatgctatacttatacttggtctctactttccttcgtcatttgaaatgctgaatttcatatttttctatcccatgtatcatagttctgttttcatatcttcctctgtaatcacaatgcctatctttttattgaacaaatatatatctaaattgcaacctatatatttatatagtatcctaagcaacacctaaataagattagcgattaatgttattttggccctagttcacacacactagatgagttcgtgcaccaaaacggacttttacaattccgtgcactagattgcactcatctcacaagttcgtgtatcgtcaatgcaatttactgtaacataaaaacactttaaaatatgacgtggtatgcatagtttaattattagccaaaagttagaaaggttgattttcttaaaataaggatgcatatgaggcaaatggattatagtttaactgacgagaaaatatactacaaaatgagttttatcacgaactttaactataacgaagatagatatcatatggttgtctggttggtttgggatatataatttgtgcacattttttttatgtaccgcaatatactgtatgtagtaggggtcgtacacacgtgtggttacattggtgtgagtgttgcgtgtcatgcatgcatgcattgtcttactccctctcccaatcccaacaaaaatgagttattctttttcctgacggaaaaatggagttgacttataaagttgtactgacctgatataatcaaggggaataatctttttgtggaagtccttgatgagcataatgatagtgattactgcaattggagcacgcgcatgccgtcagagatcttaacaaaaaaaaagttaaaataccaaatgacatgcatgtgttcactccgttctacattatagttttaacgtactctttactcttctaagattcactaatattcatatatatttaaacatacatacatgaagcatatatacatataaatacatatataaatctatgtattattaatgtattaaaaaaatcatacattttataatgtgaaagagagatgtggtagtccgctaggcttgattacaaagctactcccccgtttcatattataagtttgatttttttacttgtcaaactttgattaaatttatagtattaataaaatatgaagcggagcgagtaaaaaaaaatctaatatcgccattgtccattgaggcattggatcatgtagtacttcgaaatcaatagcgatcatgaactcaccgaacttaagccggatgagcaggtcgggggagaagccccgtcgccggagatccgacgccatgacgctgagcttgtagaactcgtacgccatcgcggcgtcgaggcacacggccggcgcggcgcgccacagctgccacagcgcgaggcacgccatggccgcgccgaacactacaccagattctcacatctctgacgggatacctgtgacgggcaaacgaaatggtcactgatgaccgtcacctttgacgggtcatacgggatgccgtcatcggtgaggcatccggctgcgacccgtcacaggtaactagtcacctatgacgggttgaaaatagaacccgtcacaggtgaggttacctcacctcaaacgggtttaagtcctaacccgtcacaggtgactagttacctgtgatggaaacatcataaaagtcttacataaatgcagcggaaagaaagaaagacaacaggagctaagccttgacttgaacggcagcgggaacaccactccacaggcatcctcgacggcacggacaaagcctactcctcggagaaaccttcatctgacccgaactcgaactctggggttgggaaaagtagagcaagactgagtactacccactgtactcagcaagtcataccggaataggggtatgatgcagggaatcatcaaagaagagctgaagtggttcatttgcgtaaagcgagcatttataaacagaaattgaaagatttaaacagttgtaataattaattaacatcaactatccactgtccaacgctaacccatgttgcgacaggcccaaccgtccacctgaactatccaaattcaaaagattacactaaggtgagactaatcacggtgaatctggttgaccgcccataaccgcgggcacggctattcgaatagttttactctgatcagaggtgtacaactgtacccacaagacacagccccacgacacgtttccgtgcgccgacatgtcaccacgacataccggaaagaggccgtgacaggacccttcgcataaccccctctaaccaagcacaccacacctcaggtttcacccccactcctcgcaaggcagcgggcagtcccctctcgtgcctaggtgaatccggaagccgcataggccgtcgcagggcccatccaaactccatcacgcccacccttgcctggatgcgtcggctagaggaaagctacgctacaagcccagccgttgcccacgctggcttgtggtaagtacgataagttcttccagggcatcccgcgaaccggtccttaactgccatgggtgcgaccagcaaaaccatgcacccacagcccaccatgtgattcattttatttaaccaacaccagagcggtggtactaatccaacattatcatataaacctatagtctaggttttaaatgagatttccccatagtgtgctagttgaactaagcatggctaagcaattcctagtccaaagtctaatcatgttataacccaagctaacaaggagcatggtgtccaaaaagcatggctgtaacaaaaggtaaccatcccatagtataattgcaaaacaaatgcggtatttgaaagaaaacattaggacatttgcaatataggatcaatatgatcaagtgacaagcatgacttgccttgctctgctgctggaggaacctcggcgactatttcgaagtacaccggagcgtcggaagagccggaatctagcgacatacaaggcaaacattgcaaacaggctataagactactgaaacagggaacaaaaccatttttaatggattctacacatttttcttgatttactgagacttgattgggcttaaacggagctcggatggattagttatgatttttagaagattcactgtgtttattactatacaagaaaaaccttaaactatttattgcgcaatatattccagggctgacgtcagcacggagggggtgcggcgccgacatgcgggccccactggtcagcgactcaagggtggccggtctaccgtggaccgggaccacgcgagtgatccaccgccgatccacgggatcgacggcccggatcggcccggggccgatcggacggtgcggcggcggtcaggctaggctcagctcggcacaaagccggccgaccggtcacggcgacggcgcgcgcacgcgcacgcgcgttgccgacgacggcaaccgacggcggagacggcggcgcaaagncggcgccgaagggcggtgatgctaaagcgacgactaatgggcggcggcgctaaaacggcggctaggagggagaggaagggaaaaagagggaggggggtgcctcaccgagggtggccggcgcggaggaagacgatggcgaacagcgacggcaagccacgggaggacgacgtcggcgggcggacgagcttcggggtgccctaaggaaggagaagagagggattagagagagggagatgagccacggagaccggaagccatggccgaaggcggcggtagaggtggtgctcacccgagtgcgagggaacgagggctccggtgacgaacctcgacggaggaggggtggacggggtggatctcggccacgcgaacccgacggcggcgacggcgcggcctggcggcgaccctaacggcggctagcggcggccggagtagcggaaaaggcggcggcaaggggttgcacggcgcgggagcgatgggaggctcgagagagtacggcggaatggggaaaaagtgagagggagcgacggggaagcttaaatagggagagagaggaccgggcgtggccgggagaggcgggaatcgccggccgacgtgggggagtgggggaggagagaaaggcgggattcgaaaatcgaatcccggccatctcgggcgcgggcgcgagcgggagagaaaggggagtgggcgcgggaaacgcggcgcacgcgcgggcgtggtcgacgtggcccgaaggaggcgaaaacgtgggcgcggcggcggttgcgagcgcggcggcgcgagcgagaccggcgggaggtgggggaaggacccgacaggtgggccccgcctgtcggcgaccccgaagaggagggcggcgggacggcctggctgggcctcggcctgcggccggcccagcaagggggagggggacggaaaggggagaatgggccggcggcccattcgaaaaaaaggaggaaaaagggagggaaaagaaaaagaaaaaggaaaaaggactttccctggaattacaatattgcttgctcaattttaattggttaaaattatttctagagctctgaaaattccactaaaaatcctgttaatgaatttcgacatgtagaactcaagaaaaattccacatgtcaaatccgattattatttgcattaccttcttagggttttcttttgatttgggtaccgagctcgaattcgcgctatagtgaatcgaggtcgtcatcaaccgtc

SEQ ID NO: 16475 - DNA, 4199 bp, Oryza sativa
  unsure (1)..(4199): unsure at all n locations
cacgcgtgatggcgtcgcaggtcttgtcctctttgccgtactccctcgccgtcacgcgctttggcactgcgccgccgccacggcgagccgccgcgcgggtcagcctccgccgccagcaaacgtcccgcgacggcgccctcctccttcgctccctgacgacgacgcgctcggtacgtaaagctcgtgccaccgctatcgatctctctcttaaattctcctctcctctgatgatcagagatctctcttgatcggtggaaaattgcagcggtgcgctccggcggcaaaaggaggcgacggcgccaaggaggcgccggaggcagctggcgaccccgacgacaagctgtggccgtgggacgagttccccgagaactccgtgttcgtcagcaagggttagccgccgtacagccaagatttggtgcgagtcggggaagacccgggccgcgctcaaggacgccgcagcagacgtgctccgcccgttgctggacaacttcaaccatctccgctccctcaacaccgtcttcgacaccgaggattaccatgtcggcatgccctttggtaagtaattaacgtgagtgatgcaatttcgtactacctagcaatcgcattacaactacaactagcccaatttaattttacgagaaacaatttttttcctcattacatagattataagatagacgcacacaatcgcacacaccacactaaactcgctcctaaatacatggctgtgttagcatgcagggtatgggaacacattcccttcgcacggaaaacggagcggttcattagcacttgattaattaagtattagctatttttttttcaaaaatggattaatttgattttttaagcaacattcgaatataaacttttttttaaaaaaaacatatcatttagcagtttaaaaaatgtgcgcgcggaagacgagggagagttgttgggaacatggggttccaaacacagcattcaaagagatggagttcttcacttaaatctttcgcagcgcgtggtctgcctctttagcatggcgtctaagtgttgacgagtaacgtgatgtgatttgatgagcgcgtaagtaactatgttttattttgctgttgaaatattaggtatgctcattgcatgcattgggtgttataacctcttcaagatgaatccaaccacgttcatagacgcggccctcggttacacgttctacaggctctgcatcgtgtcgtcgcagctccggagaagaggcttttccaacgacctcatcatccgggttaaatttggtcagttactgcatccgcaatctgattcagctgtttcctatttcttaaaagcaaattcttttggtatcgctatgcctctcgatgatttttcctttgcagtcgtcatgttggttatggctatcaatgatatcaacaactgcatttattggcttgatgctatcaggtatgaatgtatgatccacacactcacaatgtgttatggttttttttttaaaaaattttaaccatatcgatccaaactaaaaattagacataccgcctaatcgagaggggttgatcgatcccaaagactatttggttgtgttttttgttttgagaggttgggagcccctctccttcgcacataaaacaaaatgatagattaacgcatgatcagacatgtaaaacgtctctgatatgtaaaacaaaaagatcatggacgtccctttaaggggcaaaatgactaggccagattagataaaatttgaaggaaaaaaataattaggtgattgaaaatagtagaccaaactattgtttcatgcatggttgcatattcctttacatattgacttgctcctttacattatattgacttgcgttgacatgctgtaattaactacgcgacatgcatgcatgtacagggcacctgtctatttcctctagagcttaacgtttgcttttgagttggctggtattacggcagtcccaacccatactactagacatggttttcataaactctacagcatcaagaaactagtattagacaatattcttccaatgcaaacatcactattccatacttcaatttaatactacttatctcacatgatgtcgatgtcttggatgttgtgtagaaaccatgtctcatgcaatacatggttttcttctctttcctcatttattcacttgctacatcaattttttttgtcctaggtgacaacttatttaatgctatggacactatcctagtcattgggttggaaatgcccttaagaagtgtgtgaagtatcttttggcctcagttgccctcttgggtaagtcatgaaaaaggaagacgcgagctgcgcaagctgctgcccaagtttgaacttgcacctgtgtctgagaggctatcaaaatggtaataattaatacttcatccgtttcatattataagactttctagtattgtccatatttattatatgtatattaatgaatctagacatatatatgtgcatatatttattaacatttatatgaatatatgtaatgctagaaagtcttataatctgaaatgaaggtggtagatcgatgtgtattcatggatggccaggctatactacataattggctgaggaaattttgttctgccctacttggcacactttgagagatggttatttggttaatcaattactttgcgtttcagaagatatgtgattcaggctccaatgaagtgcagttgcttctgtaatttcgtccagtttattatgcgtttggatcaaacaaggggggttaacaagttaattctcactgtaaatagacaaaagcattgctgtctgattgagatcgagaccatgttttacaatggtgctgctacgtgtttggccagtttttgaacctatgaccgatgacagtcaaatgaacaaaaaaaaaatcagtaagttggtaaaaacaatactccatcacgaaattatacaactactgctttctaaagacaccaggggtggatctacccattagatagggtgagtcgaccaactcagctacgactcgtgtcaccccaaagtccaaattgaaaattaaaaatatagcgaagggtgatccaaagtaaattccttagcaatagaaggtgctccaaattgtaaatttactgtatggagatatatagttaggacaaaacattcttctgaaattcacccttggttttcagaagattaattgtgaggatcagataattccttgcatatttttttcacaaaaatatataaaataaacaaatgtagaaagatactatagagtaaatactggcatcctgcgtcaagaaacaaatagtcattaaccaagtcaaatgatgcacagtgacatatataagaacataagcaaaagtatataaaaacatcaatgataatatcccaaatgggaaaaataaggatatcggtacgagaacagaagtgaggcatataaagaaaaggattgcacaatactgttttaatcaaacgacgaatttagaaggctgctgtgccaaacaatggtccaaaacattaacacagtcgtaaggaatacgtaatgctagaaaggtcagcttgaaaggtgacatggagatatatataaaacagacacacaaaacaaccatttcatttctgaaatataccaaatgtgcaaaatataaatcttcattggccaattacacaagtatttcaatcaaaagactagaacggggaaaaaaaattacaaaagtattacagcctacaaaccccatacccccacccaaaaagaaaaaaaaaatgaataagttcactggaggtcccttaaccacaaaaccagaaatcttcacctctaaactatacaaaaccgtctaatttaggtcccaagtcagtatagttgcctggttttgctgacgtggcatcctagtcaacaaaattaataaaataaatatgtgaggtcctacatgtcagtgagagaaaatgatgtgggccccacatctattttttcttttatttttctcttctcttctcaacttctcacaggtgggcgggcagatgcgagtgggcggcccatggcggagcgggcgcggcggcccgcgcaacggggagagatgcaacaatcgccgcggcggcgagcggccggagcggcggcgtcggaggtctaagtcggtggagggagagtgcgattgctaagcaggcacgacggggatcctctatagtcgtcntctggnggcgggaagcgatgttctagcgcgcg

SEQ ID NO: 16476 - DNA, 5393 bp, Oryza sativa
  unsure (1)..(5393): unsure at all n locations
ccgtggattcgcatgcnatcaggtcaccctgcctgcatgtccaccgccggcactagcacccacgctcgcccgccggcgcccgttctgcctgcttcgcagccgcgctatcccgccgccgtcgcggcgactgctgcatctctctccgctgcgcgcgaccgccacgcccgctccgccgtcggccgcacacacgcatatgcctgcctgcgcgtgagaagttgagaagagaagagaaaataaaagaaaaaatagatgtgggcccacatcattttctctcactgacatatgggccctatatatttattttgatgctacgtcagcaaaatcaggcatctatactgtcttggaacctaaattagacagtttttgtatagtttaggggtgaagatttccggttttatggttaggggattttaaaaaatctcgctgttaagttgagggacctccggtgaacttattccaaaaaaaaggtggtgatcaccttgggccaagtgggctttgctcattgggcctccaaggtgcaaaccaagctgtgcctattcccctcctccggtcgtcggtgtgtcgccgccgccaacccatcgcctcgccgcaaccgcgaccgcgccggcgagctgcaccgcccccgtcgaagtttcccgcggagctcgtcgttctcgagcctcttccgatgctttctgcacggcgagccggcgccggcggcgccgccgggaagacgtcgcatgctcgcccctgcaaccctggttacccgcggcgctcgtcggtcccgatgaccggcggcgacgcgactagaccagccgtggcgagggcgcttcgccttccgggtagtgggggaggggcgggtttccagcggcgggagccccaccgatggctccgtccctgctcctcctcccggagtggagatggcgccgccgccgttctcgcctcgcgatccgggagcagcgacatgggcctcggggtttcttctttctcgccgtgctcgcttccccgccgcgtcgacgctcctcgccggcggccagtggtaggtgaaagtttctctcggatttctctcccgatgcagaaatgctgagttgctgcctctgcagtggtgttcgccggctgctcctcctcctcctcctcctcctcgtgtggaggtgcagagcgtccggaagaggcgaatgagcgaggaatgggaggcgttgaaggcagccatcgccgacatgttccggcccttgctgcgaaacctagctgacatttgctctctccgcagcgcctacgacttcgaggactatcaaatcggcatgctctttggtgtgtttgagttgagttcttaccgcaattaacaatgccgtcgattgtatatccttctgatcaccagaccacttatgttattcggtgaatgtgtatcaacatttgcaggtgcgtttctcggatatgtcgggtgctaccagctgtggaaggcggctccttccgtcttcgttgatgctgcccttgcctttgtgttttacaagctcagcgttgtgtcctcagagctgcaccggcagcgcaagacaaacagcttgatcacgcggcttaaattcggtattcattttcttcgtatttgatcagcagtttaagtcatatgtagaattgcatctccaaaaaaaatagagacataacattaataacctcaagtaagaagctggcctttttccaaggtttgatcactcattttgagtattgatgaatcactgatggaatatttaccctgtttggatgggaggatttccgtagctcaacagtgctatagtatcaagttgatacatcatgtagttggcaaaatcaaataaaagaaatggtataaacttacagtcccttttcttagttagaaggtggatatgttttggagcttgggtgcaagtagttctcagtttagtttgttctatgcctagaaattataacctcaggctatcttatttattgactactattcaatgcagggaccatacttatcatggttatgaaagacatcaagaagaactatgtactcctggacattattaggtcagtatctattttaaaactttttctttgtgagagagaggtaggaattctatcgaacttattaacagatgaaaaggaggttcaaagttgcaggacaaaatcactgctacaactgacaggtcaaactaaaatgaaagcaattgacaggcctaccatcaggactgccaggagatggttccttgttgcctgatactaatgttggaaagccctttgttcttgttatactacaagaatacttggtggcagtcgctagttatagactgataggagaatgctggcgctgatagtagcgtagtgctgtagtttcatggtggttttgatatgcttcctgcttttgttggtttttgtttaggcagtgaagccagagctggagattgagaatctgagataatattatgcccctgtgtttagaaatgaacttcttctcctaccatttggagctccttgcccctgggatctgaattccgagagccctcttaaacgatactttctaggactaaatatttttcaaaatttccagatatcctctaactatgaatttcaaatgttaatacgaaattacttattctctagtgcacatctatctaaattccatgtgtgatgctgtggataatagaggttatgttatgccatacacacagtggttgctagctctttctggcatcagtaaaatccttatttgcgaagattatcaccatcctagaagcaatgatggaaaattatgtttgcaaagagcagaccagaacaacacaattttttattgaacattttgtataattcaaagaggaatttacataaaagagcaccatatgctgtagaaagtgttgcatgtttcttagggccaaaaaagtgttgcatattgaggtcatgttacttttatactaagaatatgggtgacaaaagaagttaagttactgagaggacttacagcatactccctccaccctgaaaaaaacgaatctaggactggatgtgacgtattctacctctatccagattcgtagtactaggatgtgtcatatccagtactggtagtaggcaaaaaagaaaaaaagggatgggaaaaaggttaaagaatcacagggccatagggaagtagctggagtgttagaattttgccaattaacttgtgaatttcaaagagacaatgcttcttctacagttctactgcaataatactggggctgttttctcatagttattttatttctcttgttgatatttcattcgctgctaactaaactttgtttcatgatacagaatgccggttttcttcctctacatttgtgcgttcgtattcgatgttgctggtatgaagaagtatgccaggcgctcacttatttcattgtttaatctgctgaaatctagaggtggcatacaagaaatatataggattatgtggtatcctggttatatatctccatatgatgattctgctgactggtgatgcatttgtgtgagtggttcccacttaggagcttgttctaggaaggatggagcttgttctaggaaggatgccctccccttcacaaagttttgtaaagtataataacgaataaatagctatgaacgtatggtgagtctctacaaaagaaacattcttcactgtttaaacatcgacctctcgttgattagtactgcatctgtttccctgtggagtttccttcttgaaaagcctttttagctgaataagttgtgcttaagcttggaataaaattagctcagaatttgtgtgaccatgtgcgtatatatatatgcaatgttaaaaggaaaaataattactagtgagaattctgaataaattgtattgagtcatttgaagatccttaagcttgatactctcttttgatagaccgcgaattagattttcaagtaaattaattgcacattacactatctattactctatagctagtaccaagtatcaaagaaccttaggataggacagtttcacatgactccgtctacactagttttggagcaatttggtgcagagaacatctctcccaataggcgtcgagggaaatatccagcgaaaacccctaaaagctctctaaataaatgaaaatattacagatatagatataggcaggaaatccattaccatcaaatctccaaatcttaagtacaaacttgatttgggagtaagaaaaggataaattcaaggtgaataaatcaagatgaatacaaatagaaagatatattaaaagtaactcgtgcatcttccttctcatgtttcagtcttcactacatatcgatatatataagtcagtttcagaaacacgctggtagatcctccatcaaagctggaagagcatattttgcgtatttcttcatcccggacaagtcccacatgaacgaaagataatatatgtaaaacataggaagcctgattgcacaaagaaagcatggtcaaagcttgtataatacatagtgcatgcttaagcaaatacggcataaaaaatgcaaatccctcaagaacccccaaatgccgagatagagtttgagtggatgatttttttaaacacaaacctgataaaatcaagaggggatatcatattgcggaagtccctgaaggttatgaaaaagaggataactgcataaaagaacacattagatcactcgtgcaatttgaacatcatctgagcacttacgtagtttctttatatcacaataacatgagcaattgtatgttgattgttgcctttgtaatatttcccttttacatttttcacttcctccagttataaataatattgactaaattatactttgcactaggtttagcgcatatttctactttacaccagagtgttccctcgaaagcttaaaatatattcccacgatatatatgccttataggtacactttgcttgatataaagtgtgattattctaaatattttgtgtttaggacaagattatttgatcaaactcctgaaactttaacgagcaataatttcttaaatgcatggttaaaaaattgatatgcatagatttgccttgaagggcaccattataatgttataagcatattagactaagataaaagcaattaccaatatcaattccaaaatattcaatattatgactagatgaaagatcttgtaacccaaagaagcactacctccatttttaatgaaaccgtcttattaaaaaattacaaatcaataaaattataagtcatgcttaaagaacatttagtaacaaattaaattataataaaataagtgatatttttttaataagatgaatggtggaacgtttctttaaaaaatcaatggcatcatatattaaaaataaaagagaagggagtacctaatttaatgcgtatgaacantcggcgggtccaatccatttgcattcatggcacct

SEQ ID NO: 16477 - DNA, 13374 bp, Oryza sativa
  unsure (1)..(13374): unsure at all n locations
cctgtctataaagctggccagtgttggccaacaattacaattaaagcttgtgagaagtttgaagaaataccggaacctatatgttgtacagcaccggatagaagggagacttatatatccagaatctttaagattcttgccgttgtacattctgtccatatgcaagtctcttgctcttcgtggtggttacgcagatgtttctcttgatgaacgttgtgctgctggtttcagcatgatgatactgcctgcaaaaaagctgctcaattttatttatccttcattgtacagggttgatgaagtattgtcaatggtatgttatatttccttcatatacatcttgttaagttaaaacatcaatactctgtaaataaaatatgaaatgaaaaaaaaaataacttctagtgttagccttttttggatgggaataatcagcacaataacttattagtgttcaacaattagtttggaaggtctttactttgtggttttgagaggaaggttctgttttactttgaaactttagagctattaataattaataatgaaataaatgcatcagtcaccgagctgttttcgttggtacattagaaacacgcctttttcttctgtttagcttaagcactgtttgctaatgaaattgaattttccaggaaccagataggatcggtggatccttgaagcggttgccactaaccatgcagtgcttagacactggtggtctttaccttcttgatgatgggtttaccttcctagtatggttaggtaggatgctcccacctgaacttgtgaacaacattcttggagtcagcttggcaaacttccccgatctatcaaaggtacactttttactctctagtcaatggcaatgcttgctataaattcatcaagaagggcagagcatatttccattttattatgtcctaaaataaagtctcaagtatctctgctaggactgaacactttgttccgtaaattgaatctagttgttaatgtgggtaattccaaactagttttgagttacaactatgctaactgggatatcttgcaggttcaattgagagaatgtgataacgagtactccagaaatttcatgaaaatactagggaccctaagggagagggatccttcttaccaccagctctgccgcgtcgtacgtcagggtgaacagccaagagaaggctttttgcttctatctaacttggtcgaggatcagatgtctgggactagcagttacatggactggatactccaaatccaccgccaaacgcagagctagtcacgatgaatcaagggaatcgccgttccaaatttttggcttattgtaaactgctgcagattcagccgctgccagttcctaatctctcgaaacagttggaactaattcgcaagtcagatgtccagaatgtcttccccttagcagcagcacgctggcaagcaaaagttttattgttaatattcgtccctgtgattattttcctcgtgagtgaaaatacagatgttgtatgagaataattagggcaacagtgaccattggtaaggtatacaacttggtgttcttggaaatgtgctgtacgttttttttttccatttttgtttttattattgttcacatttctagtttgtgccgtgtcggtctcctggtatttttagttctccaaagtttgtcgtgtaaaactcatttttgactgatgatctagctgcatgtaatggggggagggctcccatttaactggtgttcttcggatgtctgttcgtgtcattcattttctgataccctgttttgattctggatgtggctactggttagtctcatcatggtttacgttgttacgaattgtagtcgcatttaaattcaaatgaaatttgctaagataaactcagtaaaaccaactactcgtgcaagagttactgacccatgaatgaagtgacggtgtctcgttgctttgtttagttccgcgagggcgaagctaatgatgttttgatattgagaaaacaaggtgaaaagcaaatattttgtacagggaggtttttttttttaaaaaaatattattgcttatgagctgaatacaccacttatatatgaaaaataatttgagtagggtttctccctaagaactttaggtgcaaaaagaccaaggaaaacccatgcacaaaattaaaaccatgcctcatgacatgtggttttgtgaaatttaatcttataattacggtcatgtggttttgtgaaatttaatcttataattaaaccgtaagttcttaactcaaaccgacagagctacacaaaaccagaactatgcggaaaacaatttaaacaaatggttctattaacaccttcttgtaaagaacattaaaaaaaggtattttctacagcatataaactagtgaaaagaaaaatggagaaataaaatatgtgaaatttcacataaaaaattaaatagtaatatgtactatgtagtactttaaaagaaaccaatgatagtaaccgtgagactcatatacttcatctttttttccttggtatcgtcaactcccaaatcacatgcgctttctcttgaaagtatcagttttccttatctccttttccgttgcaaaggcactgagtttatatttcgtagttgcaaaggaatagaaaattagtaaagtgagcgtagctcaactggttaggttctgtctcatagaagccgtccacatggatgcgcgcttattttcttttttaagaaaaaaaaagaggagagaggttttggactcgtagaaggaaaggcagccagcagcccagcgcagcaaagcgctgtggtaggccctttcccctcctcctccgaaaatgatggcggctcgccgtttttccgccgccacgccctcctctcccctcctcctccgccgccgcctcctttcctttcagccacagcccacggcggcggcggcggaggccgacgcgggcgcgggggagtgggtccgtcgcgcgggggcgctctcgcttctggggctcaccggcgccgtcgccgccagcgccgtcagcgacctctccgtcttcctctctgctccaggtcaaaaccctagaatcccttgcccaatctccattggagtattgtattgagcgcgtgattcgcctgttcgaactgacgattaggatggtgggggggattcggatcagctaacacctatcaacagcaatttgatttgaaacgcatgaccgatgaatctgtgcatccttcctggggagtatgagagctagcattcgcaacgtgtgatgatgatgttttgcttcgcgatttttttgcatcgagttagtgagagagagatggtttgggggctaactactggtggtgctcttgttgcagccaggcgatagagaaggcctcccagaaccagcaaatagtgaatgcgatcggcgcgcccatcgtgcggggtccctggtacagcgcttccatcgccgtgaatcacgcgaggcattccgtctcctgcactttccccgtgtcggcgcctcaaggaaatgggcttctcaagttcaaggctgttcgctcgggaggtagtatgtgatatattgtttttactacttggatgctggctggatagttgttaaattgacatgaattttcttttctgcactaaacttgaattaccaccacttgaacttttaatgcatactctgcatgaatgttcatttacggatggaatagaacatatttttttagtctgcatcatttatgaagtgcttcatatcatgttctcattgcatttggacgaaaagcaaatcatattagcagattcgtttatgatttgccttacctgatagcataatgatataggtataaaaactctctgactataggtacaaataatagctataggatatgatgaacaccacgtatgcatcaatagatctcataatgctaaggtctgaggtgaacttcataatagtcattatccaccatccaaatggaatattatgaatgattggccctgatctttcatggtaatatgaatccagaaacctcctcatttgttggcatagcttgcctcctttgatgcaccagtcaaaaacctagataacaaattcttatttccccctgcaaacactcagtgtgcaaaggtgaaaatagggattgtccagtgattatattcctacacctggtacaaaaccaaagatgaaccctagatgattcctcaagcacactcacaagtgctgccaatgccatggtggtttcctggtattttttttactcaaaatattcaatccaccctcttagacgcccattggcctatgacatttatagcctagcaccagcttccctagtttaagatcatatttgaagtcccttagaaacaaacaatatgagttctcctaaaaatcaacaggagtatgctattttgcacaagattggaggctgggttggccacactttttggatttggataaggttccagccacactcctaaaaatcgaagttgcttggacttgtgctcaaagtactagcgagatttgtttttatgggcttggttgcagtagattttatcgctgtgtttggattcattctgtttttgtataatctgttggattagatcagcttggaaggccaattactagagtactggacttgtggttggttcaatcctttgcttggtttttacacatttacactctgcctaaacggttaagtattactccttatgggctgataatacttgtcgttttggacaaggacacggttttcaaaatacaattttgaccactattttttattataatatatatagaaatatcaataaatatatgattttattgaagtacatttaagatcaatctatagatatggtcaccatatttctaagacaaatattttagatgttatttatagacaaatagccttgtccaaaacgacaagtattatcaacccggagggagtagtaaggtagttcctttattcacaaattttgactaccagtagagcttgggtagatgaaagatctatggtggcaagttgagagacacaccatgcaattattaggtgcagaatacaactgtgttatttcattgttgaacagtaaaacaactttgcagctacaaactagcctaccaaaaattatgaggttagagctattggatccttgcttaagtgtacaacgtagcaataaaaaaaaaagatggcttgtcaaatttcaagtagttggcacttcatgtttgaactttacccgaagcgctgcaaatatactcgcaccggtcagaactcagaaatacttgtccttctggatataccttggatccaatctttttaaaatattttgattgtaaatataaaaaccgtgcatgtagatttgtttgaaaagtattatcataatattatatatttgttttattttacaaatacattaaaatagaaattaatggtcaaagttgcattttgaagatagtgacaatgtccaaaaggataagtatttgtgactggacggagttatattttggtatttgaactaataagcaaactctaaaattctagttctcttaaaaaggttggttccactagggctaggtcagcattgctgtgatgcctacattggcctagtaatgctctttttctcactcaactcacagtaataaacttttttctgtgacaagaactatttagactaaacgttgaatgtagtttgtaaatttggtcctgtcggtgtttctgattgctcagtggatgattttcttggtatcgagacttaatgctcatgctaatgtgttgctactgatattgcattcctccgggagctgttagttcttaaatttatcacttcgagatatttcctccaatgaagtactgtctaactaaagaaatttttgttagacaactgatatcaatacttttgagtggctattaagtcttgatccatgttgtaggagcctaaatcttatcccgtcatgttcttattcttgcagatgagtcgtggttttcatttctgcagcccaatgactgggaaatactcctaatggatgctatccttgatgttcctactgacgatgggaaacaccaaacaattagggtaacaattccagacaacacagcacctcctccagcaattgattgcaaggcatgcaagtcccagccaacgctgacgccaccaccacctccatatccgtcacctccacagaagtgaattcgtctggagaaattcttttggtcccgaaatacctaccttggattagtcttgttcactctattcctcattgaccatgaaagaaataagtactgcagttggaccgagagaccacagattctttacttttgtttttgcaatgatacaacatagaataggttacctgattgttccccactcagcaatactttggaaggtggatccatcaatcactaaactagatttgctttaggacttgctagcgaggcagcgttttggcactcaagttttttagggtttatactacatgatactccatgagaatctaggttggttaattcagtgcttcttcctggttgtccaagccttctggttggcatgtggaaatacatcatactaaatactgatattatgtagcagtttgggtaggaatgtacgatttgaagttcaagaaatagcacctggggtcatttgttaaagctaaaaccaacgtcatcatacgtaaaaaggatacaaaatcaaaagactgaaaatattttagaagatcgttatcttgacgcctcttgtaggcattggagccatctttttcaacatattctagaactctgacaactgaagggaacattttagacaagcccatcaatgtttcataacgagagctccaacaagtgtcacctagcctctgaagagatatttcttgatagtcaccttcctgtaacaactcttcccttccaattgttttcctcacttaactcttcccttccaattgttttcctcacttctttttaatgatgctctcgaagtttttcttttctcttgtaggaactaccaacacattcaacaaaactgatatcatataaaaaaatcaccaacatcggatatctcacaaccaccaagttaagtttatgaccaaaacaatgaatataatatgctgaattattctcataattttagcttgccaaccattaaattcacctaacatattacttgctccatcataaccttagcctctaatttcttttagacttagaccaagatctgcaagtaagagataagaagccgtcatgtcctccacatgaacaataccaacaaattttcttttaacacctcacatttattaacataccgaagaaccaccaccatttgttctttgttggaaacatctaagacactcatcaaccaataagctgaacacatcattgccaaattcttccataatacttcccaataattcttttgcaaagcacttagtgatttctttgtgaattgttggagatagcatgtgattattaagtgaggcattttttaatgccttggcaacaacatcgttttgcttaatagtatactccaacaactacaaataatttcctttatttttggactgttttgattcattatgcccacggaaaggttgtctctgatgcaacaagtatcgacatatatcaattgatgcatttaaccggataagatgctcatttttttccgtttgggtttgtctgtgaaaggccacaggaattgactggtcttgtttcaatagatgctcacaattcttgagtgcctttatgtgaaaactattacagtcaccaaaatgagtcactaatatctctgtcttgttccaagagttgaagtcttatatgacaaatacatcatgcccatggtgattaccttttatgctaacatgagtcaccaatatcactgtcttgttccaagagttgaagccttctatgacaatgcttcatgcctatgatgattatcttttatgctatccctaaacaaatagcagcataaacagtaggctttgtcatccttttcgctatactgtagccaattagcatatttatcaaaccaacatggactgaatcgcctcttattcccaatcaacctatacggacactggaaataccatgtggatgatatggtccccatactaaataatttctccttaatgtgaccaagctgccatattgctcatgtagacttgcaactcctttgcggcaagtggcctaacgaagatggcggagaactcgaggcgctccccgatggaatccgccgacgccatagtgttcctcgtcggtggtgcgctcgctggagatctcgccggagcaaacacaagtgcgggagggggattccccaccagatgcgcaatgcgtgggagacggcgatcctcgacaattgtccacgcgcgtatcgactcggcttgggcccaaggtcggcaatggcgatacgggctctcgattcacagcccattcctgtagcaatggcctctctatccgaccgcgtcaactcgcgcaccttgactcctgtctacaacatctgtgggggatagatgtgagggagctagggcttcgtggaggttggaggagaggtgaaccattacacgaggagagggaggtagaagagtggcctaggcttgggattggcggtggtggcaggggatccaagtggaggagcacaattcacggtgattctcgccgcttcgcgaatgtggtatgaggttggtggcaaggcatggagtatcagggtggaggatagcgagggaggttctagcccaagcaggcgttctgcagcgacggcaagcatccttcggagccatctccacaaggcggccatgaccaagtggactggggtaactagcacaaggcctcgggaggaggagaaggtggaggtcaagctctgcccatggcgtccaagacaggggggatgcagtacaggccagtgcagagggcgtcgacagccttaggaggaggggaaggtggaggtcaagctccgcccatggcatccaagacagggggatgcagcacaggctggtgcagagggcgtcgatagagatgctgcccacccatgctgcagaaagcaagcaagcaaatccctaggtggaacaaccccaaatctaggccaatccccacgatggtatgcccctgaatactcaaaagactttttttgcaatagatgaaaaagctttggtcatgtggctagggattgcattgtctcagtttactgcatcaattgtgctaaagctactcataggaatgaggattgcatttttgataagcaacctagattggtagccaaattggttagatatgagccccaggtcttggttgtattctcatttagaacaccaaaccaatccctctcaaggaacaagctaatccaatggctcgtacacgtgctgcgccgatcgttcccgtgaacgccttgtccatgacattgaggctctgcacggcgcggcgacacgacagctgcacctgcgggtagctccacgagtggtgttgcagcaccttcaccaccaggtcctctacatagtcccacacctgcctgacaagatcgtgcgggacgtgtgcaatgctctcgatcttctggtttagtagattgtggagcaccgacctcagcatgacattggggaggttgatgcccttggtctcctcgagcacccgcatctcctctgccaagaatggctcatcgtcactcaccctcgtgcttttcaatgacgcgcgctgtgccgtggtggtggcggtcgcccgcgtacttgttgaaatctcccctgatgagcaccttctccagcatagatgatgtggaagaactccctcaccgcatctgccacggtacagagtttcggtggcatctggctgagctcgtcactgctatggctaagcttgtcgttgatctgcttgatgttatcgtttagtttatcttttcaagtttgtgctgcatttgtataaacatctgatgatgttttgtaagacattagatctataatacactatcatttgtgtaacatagctagtcttggataggggtttaatgcacaatttagttctgaattctggttatgaatatctgggtgtgacaattgtttcctggccaaggattaattcctccacctggagtgccttgagtaatgctttattcatggtggatttctcaagatccatgggtggattatgagaaagcaagattgttgtggaggttagggttcgttcttgggctctgggagtttgaagatgatggaagacaaagaggccaatgaatgagtaagtttattttttcgacatcatagcttctcgggtgtgctagagttgtcagcattgaatgagcatttgcgtagaggtcgagggttactgttagtgtcatagataaggtatacctcatatacatgtacttaccatgtctaggaatactgcatactgtcaatggagtagattcaacaactatgcttgtagagtatagggaatgttggtaccagggtatacacaagataggaataggaaaatgggagacccgagatttttacaggtttgggcccctggatgatgggtaatagccctactactattggacgaagccggtgttgcctttatatatcaatctctcgagtacaaagtatatagaggaaagcctaatctaggctgccagtatattggcgtaaagctcgagcatggtggtcggcggctagctgtagttggcttcctcgagtagtgactctacgagattgatggtggcttgtattggtttgtatctctcttggcttgttgggatgtgttggcttatccctcccttccttggggtcctgtatttataccctcaagtgtccccttatctaagtagaactaggaagacaaatatgtgtacgattcgagtagttctggttaggcccaaataggactatgtttctctttatttgagactcctctcttatctacttaagagttttgccatacgtatgaggtttgattccgtacaggatttggtatatggtggtccccgccgagctaagtacacatgtataggatatcccatatctaggacactgataacaatctgaaaattacacgcaagacgcgcgagtggtgatggatggaaggaaagctaggtagctagtggctacgctgatatccttttaaattttttttatagctatttgaataacatgtaaccaacgagggagggaatgtctcatggagagtattattatgcgtggcagctacacgcgaagtggagtactaggtggagtagtagttatcagacatggtcggtgcttgccgcgttaatctgtccatgatattggcgacgacttccctggattcccggagcagtttgatgcttttcttgagacagtcacgcttggcggcggcggcgggtgtgggcaccaacatccgctccactccgtccatgttattgcccatgacctgagcagcgagctcatcctcgagatccttctcagcgaggcgcttgatgctgtaaaggacgtgcagggccaagccgtcgatgacgcggagcacgacgctgttccagtacgcggcgagtcgcgccttgaggtcgaaggcctgcatggcgagctccacctgctccggcggcagctggtggaggtgcgacacgtcggtctctccgaaccccgggagggcgaccgccgggggcttggagaaagagcgaagctagcatcaaaacaaggggggtgcactaccattgagaatctagaaaatttcagtacaacgctatacattctagtgtttttaagtgagaaattaggaatttagggggttcatgtgcaccccccaaacactatataccttcgccactggcttggagcggtcctccagggcctcgcggagcctgctctggccatccatcatgctggtccaggtcttgatgtactcggggttcgccgtgtagttggccaccatctccatgtcgatgagctcgttcacgtaccgcgccgaccgctctcgcgccttgtccatgaagctctgcacggcggggcggcacgacggctgcacctgcgggtagctgcgcgagtggcgctgcagctccttgagcaccaggtcctccacgtagtcccacacctgcctgacgagatcgtgcgggacttgcgcgatgctcttcaccttccggttgagcagaacgtggagcgccgacctcggcatgaagttggggaggttgatgcccttggtctccttgagcacccgcatctcctccaccaggaacggctcgccgtcggtcgcggccgccgccgggagcctgcgcgcgaagccctcgagcatcttggcgaggcgcgccgtgccgtggtggtggcggtcgttggggtactcgtcgaactctcccctgacgagcaccttctccagcgacgcgcgcatctgattgacgatgtggaagaattccctcaccgcgtctgccacggtgcagagctccggcggcatctggccgagctcgtcgctgctgcggctgagcttgtcgttgatctgcttgacgatgtcggggagggaccgggcgatgattctcgcctggatctgcgtcagcctccgcgccagcgtcgggacgcccaccatggacttgtcgatcctggagagcagagggtgctccgcgaacagccgcgccttcgccttccgggccttcttgtaagtctcgtcgccgatgcggttccggacgcagacgtagcccaggccgatgcgcacgtcgtccacggtgaccttctcgagcaagccctcgggggccttgtcggacttggtgacgacggccagcgtgcggatgccggtgcggtccacctgctgcgacatgcngatggactcgcacgtcnggaagtccacggtggcgagagcacgtngaagattatgctttccctgggcggatgtacgccttgatgaatgcacgatctggtctagatggtttccgctggcctttacggcaccccggtgaagcccgcaagtcaacaggtgaagtcgncaccgccttctggcaacaacaggtgaatggccccttgaaaattccttgcccaaccgggaatttggggtgggggttttaatggcttgccaacctcgccttgaagaagcacccaccggccgcctttactcagacccaagcaagttctttttgtccggggtttgaaccaataaccagggcaccgtgtaaaatctctcccccccgaaagtttatccgccaaacaatcaaaccttggattgtcgttgaagggccccacccacacaaggtggggagttttccccccggtaaagtaaattccaaacggcccccggtacaaaaggcgggatttgttttataaaccccctggggcttctcagagccccctataagcccccccaattttccgtttgcccccgtggttttttcggttttggggggtgcaacactccatcggggaaacaataaaaaaaacccccccacccctttttttataaaaacataggccgggttttttttttttgggaggagggggcgcgtaaaatattgggggattaattt

SEQ ID NO: 16478 - DNA, 768 bp, Oryza sativa
  unsure (1)..(768): unsure at all n locations
gagaaaaattttgtanacccaacatcttgctgtcctgcaagtcgactctagaggatcccccttggcaacaccatctggttgaacgtacgacatatttggttcatcgaatggtctgtcaaccttcttaattcgcataggaagatcagtaaacaatggtacatcgtcgaactggatggaatcattggggtctttgatgttgtcgatgccgacgatctgttgttttccggatatgacaataggttttctttcatctgaagggtccttcacataaaacacttgagccacacgctctgataaaacccatggatcatacttagggcctgttttactgtgatcgactatcgttagcccgtagtcatcaacggaaacccctattgtgtctttaacccattcacaacggagcacagggatctggatgtttaggccatagtccagttcccttatttcttgaatggtcccataatacgacctcttttctccactcgtgtcaatcgcttcgacacggatcctactgttttgtgcagtgcttttcatgtccttcgtagtcgtactcaaggtaaatccattgatgtcgtaaccttgccatgaattgacaatacttgaaggcccacatgccagtctttgtaaagtaagttcctccacagaatcaccaactggcaggtttagatctttcaaccaccgaagaaagcgacgcttgtgctctcttgatatccaatcattggaccggcctgggaagcaggctttgatttcttctaggtgtcgctcaat

SEQ ID NO: 16479 - DNA, 5648 bp, Oryza sativa
  unsure (1)..(5648): unsure at all n locations
ggtgtcagaagtccgccacgaggcacgtcggctaagcgtgaagnagaaggtggcgtagtcgagcgggaactcggcgagtcggactgccgggccgagtcgacggtggggcccgccctcgccgccgtggctggcgtggtgacgatggtgcagagcgccccgtgggtggcccccagcagtgtggtgtccaacgccggtatgaggtggccctgcgccatgagcgggacgaacacgaagtgcgccgccgcattgatgcagatagctcgtgttctcgctggcgatgtattgctattgcttgtgcagctagctgctgatccatccatatgtgtgtgtgcatgctttaaagagagacgtgacggccggtgatgtgttggatcgtttgtttccatatgccggcgcgcgccgccgctgttgccaccgacggagctggcggtgacgacgtcctcaatgtcctgcagccactgctcgccctcggccggcggtgtccgacgtccggtcgagcaccaacctcgcctcgccgcgccgccccttcatcgccagccatcgccacgacggcgtggatggtccgcatggcgtcgtggaagcgggaggtgcttcgaggccattgcggacgagctggaaggaggggatagagagagaagtgagataggagagctgacatgtgggcccaagggtatttttgatattttacgcgatttctctctcctcttcaaccggaaattattattttaatcagcgcggtgtccactggcaaattaccacgtttatggagtgttttccccccaaaagtgagtttggacttatcctagagataaaacacacacaagcagtgtcctgtaacaatgcctgattctaatctctaacagaggttagtatctctaaccgttataagttcggagcctagcaaagcaagaatacccagctcctcaatttgtttactgaaacactcttgctaagcgccctcccttcagattaagatcgaccgtccctcttctccatgtcaatagtgagcaccgcagtcggctctgctaccctacccaagtgccgcctacgcgccccccattctcgatagccaccaccactactacaatagcaaatttttgcgtgcggttgtttcgcccgtctggaatgattcgtctgggaaaatcacgaaaatcaaaatccaaaaaaaaaataaaattacaaaatcctaaccctaaccctaggtcgaacggcggcggcggcgctgctcccgcccgccacctcgtcgtcgttgtcggcagcggccccggtccgcccaccgccacctccccacgtttgtccgccgccgccgagctcgctgcttcatcttcgtcgtcggcagtggcccacgtccgcccgccgccgccgtgtgcacgacgctcccggccgccgcgtcgtcgtcggcagtggcccctgtccgcctaccgccgcctccccacgtctgcccatcgtgagcccgctgccacgcgcatgccgctcccacccaccgccgccgcgagcccgccgctcccgccagccgccgtcgggcccgccgttgagagccgccgggaggagaagaaggaggcgtcggccatgtggtgagaagaagaaggtgagagagagagagagagagagagaggaaaatgagaggaggagaggaaagtgagaagataagggggagagagagaggagagaagggggcccagggggagagaagaaagtcaaaattttttttaataggatgggagggaaggctatttttctgtgcgggtagattaggaggcccgcacgcgaaaatagggtaatttttgcgtgcgggcctgttaagtaacccgcacatgaaaattgattttcgtgtgcgggcaacgacccggcttcgctccccccatttttccgtgcagtccaacttatggactacatggaaacaaaatggggtggcgtccaggaaaatcaatcctgtagtagtgcaccgccacctcctcccccatgtgagcactgtgatctaccccccacctccttagcatcgcccaccctgatctagttatttcgacctccggggtgccaggtccggcctccccaaggcagcgagaagggacgacgacatgcctcctcattccccaaccacgtccgcccttttcacagcgatgaggagggatgctattgtggggtcacggtacccgggtacccacggttgggccattgggccgcataacatagagagggccgcgtaggtctgagtttatgcagtgcatgtgtggctagataaggcaaccgatcttatctcatgtaaatagatggtaggttcctatattataagtgatttgttacctaccataattggccgcctccaagtatatataaggaggaccgaaaaccctaattcaaggaagaggacgatacgttctacgtgctattcacacgttatgctgcggatacttagatacaaatctaatctcatacaactggacttaggggcgttggcgcgcgaccagccccactccccctagtctctatactactactatatactctactactatgatatatactactattcctatatacatatgtatatacatacatgtaactttgtatacgtacatacaaagtttatatatatgtatataaatataattttctatatgtatatattttataaaaaatatatacatgtatacaaactttgtatacatacgtatacaagctttgtatacgtgcatattaaaaacaaaaaaaccgagaaagaaaaaaacatgtatacaaagtttgtatacgacatatacaaactttgtatacgtcgtacaaacatataaaaacaccgaaaaaatgaacaggaaaaccaaaaaaaaccaacaggaaaaccgaaaaaaaaccaacagagaaccgaaaaaacgaaccggtgccatgtggcccttccccatcgcgccgttcagccctccccctcccccatcgcgccacgtgcccagtcgcgcgcggggggcgccaattagcaatttcgactggactagggcattacccctgagagcctgaatcagtataaactctgtgtaaccatatctccttaatttcgtgcaccctataaattatattgcggatccagagaatcgactgttgatacgccaggtagaggggcgctagatcaatcatcaggaggagatggcttcaatcaccgattgataccgtcgacgagatcgcgttgatggcataagcagcgcaggacgatgcagtgcacgcctgcgacgtgctatcctggccggggtggcgatcgcgcaagtcgtggacgcgtcacgagctggcgcgaccccaggctgttcatgtcggggcatgcaggaaggcgcggtgggcgacgcagctcgccgaccgcccttctcgtcccgtgcaacctcccgcatcatgattcatgcttgcttccccgcgcggccccggttgatgccgcaccttgccacgcatccgcttgaccgtcgtcggagctgcttcaatcacgcatatgcgtcgatggatctggcgtcgatgcacgagattgatcggcatgcatgcacatctggcaaacagagtgcatagttgatcgatacatgcatgcccattgcatctacaaaattagtttttttaaggctaatctgagattgttttgcttgtttgcatgtcccatgcgacctacgcactactggaaaaagcattttcgccgacgttggcaaaaaattttcgcaagcggacatacgcttttgagcaaatacctcgccggtgaaaactagaaccggggaggagttggccgtccgcctacgaagatcggttatcacaggtggaccacataaggggccgcccgcgataatcatcttcgcaggcgggatacttataagcgccgcctgcaatcttcgcaggcgggcagcttatgtgcgccgcctgcgaagattgtttttcgcaggcgctcattatgtgcgccgtctgcgaagaataattttcataggcacccgttatgtggtccgcctgcgaaaatgtcactatatagtcttttttctccccaagccctgttcattctatccggtgtttctttctcctaaaacaactaaaatatagagggggggggggggaggttttgaacttcaaatattggggaatttttctacggtggttagatctactcatttccactctatgtatacattttttaagcttttaaacctcaatttgtgatggatctatgcatgcaaaattgtgaaggaaaagctccatgtttttttatttactttattttgatatgtttgtgtaggcttttaacttcaaatctcagggggatttttctacgatggttagatctactcatttccactctagatatgtaattttttttatgcttttagaccttaatttgtgatgaatctatgcatgcaaaattgtgaaggaaaagctccatctcctaggtctagatctagacacatagagaagaaaattttttatgtatgttaatttggtcgattaaaaaaattatttgtgttatgatgatatgattttgttagatttttctatgatattaatttagtatgaaattaaataatctttgttcttatgaatagtgctatgtcatttttagtgaaccctagaaatttggtatgaatagtgtaaatatttgttggtcattttttgtagagatatggacaggcggcaatggatgtatcattcgccgaggtatttggctttatatagggaagaaatgtaaatttattagtattgtgaaggcacacgctgaacagaacaatatgacgaagataatttgtctatgtgctgattgtaagaatgaaagggcctgggaagatgttggtaaagtaaaggaacacttagtaactcgtggatatatggaaaaatacgaaatatggacacgtcatggcgaacaagaagtggccgggcctgaaaaagaagttccgacagaagttgaagacatggtgtacggcgttggttgtggtgaagacaaaattgatctagaggaaatgttacgtcatgcagaacctgaggtgctgattgggtcggctagaggtttaaataactttgaaactttacagaaagcagcgaaggaagttttgtacgaagagtcaaagggctgtgacagtgagttctcaacactacggccagttcttgaacttatgaggttaaaggtgagatatggattgtctgatagtagtttcgacagtctacttgaactttcgaagaacatgcttccgaggcgtaactcattaccatacaacacatatcaagcgaagaaactcatatgtcccctttcacttggtgtagaaaagattcatgcgtgcgttaatcactgcatactgtacagaaaagagtacgcttctttggatgaatgtccaacttgcggtgctagccggtacaaatcaaatagaaatactttcctagaagcgtctaacatattcaagggaactaagagaaaaatcccgcagcgtgtgatgtggtactttccagtcaaagaccgcattaagcggatatgctcaaatctaccagatgcagatctaatgcgctggcatcaagaagggcgcaagaaagatgggatgctccaacaaccgacagatgctcatcagtggataaactttgatgctaagcacggggatcctctaaaatcaacctgcnggcnntctnggaaggagaatgatcagtttcagtggcgcgcg

SEQ ID NO: 16480 - DNA, 7651 bp, Oryza sativa
  unsure (1)..(7651): unsure at all n locations
tacttgagagaatacttcacagtgaaggccatcatcttcgtgatcattaacgattaccccgccatgttttcagtttcagggcaaattaaaggtaaaacaggatgtgtgatctgcttgaatggaacgtactataggtaccttccgggttccaacgagtttgtgtacatgcagcaccggcggttcctacgcacagatcacaagtaccgcaagatgaagtcagaattcgatggcattgaagagagtgatcctccacaaaaatatacatccggggagaaagtatgtgaaatgacagagaaaatagtttgcgaatttggaaaagggactaagaaaccttcaaagggtacaaagcgcaagaaacctgacaagaccaagaaaccagaagatagaaagaagccaggtgatcaactccctcccccattcaagaaacattcaattttctttaagtacctcccgtactggaaagatctagaggttcggcatgccatagatgtcatgcatctagaaaagaatgtgtttgacaacgtaattgaaacattgttggacataccatagaagactaaggatggtctgcaatcacgacttgacctagtcgagatgggaattagtgaagagttacaccctcaagaaagagagaagaacggcaaaatatatatttcaccagcctgtttcacaccgacacctgaggagaagaaatcattttgcttatcacttcgtgatgtgaaagtgcccataggtttctcatcaaacatcagtcgactagtctccatgaaagatttgacgttatctagttataattcacacgactgtgctgatgcgaaaaacatatactggcctgggagatctgcttagctccagtgcatgtccaaaggttgatgacatgcgagcgtgccagtcagtttgatcctgcaactgacaagatatgtaaaaaacagataaaaaaagccgattggctgacaagccgatggagtaattccagccgatagccgaaattagccgatgccgatttcagtcgatgtcgatagggtttttagcaatcggctatatgtccaatgtagataatgatataaaggcgatcggctgatgatgataaacaataataatatagcaatataatccagtagaaaccaatctgattcgaagggtaaataatacgctggaggtccgatgtcataaaatctacaagattagataaatcaatgaaacttttgttgtcatcggctaaatccaacttttatatatatatatatatatatatacatatatatatatatatatatatcatatgctatccttataagctgatgcaacatccagataacttatcggctagcaccccgataaaacactagcatgaacctatcggctaaacaagacttatgttatcaacaacaatctagtaggtcgaacctaaccgatgcagcacgagattgtatatgataatctaatactagatgagccgatagatctgtctaatgtgatagatataacaaatctatttagaacaacattatgattgtagagatatatcagctaagatagaagatcagacctaaccgagacagtcccaactaaaccgatgcgtctctaaacacaatgcaattagagatggaattgagatatcaggtaggcaaatatatcaaccaaaccagagcgatccaagagatcgaagcagccgatagattcaccagggccggcggaacgtaggacttaccccttcgccggagatcgaactgaaccgatgcagccccgtgtcaggtgccaaatttcaagtaaaaacctcaggaaagagggtggcgatgcgccgagagtattattgatcgagagataaattacaatgaccccgggtttacatatttatacccatgggtagatactagtccttgtaggacaagaaagaaactctcctaaagataaaaggaaaacataaagtcctaatcggacactaaacacactttcctaaagataaaaaggaaactaacagactattcctaattaatagataactgccatgctgcatcctcattgaactcggttactcttggataagctttctttaatagattaatttccttaaccgaatatagtaagaatccgactatggcgacttgataactcccatcgactgattccaggactctgaagccgatactgattttaggccgatgacatcctcgaggtttaccaaatttcactgttaacagactgtcatgtcttgctcaccgtgtttcttgccattgcaataagtgccataaaaccagaacatttgaaggttgctatcacaaggttgtgctgcttttttaatgcaatctcacagaaggtcattagtcatgatgagttagcaaatcttcgtacattcgcacatgagacacagtgccaacttgagatgtgtttccctccatcattttttgatatgatagagcacctcatcgttcacatagtgccccagatggatgcacttggcccattgtacctccatcaaatgtggtcatacgagcgttacatggcggttttgaagggctacgtctgaaatcatgcccatccggagggatcaatggttgagggttacagtacagaagaggttgtcgagtgctgtatcgattacctcaaagatggaaagacaattggaatacttgctgtcgacgtttgatgtctcgactacggtatttggacagtatggggatcgtcggtgctaggatatacgcgagactgaggtaaaagagacggagacgaggatttttatacaggttcgggcccctgagcggtcaggtaataaccctacatcctgttggccggagccggagttgcttttattcaccataatcgcaccagtacaatatgtggaatagcctatctaactgttgtcgacatggcggtctgaaggtctgactcgtaatcgacaacagggtagccttgctcctcgaatccgtgtccggcgagatcaaagatagcgctttcatctctcctgacggtatccggagacaccgtaggggaatagccatgcctatccctgaagtcgatatccggcggcgtgtcttggcgtatgttggcttgtatgctgtggcttcagttgttccgaatattgtggtggttgttgattgaggtggatctcgatcgtggtgaccatgttgatcgtgttgatcgtctcctggtcagtcatccccctcctcctagggggtcttgtatttatacccataggtgtccccttgttcaagtagaacttgggaaaccaatatggatacaatccgaatagtccttgtcgtttccgtgtagaactctggttgcctttccttattggaactcctcctatatccgaaggttgcttccgtataggacatggtatgtggtgagccctgtcgagatttagtcaactactattaggtatgtggtatccataaccctgacagtagcccccgacttcaatgcacatgaacggattcctattctcgaccactgaccatggagtaactattatcgagctcacgtgaccgttctcggtgagtttagagataacgttagacttcctttatcagcctcgtgcgggcaccgaaagggtttgtctgagtcaatctctgatgtcaaccaaggaagtatagagcagacgactaagtctcccatcttgctgtaatcgaaaatttggattgaagtcaagaaattttatctcggcgggtacaccatctcttcattccgtattccttgtcgagatccagcaaccgttctcgagcgatcgagaaggcgtagagtctgcgacggagccttgtcaacatttgtcgtactcgccttagtcgatcttggtgtagaactatagagacatgagttttcaacaaatgtcgaatagaattttcctgaaatcaatactcataaaagaatatcaaatagaaagagcccccgagcgaatgctcaaagggtgacatgttataatatgtatggtaaattaaaaatgaattaaatttaccgaccaatgttttgtgtatgagcgtcttctcttttaccgacttcgactagtcagtttgttgagttatgcactctccctagcctctagccttgtcgtcggagaatcgttctcgagggacaaggctcttggacctttgaactgcctcggttgaacaagtactgatcctagcccccagccgtgaagttggaaagttaatttccgattacgcggcttggttaatacgcacggggagaactcttacacgaccacggctgacatggtctttcgtctctaaagaatccgacaaggccttatcggctccgggcatccccagccgaagatcccttaggttcctcggaggccttgtcagcatggcgtaaagggacagtaggataggtgtcaacgctaggtgtcatctgggtgagggatctctgggtaaaacacttggcgatcttgtgtacctgataccaactttgttggagtagaggtagtaggagagtcgctgcaccactggtggaggaccaggcagtagtcgtgactcgaccacttgaagtggaaacagtgggtgaatcgctacaccgctggtcgagaaccagaggtagtctaaacttgaccactagaagtatgggtagtgggagaatcgctacaccgctgattgagaaccaggggtagtctaaactcgaccactagaagtaaaggtagtgggagaatcgctacaccgctggtcgagaaccagaggtagtctaaactcgaccactagaagtaaagatacgagagatcgctacgattgactggttgagaaccagtgagcaggtgtttctcgatcaatttgaagtcgtccgaagtcatggtgcgaggactgctactctgctgccgttcgaagatcaatcgtagtcgtacctcgaccatctgaggttgcggtgcgagagattgctacgtactggttcgaggaccagcaaacgtgtagagttatctcttgaacaccaatgaagtttgcggtgcgagagattgctacgtactggttcgaggaccagtgagcgagcagaattatctctcgaacaccgatggaagcgctagagttggtttgttgcaagtgtatctcatgtggccagcatgactcacgtacccaacttatagcatatacggatgtccgttcgcaatcatgtcaggtgatcaagccgacggcgttcacgaggaattattcgttaacaaccttctctcgagtagcccagcgatggccggtgctatgagataggtcgtcggtcttcgttggcaggttgggcgcgatggctctgcatttgtcgagatcgttctcgataatgcggcgtactcgaccacatcctactcgagtgctcaattgttcctttgtagatacatgccgggtgtattttgtcggtccagccgatgtcgtaggcggaggtctgggcagttgattctccgcggtgttgacgtcttgaagtttggtcgatctcgagagaacgagttgttgacgacgatggttccgatctcgtcgggagacgtactgtggtcgagttagatctatccatagtcgaagtcgtcgagtagcttgttgtcggagactccatctcttgaacccatctcgtggaaatcctagagcaccaaaatccccctacctagcgcgccactgtcgacgtttgatgtctcgactacggtatttggacagtatggggatcgtcggtgctaggatatacgcgagactgaggtaaaagagacggagacagggatttttatgtaggttcgggcccctgagcggtcaggtaataaccctacatcttgttggccggagccggagttgcttttattcaccataatcgcaccagtacaatatgtggaatagcctatctaactgttgtcgacatggcggtctgaaggtctgactcgtagtcgactacagggtagccttgctcctcaaagatagcgctttagtctctcctgacggtatccggagacaccgtaggggaatagccatgcctatccctgaagtcgatatctggcggcgtgtcttggcgtatgttggcttgtatgctgtggcttcagttgttccgaatattgtggtggttgttgattgaggtggatctcgatcgtggtgaccatgttgatcgtgttgatcgtctcctggtcagtcgtccccctcctcatagggggccttgtatttatacccataggtgtccccttgtccaagtagaactagggaaactaatatggatacaatccgaatagtccttgtcgtttccgtgtagaactctggtttcatttccttatcggaactcctcctatatccgaaggttgcttccgtataggacatggtatgtggtgagccctgccgagatttagtcaactactattaggtatgtggtatccataaccctgacacctgtacctcaacacgtgggtagattgactggcagggggacaataggaaagaagagatttgtcacccatgattacaaatcattttgagaagctcacttcagcattcttcatcagtttgctatcattgagccttacatcgatcaacatatcgaattactaagagctaacaataagggacgcacaaccgaatggataatgaaagaacacaagcgtgtcttcatagattggttgcgagacctagacttacctgatggagaaacaaccgagcaaataactatgaagcggttggcttgtggtccatcaactacagtcaattcttgggagggatatgacattaatagatacacatttagtacaagagcctgagatagtaagaccgtaactcaaaacaacggtgtttgtatgaaggcaattgattcagggggaaaaacaatcatactttgggtttattgaagaaatctgggaaatcgactatggactcacaatgcaattcctcatatttaagtgccagtgggtaaaatacccgaacagggtcagtattgataagtttggtattactattgttgaccttgcgaatgtgggtcataaggatgacccttgggtactcgccaatcgcgtggcacatgtgttctatgtgacagaccttgcaaatttgaagaaagaaatagttctatcaggaaaacaaaagatcttgggagtagacggggtcgaagatgtcgaagattacaaccagtacgatagtatgccactttatacgtaatttgtacaaaagattaagcttgtagaggcatcaactcagaagaccatgaagccttacatgcacaaggacggtgtggggaaaaatgttaaagagtaattgtttgttctgtaataatggtatgtagggggctatatgtactcatattgcacattattatgtttttactcacaatgcaattgttatgtgcacttatcatctttattataatatttatatggacttaccatttttattatattttataaaatcaattacatttttaaaatgttttttattaagtttttaatattttgtaacaatttttgggaaacttatcatctttattacaatttttatatggacttaccatctttattatattttagaaagtcaattacttttttaaaatgtttttatcaagcctttaatatttcgaaacaatttttgggaaacgtaccatctttatcacaattttaatatgggctcaccatctttattataatttataaagtcagttaggggatcctctaaagtcgtcgtgcgggcntgctcggaggggatnctcagtgaggtgaattcaaagggcg

SEQ ID NO: 16481 - DNA, 5702 bp, Oryza sativa
gcgggcctcaaagggcaaaggtctatctcttcttttttgggaccgtcggtaattgccggttcttcaaggaggcgtcggtgcttttttaatggtgggcggagcacatgccccttggttcgaaggtggtcatcgggtgaacattttcgtagtctagtccgagtgacgtcgtcgaccgctcgtcggcttcgagcgaacatgtgcatgtgggtgtttatatatgtgtaaggggttggtattttttttttatcaaagggctctaaaccatccattttcataaaagaaatgtcgcagtttcagcagaagaaaatgaaagcagaaatctcgttctgcgtctagagtttataaaagcaacaacagtcattcaacagttgtctgtgaggggtttgtatatatggatggaatgggaatgaggggtcttatctgttgattgtgggtaatacgggtggtatgggtgcatgtaaataatatatgggtgagtgtgggtatatgttcaaattttttttgtacaccatgtggggaagatatgttcaatttttttttacaacatgtggggaagatatgttaaaaatttttttgtacaacatctgggggagaaatgttcaaatttcttgtgtataacatgtgggggagatgttcaaattttttttcctatcatatggggggagatatgttcaaattttttttactatggcaacatagtggtctatgtgaattttttttttactatggcaacgtagtggtctatgttcaattttttttgcacatatgacaagtaggtggtataatctatttttttatgataagtggcctcgataatttaaatttgctactttttatggcctcgatattaattatggagttcatttttatgtttgaagtacgaaacgatggccgatagtactaaaggaaatgaagatcaggctgtaggggaggtggagtcttgacaaccgccagttgagccgtcccttgctattgtggttgctccgcaaccaacggtgctgccgtccgatgggtccgacagcgacgtacccaacgaggacgatgagtactcgtcaccaagtgatcgttgtccaagcccgaaacggtggtaaaaggatgagggtgaacaaggtgataaggactacattccccgtgagaaaggggtaggtacaattaagatcgtaattgtgtgagtgataactagtagtgagtagtaattcgaaagtttcatacctactcgtagaaaacggggccacggagatcaaaacggcagccgaaaaagaaagacaaggcacaagaagacgcggtcccagctaagtccaccggctcgaagaagaaagataagacgcaacagccgaagacacaaccatatttcgaagatctgcacaccatatatcatcgggaaaagatggacgtcaactatatcggtgcttagtgcctgtgagtatgagtgtacattaattacacgacggaatctatataatacataaccatgtgattattactaacaaactttttttgtaggatgcaatacatggatgctaagaagctaaaagaacctatcggatttctagatccaactaggatatgtcaaacacagcataccgggcagctatcaccacagttagagcagctgaaggacaagactcccgaagagatagctgaatacaagaagggattgcacaagcagaaactgattaatgtcgcacagtacattgggcgagccttcttgcactttcaaaataagaaggtcgtcctggccgcttataattttaagtaagtccggtatacatttctcttatacatatgtgtcttattgtatccatgactaactgcactgttgttaatatgtagcgatcattacatcggtttaatcatctacccgaagcactgcaccgtgacagtcttggaccctctcgattactctcatgactcatacaaacaatttctaacaatcttacaatagtaagtgattctgacacttgcatgtctgctatgaatatattataattaaatctcctccttaatgtgaaacggtacaaaatccatacagtgcgtacaagtactacaagttcaagggtggagaacagattcgatcaagggagaagctgctagtacatacatattggccggtaatactccactcacttaatgtattccaattgtttcactaattgcaaaatttaactattttcttctatgatatgtcatgaagtgtcacaagcaacctagaggcactgtcctcagcgggtattacgcatgcgaattcctaagggttaatgggaggtacagggttaacccagaggatgtaagtctctagactatatggattagacaacttcacatatagatgatactaatatattgtgcttatttccatgcatgcagttgccaagggaggagcaacaaacaagctttgacaatacagccattaaaaatatccagcgcgatctctaccacttcatccaccgtgagtgctgtcatgtggaaggaaagttcttcgacaaagagggtgccctagctacaagtgacaaatacaaaaatcttcgggagtgcagcaatgctatgccataatgtaattagatagcgtatttgaagtgacaatgtaaaaaatattataatattttgacgatacttttcccttttgcaatatatgtagatttctcagtatcaaaagcttgttatttactaatattatttatgcaacaattaattaattaattgaaaaataatttatgagaaaattattattgtaacaaatttcaaatatttgtacctatcttcgcaggcggcatttttttatttttgcaggcggtcatgctatattttcgcaggcggaccatatagctgttggaaatttggtcataattcggcatattttaatccaaaataacaagataataaacatgatatttacaatgggatttgatccagtgataatggtgaatgtaatcaacatgagcatgcttaatgtagaataagcatcaacaatcacataataacacaatgttgacattgcgatgaacatcaacagtaaaacttctaattgaaataatgtaagaagggtataccccaagaatggtcctccgctggagtttgaggcagtattaccttcggtgatgttgacgggagccctctttttcttgtatccagtggtggcggtgtctccagtgttcgacatattggtgaaggtgaagtagatgttgacgaacagtgagtagtcgcgccttacgcttccaaaaacctgatcgcccgcccgttcgtgcaaacgttgcaacagcgcgtggttttggaggcctactcttccaatgcgtgtgcacacactcgtcgggatgggattaccgtagcagcaacagcgttggaaaatggatgaaagtgtgtctcactttctcttttgggagatcaaatccattctcattttatatgagaaattcaagatgaagagtaagagtcatggaaatcggaagagctatagagtaactaattctcatcaattagccattaaccattctccactatacaaccatcaaccaaccgtcaattatgagtaattgatgtaggttacaaatggaataggaagaggaatagagcaacttattgtgatcaactagccatgaaccatcctccactacacaaccatcaaccatccatgaagtaggagtaattgatataagttaccaattccctaatcaaatggattaattctcaaaactcttgatcccattgatatcccataagaggatgaatacacatgaattcctagcataatgagccttggaatttatatgatttaattgatttaattggatcaattacccaattaaatctaacaatccccaccaaatttcaaggctcatgagaatgctctctattccatagcagcttttatataccagtgttttggtgaagactgttaagttgaactttcacctagaaaaggagctacaccggaccacaactgaacaatggactatgccttgaattgtcagtcttgtgcagttaggtttcactcaattccataactgatactaggcaaccgttagtattccctcaggttggagcttataagtcatactccaggcctttcatgagtatctagagatcacccaaatctcatagactgtgactagtagtcgaactcatataggtgtactccttctaatatgttttgcaggtcaacatctctgcttaataaaagccgaggcataagccatcctaccacacagagtagaagagaagtacatcatgaaaatgagcccatttaagggtctcttctctcggttacacaatagtttgtttcgccatccaaattcacgggatctccgatcacaatggacaggtttccactattgtgcaactctaagtgggtttcaagcccatttccctcgatgcactgtctatcacattacgtggtagccccttggtaaactgatctgccagatttttagctgtctggacatagtccagtgctatcactccagagtttttctgctttctgacagatttcagtcttctcttgatatgcctagatgacttcatgttgtcctttgaactattcactttaataatcactgtttgattatcacagttcattaggatagctggcattggtttttcaaccatcggcaaatccatcaggagttcacgaagccactcggcctcaactgtcgcagtatctagtgctgtaagttctgcttccattgttgacctcgttaagatggtctgcttgcaagacttccaggaaacagcgccacctccaagtgtgaacacatatccacttgtggcttttatctcatcagcatcagatatccagtttgagtcactatacccttccagtacttttgggtacccggtatagtgaatagcatagctcatagtgccctttagatagcgcattactctttccagagtctgccaatgatcatctcccggatttgagacaaaccggctcagcttgcttacagcaaatgagatgtctggcctcgttgcattagccaagtacatcaatgaaccaatgatttgagagtatctcagttgatcccttgctattcttcggtttttccttaatagcacgctggggtcataaggagtaggagctggcttgcagtcactatatccaaagcaactcaaaatcttgtccacatagtgggattgcacaagtgtaatcccaccctcatctcctctcagtagcttaatgttaagaataacatcagcctctcaaaaatccttcatttcaaaactcttggacagaaagtccttgaccccctcaatcacattgaagctgggccccaagatcaatatgtgatcgccatataagcccaagataactccttttccctcaccttgcgataggacacacatttatcaactttgtttcccaccaaagccacgccgatgtgaagtgtgttgccacaacttctcaaaccacctgcttatgtgcctgctctaagggcataccacgtagtttacaaggtacacaccatttcctcctggactcttaaacaaacaccgcttggggggcacactaaactcccccctcacctcttccggttggaaaaccggttaacgcccatcgagggcggaaaacaatatagcttctcaaccagatatctccatttcggcaaacggccacgctgaaggtgcgaacaatactactcttttttggtaaccttggccaaacctcttgtctttaatgccaaaaggcaagtttctgtaacctttgc

SEQ ID NO: 16482 - DNA, 2906 bp, Oryza sativa
  unsure (1)..(2906): unsure at all n locations
gcgcgccttgaanatgagnttctgcttcgagcangtcngcaggnngactttagaggatccccagaaagtccttgacctcctcaatcacattgaagctggtcccaaagatcaatatgtcatcgacatataagcacaagatcactccttctcccctaccatagcgatagtacgcacatttatcagcttcgttcacaacaaagccagcagatgtaagtgtggggtcaaacttctcatgccattgcttaggtgcttgcttaaggccatacaaggatttcaacagtttacacaccattccctcctgaccttttagtacatacctgtctggttgatccatatagatctcctcctccagctctccgtttaggaaaactgtcttaacgtccatctgatggacgagaagaccatgagaggctgccagagcaagtagtactcgaatcgtggtcaagcgggcaactggtgagtaggtgtcgaaaaaatcctcgccttctttttgggtataacccttggccacaagccttgccttgtacttttcaattgtaccatcaggcctaagctttttcttgaaaacccatttgcatcctacaggcttgcacccatatggacgctcaacgacttcccaagtatcattagacataatcgagtcatctcactgcgtactgcctccttccagtagtcagcgtcaggagatgaatatgcctcttctatggttcttggagtgtcatccacgaggtatacaatgtagtcatctccaaaggattttgcaaccctttgtctcttactcttacgagtatctacaatgctatcctcctcaggatttccctcaagcgtttgctcattgtgttttatcggtgcaaagtgctcatggggtaaaacaggttctagactagacgtgctaggtgtatttttcatgggaaattcattctcaaaaaatatggcatctctggactcagtaattgtaccaacacgcatgtcgggtactccagagtttactattaagaacctatagcccacactgtggatagcataaccaaggaacacacagtctatggtctttggtccaagtttacgctttttggctataggtacatttaccttggccaagcagccccatgtgcgtaggtatgagagatttaatttcttcctttcccattcttcgaatggtgttacttccttatgcttcactggaattttattcaggacatgacaagcagtaaaaattgcctcaccccaccattcattggaaagtcccgcagtgtctaacatggcattcaccatcttagttagagtgcggttcattctttcggctaccccatttgattggggtgaatagggaggcgttctctcatgaataattccaaactcttcgcaaaaggacgtaaactcattggaaaaatactctccacccttatcagacctcaaccgtttgattttcctttcaagttggttttctacctcagctttatagatcttaaagtaatgcaatgcctcatcttttgttttcaataggtacacagcaatatctagtgcaatcatctatcagtgtcatgaaatatttctttccccctttagtcaacacgccattcatttcgcacagatcggaatgaactagttctagtggtgccaaatttctcgcctcaaatgccttgtgagacttgcgaggttatttcgattgaacacaagtatggcacttggaacctttgaccaaagtgaattttggaattaaactcatgttagccaaccgcgtcatacaaccgaaattcacatgacaaagtcgcgaatgccacacattggactcatcattatcgctaatatggttcacaacattattattattattacacatgtcatccaaagaaaaacggaacagacctctgctatcataaccttttccaataaaagttccatatttagatacgacacatttattggattcaaacacaagtctaaaaccatctctacacagtagagagccgctaactagattcttctttattaaagggacatgctacacgttcttcagctgcacggtctttcccgaaataaacttcagatcaaccgtaccaaaaacatgaatagccgcaagcgacctgtttcccatcaacaaggaggaacctctcccgacctgataagaagaaaacagggaaatatcagcacacacatgaatattagcaccagtatcaacccaccaatcaggtgaatgaaaaacagagagaactgtaggtaaaaaataaccgtaccccgatgttcctccgccctcgctaataaccatgttggcagacttcttgtccttgcgatcaggacaattcttcgcccaatgcccaggcttaccgcacacaaagcagtcccccttggcctttcccttgcctttcttcttaaaattggttgtagcctttgggttgacatcagcttgactttcttcttggtgattgtatgggatgcgtgagggttcttattttgcaccaaattggcgctagaacctccctcgaatttttgccccgttgttcttgatctggcctcntcttacacccaagagccatgagatcataacacttgactttggctctgtggttaaagaagagccaagtcgaccaagaggtggtatttgtcataatgcaaccggcacaacttgtccgcaaactacagtggtgtcttaagtctttgtaactttgaattaggagctgttcactacagacggcataaacaatttgagnattgaactggtcagaaatacagtggttgcgggtggaactccgactggctaaaggctcccaagtcttctctaggtgtggctgcccctcctctttggagggggcactgtaaggttccggaaagaaatcgaccttaattatccctctcgggaaaaggggttcttttgggccgaaaaataaaatttgcttttaccacag

SEQ ID NO: 16483 - DNA, 2671 bp, Oryza sativa
agaacaatgcatcgcgtcaacaacagtagtgcacgtcttttcatatctaataatagaactatcaaaagcatgtggttcaagtgttgcagcaaagccacttaccgaaaatgacctatcaggtttttggattgttggaaatttggtcataattcggcatattttaatccaaaataccaagataataaacatgatatttataatgggatttgatccagtgatagtggtgaatgtaatcaacatgagcatgcttaatgtagaataagcatcaacaatcacataataacacaatgttgacattgcaatgaatattaacagtaaaacttctaattgaaataatgtaagaaggttataccccaagaatggtcctccgttggagtttgaggcagtattgcctccgttgatgttgacgggagcctccttctccttgtatccagtgttgccgttgtctccagtgttcgacatattggtgaaggtgaagtagatgttgacgaacagtgagtagtcgcgccttacgctctccaaaaacctgatcgcccgcccgtccgtgcaaacgtcgcagcagcgcgtggtttcggaggcctactctcccaacgcgtgtgcacacactcgtcgggatgggattaccgtagcagcaacagcgttggaaaatggatgaaagtgtgtctcactttctcttttgggagatcaaatccattctcattttatatgagaaatggaagatgaagagtaagagtcatggaataggaagaggaatagagtaactaattctcatcaattagccatcaaccatcctccactaaacaaccatcaaccaaccatcaattatgagtaattgatgtaggttacaaatggaataggaagaggaatagagcaactaattgtcatcaactagccatgaaccatcctccactacacaaccatcaaccatccatcaattaggagtaattgatataagttaccaattccctaatcaaatggattaattctcaaaactcttcatcccattgatatcccataagaggatgaatacacatgaattcctaggcgttgtgctataggcggaccggccttccggctgggaagatgtgtttcccctgccggcgaaaatgcttttcctagtagtgatggcgtgtgtagtcgtggccatgcgcacacaggtgcgagggccacgcactcggacacgaccaggtagacagaagacatgcccgtcggtagccgcgcacatgggcacactgtcgccatcgcatcgatatttccaaattcggtcgttaacaatcattttgcacatgcgccggagatgttcgacgtcgccgagtggtctccactctggccgcctttgtgtcgtagcagcctagctccatcgcctccgtagtcagccatcttcgagttgccgagtggcaaccgtgttcccatgtcggccacatctgcttacactgccgattgcctgaacaatttcgcggtcggctgcctccacgccaccgcgtggtgaacatgtccccgggctagccggcaccaacgccaccatgaggcttcaccgtctatgacgccgcacatgcttgggggcttcggccttctcctcgttgacgcggcccgacactacaccctagacggactactcccagggcacgatgccgcacgctcggggtattcggccttcgcacggctgaagcaacccgatttcgcctggggcatgtctccgtatgcccggggcaagacaccgcacgcccgggggcttcagtcttctcctggctgacgcggcccgactacgccccagacagactactcccgaggtatgatgccgcacgcccgggggcttcgtctttcgagcgtggctgaagcggcccaattttgtctgggcacgtctccgtacgcccgaggcaagacaccgcatacctgggggcttcagcctttacatggttgacgtggcccgactacgcccggggcacgtactctcaaggcacgactccgcacgcctgggggcttcggcctttgcgtggctgacgcagcccgacttcgcccgggcacatctccgtaagacctgggcacgacgctgcacgcctgggagctttggccttcacgcggctaactcgacccgacttcgccaggagcgtgtgcccgtatgcctaggggcttcgcccttgtacggctcacacagacccggctactctctacccgactacgtcactgttccgtatgccctggggcttcactcttgtatggctcacgcagacccaactacgcctccacattagtcaatcacgtacccaccgactggccggctccggggcagctgaagggcttcaccgcctccccggttgttttcaactcatggaatactaagtaatctaattcactttttatatggtattttcatttgagtaatttattttacttctgacttactgtttagttggtcacccaaccaaacataaagtcaagggctgcacctattaggtgcttcaaactgcatgttcatttcctcctcttaatggttgcaaaagtacttgagtagcacaaactctgattcgtgaagctctatttcctcgcacggctcacacggtcaaggccatgcttaacaccgtatgcccgggggctacgccactcactgcacacttacacggtatggctacgccccataccgtgcggatccagagtcgcaaatcaacgcacg

SEQ ID NO: 16484 - DNA, 8864 bp, Oryza sativa
  unsure (1)..(8864): unsure at all n locations
gggcccccaccctctggagtggccccccccggcgcaaaaaattttataaaaaccccggggttttttaataagggccaatttcttttttcccggtttctctgagggtattttaacaaaaaaccctttttttttttaaagggcccggtataatttttattggccgggccccggcccttttttatttaagtgtgccctttcttaataaatacccccgtggttttttaaagggtgcactgggggggagggcactcaaaaggctcctttttggccccggcccccctttggggttgcccctcctgtgggtttcttataagcggcatttgttgtttaggcacaccctgagggcggcttatcggtttggttgcaacggttggtgggaatgctccacgttgtttctttattggctaccatccattgccaaaacacgccccttagttgtctattcggggtcatcccaagtccgggttttttaaactggttgcttagccaccgtcgggtccttcatcccatgttgcctggtccctctccaccggctgggggttgcgtctccagattgtttccttatcctgcgtcggggtactttgtcccttgtgcgggttggtcctttcccccccgcgagcaaaatacgtccccatgttggccaactttgtgatcactaactggcttcctcacctccatggtttggctggttccattggatgaggcaaatcctctagggtttgtcttactcaaccacacgctgttgggagttcatgttcttgactctccacttgcttgatgcttaactaagtatagagtcgggggctaatgtgggggacacggtacctaggtaccaactgttgggcctttgggccgcatagcatgtggtgggccgagtaggcctgagcctatgaggagcatgcgtggctagataaggcaaccgatcttatctcatgtaaatcgatggtaggttgccagattataggagatatgttacctctatatagggtgaaccaaaaaccctaattctggggagaggacgatacgtgctacgtgctattcacacgttgtaccgcgcatactcaaatacagatctaatctcatacaactagactaaggcattacctctaccatttttgttggcggctaccttaaactagccgccagcgaaaagctatattccctggcagttggcgatcgccagtgaattgaagatgctgcatcttcactggccattggtctctagcaatgccggtggccgcaaaaaaaaaaccatttttgtattagtgaatttatccaatgcattgtttctacttgttggatcagataataattttctttgtccatctctctcctttgattttatgttgtcgatactgccctcccctccaatgctcttttacttgcatgataatgtcagattcaagacaccattttctctctttaattgctgacatgaaaaatcctatgtggcaagattatttgtctctcttctctttaatatttctctctctactctttaattgcttgtcaagtgaccttgtcattttcgaattaaggctgaatattcctgtcagaacccatgcaacttttttttagacgggtcaccggggggcgaaatgcccacctaaatatattacttcaaacggtcttacacagggcaaagcttctgctacacaagcgcagtagtcctggaggataagagaaagtatacagggaaaaacaaggaagagaaacacaacagaaacacaaccaccccgaagggcacctgagccacactagcaggactacgagagagagagagagagagagagagagagagaaagagagagaggaggtgtttgatgtttttcaccaacaagatcacaaaaccacaatcctaatctgagctaaagctagctccctagcctgacaacatctactctacacgcaaccttcaagcaccgggagttgaattgtcagaaggccatctgccacgcacaagccgactcagtttccggagattagaggttgtgtatgtcaaagaccacctgcatcaagccatcaaaacccgatttcattgtgttgaaatattgatcaatgctcgccaacgccctttgggtaaaggatgccccagaagagggagagcaactaagggttgctgtaaaggccgcacacatcaaatcggcttcaatccggcattagcaaattgccaattaatacaacgcccccgacgccccaagggagaaggaagccccaatggtgggatggtcgctgaacattgtggacaaggacacccaagcaaagaagatgaaaatagaacaaggagcaaagcaaaagaggtaagttgggaggcagcaattgcaatggtggaggaaacatcatccacgatggttgaggagtcataggttcactgagaaagccaatggttctaaccaacttgcagccccaaactatcaatcattctagcatgccaaaatggaagaaatctgaggaggaaaggggaaactgcatactcgtggtttatggtggatcaaggtgaaggtggtcgaagcaaggcaagaaacaacaaccaaaatgactcaaaccaaggaaactaggaggaacactaacactggttagatgaaaagacaaggcaaggtggaccaaaggcgtcgaggataggtgtaggcaggacacgatggatgccaggggacaaacaggtagagggcacaacaatgacgaggagaagaagccacccgagggttatggcaggggatttccaaatatgatgccttcaagaagaaggacgacaacaagaaagaagacgccatcgtacgctgtggaaaccaaaaggggttttcaacccagagcagggggtaaagccagccaggacactagtcagatagctcacgcggcggcggcacggacgctagcggcttgaagacaccatcacacaccgcccccatgggcaggtcagggcgccgctgccaccgacctcccagccccaaccgagtagatctggccaaggagtaagtggatctagacaaatcggccaaggaggcgaatgaacaggtccagcttcaccggcggcaaagaggggttgcgcgtaagcagtcacgagggtcgaagatgtctccccttggacaaccctatgccgccggcagcgccaggctgctgacgacgtgcgagccaccgccccatcgccctcttcaccggatccgcctgccgttgcctttcctcctcgccggatcctcccactgcgcttttgagctctcgccggtggctttgaacttctccgcgactgcccgacgctgccagcagtggcaatcgtcaccgttgtcctcttagcaaccgctagctcctagatcccgcgcaggagagcgttaatgccctcgccgccgccattcatgctgccgtacgttttcggtgtctggctccggcggcggtgaagcgggagggagagaggtggggggtagaggtgcaagcggcggtcgctgcccgtgtcgcccaacagagcttttgagtggaagcaacggcggactgatggagccagtacccatgaaactttgcccttgtacatgcaatgacgcacttccagaaatcaaaagaaacatgggagacaaagaggatattcttttgagtcaggaggaattggatattagatggttttataggaatagattatcttcaattatgagagaggaggaaatcaaatggtatctgagggccaaatctaaggatattctagagggtgattctaatacaaagtattttcacttggttgcaaatggaaaacataggaaaactagaatttttgaactacaagatggtgaccaattaataaatggtgatgaaaatttgaaatcgcatattaccacttattataagggtctttttggtcctccagatgattctcctcttcagtttgatgagagtaaatttactgacattcctcaagtttctcttttggagaatgaggctctaacacaaggaatttactgaagaggagattaaggaggctattttccagatggaacataacaaagcaccaggtcttgatgggtttcctgctgaattttatcaagttttctaagatgttataaaatttgatttaataaacctttttaaggagtttcataatggtactttacatttattctcgcttaactttggtactattattcttttacctaagtgtgtagaggccataaaaatttaacaatataggcccatttgtctacttaatgttagttttaagatttttaccaaagttgccacaaatagagtaatgagtgtggcccaaaaggtaattagtcctacccaaactgcttttattcctgggagaaacattatggaaggtgtggttattttgcatgagaccttacatgaattacatcgtaaaaacatgagtgcataatttttaagattgattttgagaaagcttatgataaggttaaatggtttttttgtacaacagactttgagaatgaagggcttctctcttaaatggtgtgagtggatagcctcttttattcaagggggacatgttggtattaaagttaatgatcaaattggtgacaatttttaaacttataaaggccttagacaagaggatcctctatctccaattctctttaatatagtagctgatatgctagctttacttattaaaagggctaaagataatggctctattaatggggtaattcctcatttagtggatgatggtttgtctattttgcaatatgcagatgataccatcattttcttggagcatgatttacaacaagcaaaagaatctaaaattgatcttatctgtgtttgaaaaattatttggagtgaaaaattaattttcacaaaagtgagttgttttgttttggtcaggctaaggagtgctatgatcaatattctagtatctttggttgtaagttagggtcttttcctgttaaataccttgacattccaatgcattttaggaaactgggtaataaggattggaaagttattgaacaaagaattgagaaaaaacttagtagttggaaaggtaaacacatgtctgttggaggtagactggttttgatcaattctgtcctttcaagtttagctatgtttatgatatctttctttgagataccgaaaggggttcttcaaaagattgattattatagatcacgtttcttttggcaaggggatgatcataagaaaatgtataggctagctagatgggatattatttgtcaacccaaagatcaaggtggtttgggggttcataatttagagattcaaaataaatgtcagttgagtaagtggttatataagttaattaataagaatggtgtttggcaagatttattgaagagaaagtatctttataataagtctataacccaagttgataggaaacaaggtgactcccattttttgtcaggactcatgaaagtgaaaaacactttcttaagtatgggttcctggattgtgaataatggggaagaaacaagattttgggaagataaatggctaggtaatatggcctttagagataagtattcatctttatatgctattgtcagaaggaggaatgcttctattgctagtgttatggcctctattccgcttaatgttttctttaggagagctttagttggtcagaatctaacactttggcatgagttgtgtgcttctattgttcatttccagttaaataattcttctgattattttagatgaaattatcatcaaaatggtcagttttcggttaaatcaatgtacttagctttaattaataatggttacattgataggaataagtttatttggaagctttaagatgttgctaaagattaagttctttatgtggtacttgcttaagggagttgttttaaccaaggataacctagcaagacgaaattggaatggcagcttgagatgttgtttttatatgaaaaatgagactattcaacatttgtttatggattgtcattatgcaaaatttatttggagagcagttcagttttcttttggattataccttcctagtaccatatctcatatttttgatagatggcttcggggggttgacatgaaaaagagtaaactgatatttgttggtgcttctgccttatgttgtgcactgtggttgtgtaggaatgatagggtttttgataaatcatcatctatttcctatatgcaggtaatttttagggcaacatattggctccggttgtgggcacaactacaaaagtgtaatgaagatgaagaattcctgattgttgcatgtcgtaagtttgagacgacggttatgcaactttttgccaaccatggatggagattcaccaacaggttagaataatattatccttgtcatgtttggtttcctttatttttggttggtgtgtttgcgttatttttttcttttaagtgtactaccttgtaataattaactgtagctctcttgagcaaaagccggaatgtttcattctattatctttacagcgcagaaagaagaaagtcacgcgagttggtctttttaaagaacaaagtgacaacttttcttagggtgggaggaaatctacgtggaattgtactagaattgaccctagatggcttgcggggtcaattatcactgataggagtatttgattgggtcgcatgtgattttttttttgtattttgaaaattatatttttgctatgtcacatggcaagttattttcgacattacataaatatttacagtcaatagcttaccatgttaccttcagtgaatggctagattgtttgttttaacaattggttactgaacgatttttcagttaaattataaaagatttaaaaaaatggttgcatgcatggttaaccacttgagagagagagagagagagttcatgtcaacatcttcggatccactaattcatttggtcaaaggcaaactgatatttcctcgcgcaagaaaaaaatggtattatggtaaaatcaaacttggagggcctaccggtgagttttttcaactttgcacagacaacaaagaacgaccagtgcatcagtgcatctccacagctccagttcttcgctagctccacagcctccactcttttccctttttccttttcttttgattgacgttgtgctgcctaagttggcaccctttatcaagcccaaaaaaaagccttttacaaagacgagattctcattcagctttggcaaaagttgcgcagaaaaaagattaccattcggcttatataaagttaacaaattaaagtattggtatctgtcctttcttattccagccgaaaaaaagaattacttcataaaacctttggttttgaatatttcataaagttaacaaagttgtagaaaacaatactacatcagttccagaatataagtgaacacggttattaagaaaataggtagaattaaataggggaatgttgtgattggatgagaagtgaaggtaaatgggaaaattaaatggtggagggttgtgattgatcaagaagaaaatattggtggatacgtaattatattttgtgacaaattctaaatcgtaaaagtgttatattttgggacgaagagagaagttgttattggtcgaatagctattgaatttgaatatataagttccaataggttatagatggttttaaagctgtaattatatgcaaaagattgatgtcccaatctctgcaacgcagactaccccataaatataaatatagatggtgtgccaccatcactgctacaaattcggtcatccttgacaggccatctgtaattaggggtggacaaaaagtttggccttgtgagctcggctcaagcttggttcaggctcgcataggtcggctcggctcgaaagccaaacaagccaagcccaagactgcttcctagctcgtttccgaaacaagccaagcccgagctggctcacgagccgctcgtgagctcttttgactcaatagaataggtcatatacaaaaaaattgcacatttttgaactatttattggttgaaaatgataactttgattgtcatattatctatttatgtgttgtgatgatatattaaagaaaaatataactttattacgcattctatatggtattatgttgctcgatttctcttagacctgcttgagatttacttgatgccaggctcgcgagccagctcgagctggttcgagcccattatcaagccaagccaagctgcagttttagctcgttgcttgtagcgagccaagccaagccaagcttcccttgtaccaagctttcacgagccaagccaggctcggcttggctcggttccacttctatctgtgatggtttctcttaccggttggaggggggttattacatccccacggtaaggcgngtnccaaaacnctttctgtagtaaagaacgttgaaggcggaaggagcggcgcggtcattggaagcggtaacccccccgatggacgcggtgggcgtgccgagccgcccgacaacgacgtgaccacacgggagttgggaggcatctgcgtcaagcattctcctgctggatgccgacgcaatccgcaaaagacgacagatgaggactgactggactgcgactagcaagcggtaacaacaggcagtgcatgtgtgtactaacatcaagcgtgaagccaacaagcaaatggctgactgacagaacactgctgtaaataagcacgcatcgacttcttgacggacggtggggcggtcgcgaatggcccaagtacgactaccctccccacccattcgtacggacggagcgcggccgctgaggatggggacccgaggggctggagcccttctggccctcgagcgccccccgtcgaccgggctccaacttcccgtcctgtatacatgccaaggggagaaaaaaagagtcggatttaatcttgacttaattaagttgctgcacactatgtga

SEQ ID NO: 16485 - DNA, 13791 bp, Oryza sativa
  unsure (1)..(13791): unsure at all n locations
cggcgccatgaaactgcacctgccaatcccannngccngcangtngagtttaaaagaccccccggttacggtttgatcttggtttccgcacggctagttacgttttccgtgtgttttgtaactgaacaaaccaatgcttaaaaaaatgttaaaaaacataaatgtgtgtgaaaattgacgataatcaaaagaattcatatgatacttgcaaacctaacttttggatgcaaatacaaaaattcagcatgtcctttactatgttatggacttcgaagcaattcaacaattcatagcataataagtcaacaacgtcaattcaacaacctcacatttcaaatcataatgatgtccatatgtagcacccacccaccctatatatattttctccactattgggccttaatttgctggataaacagtgcaacttaaaggtccattgcattatttttttaccattttctaatgtactctcggttttaccatcaaatgttattttatattactctttttcatcaaatttctttaccatccgccactacaaatcaagaactacatccatgtttttttcgatttgttttggaaattttgaatttggttaaaattcatcaaaccctaccgccggtaaccattaccgtacccccacggtaagagtggttacggcagtaagggaagccctgcttatgacccatcaaagatatttatgacccgtcatcgtaatagctcgtaactacgacacatcacacatatctatgatctatgatgagtggcagttacgaaccctcacacatgagggaatatatttaaatcacaacctttttttataaaatttgataaaaaaatgtgtattaaaaaaatgtgtatgtagtcgaatagacagactttatgtaaaagttgtagagttaattttataattgataatatttttatttgagatcgtttagatgtctgaatatgcactaagtgatgggatctattttgaaaaataaattttaaatttttcagacagacttgaatggagataggccctatatcaaagttgtagacctcaatatttttatttgagattgtttacatgttcaaataagcgttacaaatgatgagatctattttggaatttttttttgaattttttaaatgatctcagatagagacatgacgtatatcaaagttatatagctcaatgagataaacaactttctaattgataaaattttcatttgtgatagtttatatgcctgaatatgcaatatggggctattttacaaccccatcattaggcatattggaggaaaaagcaaaacaacataattacaaatgaaaaataatttgtgcataaaacttttatatacgtgttcttgacgatataaaagcaaaggctcaaatgctgaaaactaaactacaatgaataaaatcctaaaatcaactccaaatttaaggttgaaaatttaaattttggctgataagtataagcataagcgaaaagatgagggggccaactcggaacacaaggttaatgatcctaatcaaggggaagcggcaaccagtgctggagcaagagcatcccatgaggaaggtgaatacgttagcttctcacaacatactcctccaacaaaccctgctctaacaccggccgagcatttgacctatgtacatggattgctggaccaaatccccaacaatgcaacgaccaatccagatgcaacagcttggttggaacatatgaagtctatgacagccaacctcgatactacatttaaaactgtgaacaatcaacaaagagagggatgacattcagcaaatcaccaatctcccgcaaggaaccaagacggtgcagaaggccaaaataatgaagtcagaaccacaatcaagatcaatctatgcctcgatgatggagaacacgcaattctcctccccccaataatgatgtaggctcccatcaattgcccattttatccaaaatggcttattagaaaattaaaattaatttataagtaaaacttctgtagatttattcgtagcgacttaaaagccaacattaacaaaaattacgttaaaagcatttcaaaatcaatttcaaaattaagtttaaaaatttaaattttggtttattctttgactgtttaggccaaacgatgaagctgatagacttatgtcaacacctcaatggatggagggaaaagcgcgagaaccaaaggagtaatgaggacaacggttgctgacatcatcgtaacaatcggggcctcatcctcacaatgatgacaacaaccgtggtcgtcgtgagaactgcagtcagcatagcaaaaatcctatatatctatacgattaatccacacttactgcagttaatactaatttgctgccctcttattcatccacgtcatcagttaattggcgtcgttggatcagctcagaccagctaataccaagcgttggattatatattgagcaacccctctctttaggtgtgatatggaggcccatttttgtctggtaggcccaactgattccgatgtggaataagttcacttcgtgactctcaaaagtgatcgaaatctaatctgtgaccctaaaccacaaaaccggatatctcgacccccaactcttaaaaccggtgcaatttgactccctcggcggttttggagggcggttttactaacgtggcacctatgtggcagtattgactcgatcttctgtccacgtggcgttgatgtggcgcttaggtatcattagaattaaaaaatatgtgtgggacctatttatcattcaaagcaaatttgtgaacccactgacatgtggggcccacatattatcctctctcctcttcatcctcctccctctctctctccctcctctttcttgttaggaatatctcctctcactctctaggtgttaatcacaaacacgtaaattctctttggtagacacacgcacacaagaatattacaagtagggaggaagaacagaggtggacacataaactacatcttgctttctcggcaaccatgccacatattttcattcatttatctagtacttatgtacacaaaagagctaccaactccactcatgcacgacctattctctaggcactaacttcagcatgcactgcatggatatgtaagcagctcacacgactaacaacccaactaactcccactaatacacgcacatgcagtaactaatcactagctcatctgcgtgcaatcatcaagtaatggctaactacgtgactgactcagtgaccacgtacatctgcacatacacataatgtgcagcaactaattaagtcaagattatatccgacatctcttctctccccttcgcatgtctgcagggacgggagctggagcgccggcggcggggggcgctcgagggccagcgaggctcccgcccctcgcgtccccctcctccgcggccgcgctccgtccgtgcgaatgggtggggagggtcgtcgtacctggaccatccgcggccgccccaccgtccggcgaggagacgatgcgtgcctatctgcagcattgctctgtcagtcagccctttgcttgttggcttgccgcttgatgttagtacacacatgcactgcctgttgctaccgcttgctagtcgcagtccagtcagtcctcatctgtcgtctcttgccgattgcctcggcaaccagcaggagaatgcttgacgcagatgcctcccaactcccgtgtggtcacgtcgttgtcggccggctcggcacgcccaccgcgtccatcgggggggctgccgcctcccccgcccgcgccgctcctcccgctttcaacgttcactactacagaaagcgtttttgcatacgggcggaatcgatcttcacatgcggttggccggcccgcatgtcgcagccgtatgcgaagatatattttcccatgcggttgacctaagaagatcgcatgcgaagatctattttcgcatgcgggcgtcttaagtagaccgcatgcgaaattcaatttccgaatagctaaaataatatttattctagcattttggtgagatgtgtctcgtaattaatattaaattattgagggatttattatcgtatttcggagtagtaagcatataagataagacaagtgccgcagtaacaaacatgtaatacataaccattaattcaatcgtaatttacatacgaatatataatagcaagtggcacagttttttcatcatgttattgcatatgtataagtagtgtacatgttattgcatatgttctttctcccactctctgagaggtttaaatttgtcgtccattgtgagttcactctggttgtcgtagaagagacctcttgcgttgcagacatcacgaaggatgaatcggcagaggtcagcggccacgttcaagatagtagtgtcgttgaatcgttgtgcaatatatgggatttcggggatctgcacacagaaaggaaaataaaatggtactcagtgagaagtgtgtgcgagatgggtttctttgtagagaagagttcgatgacctgctcggttactggttgttttgtaccttccatttactctgagcatctcgcacacgtaataaccacacaagttggttcctggtggttgtttgtagcactgcgatataattatggggaccgatctcagtagatatatttagtatatatgtactgttcgataattagttgtattggtataaatttgatagtaccggccagccagtcctgacggataacttcttctgggatggaatatgtactggtccacctcttttgcggtagtacttgtgtgctctgtttgaaggaaacaattgttttattagtagttagaagactggtgatcgacctaaacaatttatagtaatgaaatgtttatcacttacaaattcaaaatagtgaggaattccataaatgtctccttgtcatagtgtgcggggtccaatgatatgatcaattggtctttcggatatacaaggaataatatgtagtggtctctacatataagataggcttattggagacagaaaattccgaagaagataaattaattaaacaaaaagaagagagagcttacgtgaactggtaggggaccattaagacatctttgtcggcgtgcgccaacattgctattgccaagtatgttgctacttctagcttcttcctcttgtgcaatgtcttcacatattcttccttttcttccggggtcttgccaaccaattgctcgcagtcttctctcagctctacggtgtgttgtgttttgcatattcttgttggatcgacgtatccaacctttgctccagttctatcagcttcgtggaattgcatactgtacaatgaataaagaagaaatgagcggccgtttccccctcatccgaccgccctctctcactcccaaccctatataaacgctcccgtgcctccctccgccgtttccgccactcgtcgctctctctccccgccggaatcgagctcgcgccgtcgctctctctatcagccgtcgccgccgagctccggtccgccgccgtcgtcgccccggaccttctcccgtttcggcgtcgccttcttcgggttcgccgcaacctcgccgacctcgtccacctctccgtttcggtcgccgaccgccggaacgccgccgtccccgtcgacccgtgccgcgccgccgccttcatccgctccggtcgccgttcccgtcgtcgccgtcgacccggggtgagccgtggaccgccgattcgcttcccccttccctcccctctctcgggcgccgatccgccgcgccggtggtcgccgacggcgaccatcggggcgcgggtgcgccgccttcgggcgcgtcccgcggctgccatgtggggcccggccgtcagccgcccgcgccctcgggtgtggctgacgcatgggacccacggcgccggccggtgtgaaccgggtgcgcccggtccaccgtggccccactcccgtggacccggtccgcgcgccctctcccttcggctgacgcaataaatccattttaaattaaaatttaaatgaagaaattcgcaaatattcatttaaagagcatataaccttcaaatggccataacttggccatttgaactcggaattggaccgttcaagtctctaatttttccttaagaagtcaagaacccatttttgtgctttgtttctgcttgttatatggagtttattagagtaaaagccttttcttttccgttggtcgtgtagacgctgcagcttcggaagatccgctcttcgtggaagttgaagccgacgtttggaaaagcgagcaaggcaagtcacatcatccttgaacatattgaatcccagtttataaaattatgttgctttaaattattgcattatcgctttatttaaattcccgcgttatcactgttttatctagccatgcctatttacctttgttatgaccttattattattgttattgttattattaccttgttcaccttagattaaacaaaaccccaactagtggacactctactcatggtaccactagtatgattttaggtagatgcttcgctgtttaattaggtaacattaggtgattttacaactctagactttgggatgttcatatcacctggacactatggaatggtttggttattgtggaattggcttcacaccgctccttctattcaaaatccccaaaatggttttaggctgggctcggggtgcatggttttgatagtagcacctcggacatataaggaccggtcttcgggcctctgttgcaaagcactaccgtacttccacatgtctagtgggtaaggcttagtttgtggctcagtctggttataaacaaaagtacacggatggagatggaagaagtcgggggtcgatggacatctctaggacaaatgaaggctacacgagctgcggcccggtagtcgagatgtcatggcacagggccggtgtcctgctgctaggggctcagtcctgcctgcctgtcctgggggttccggccgtaggtgggattgggtcggtactcttgtctatggctaggatgggttggaaactatgtcacgtcttccgtctgtataccgtggtggtatgtggcacgtggttacacgtgaggaagatgtgtattagtggttaagatgtacaccatctgatcagagtataatctattcgaatagccgcgccactcggtaatggcaagccgagcaatgtaccaaagttagtgttttaattcttaaaacctgcttaacaattaaaaggtggaatggttggcctgggttggcttgggacgagctgggacccagggtcgggttgccagttcggtctgaatcatcgtaggccttgggttaaggcaggttcgtgtgggttcacggccttgataaataatattgtatagttctagaatcgtgtttactaaatagttttgagcaactaaatatctttaaatgctatttactgcaaccctaaccctttatagtataactcctttgtactcccttgcatttattctgcacttgtgggtgtatcttgttgagtacggtggttgtacttagtcttgctcaatttttcccaaacccagaagaggagcccctggaagatgaaggctttggtgtctagctcgtgcctgccgtcaagcgcctgtggtcatcgccctagtcttccgctgtttctcgtttgtctttgtgtgtgctgggcctttgctgcccatgtaataaattaactatttacgcttccgcttgttaaactctgaattgtatcaacttttggtgtaccttgcctcctgggacaaggattaatgcacgcacgtaaggaacacccgttgggttatttccggtcgtgacaagttggtatcagagcccccttgaccctaggacgagccttagatcccaagccttagcaatattttcaaaataaaaatcccttcttatttgtgaaaatcctctagtctctctctgtcctgctgcttcatttatcgccaaaatatgacctttaaaatgttgcttttctttttgtttttgtttgtagatggccggcagcgtcagccgtcgtggtctggacatgactggtttcgtcttggagctgcggggcatgtgcgttgtcctggggtatccgcatggagtggactaccagggcaggccgctcccggagcaggagggtgacgatgcagagccccatgctgcttgggaggttactgcagtgatcctcactggctctcccgagcggacttcgttggcagtcaccgcgggtggagattctttccccgccgcttgccagagcgccgctctcctcgccatcggcactcttcaccagggctacccggacgagttgcagcactcgccctaccgctaccaccctcgtcgcggaggagcccgcgacttcgccaccttccgggatgctagctcggaggatgacgctaccatcatgcacctggcgcgcatggtggaggcgtacgatgcggctcgtatcgacttccatcagatggtgcgtcgtgggatggtcgagaacaacatgaagatcctggagctgcgtcaggagaatctgcagctgaagaaggacctagacgcagtggaggcgcagctgcatcagctcaagatcacccagggagaggtctgtcgccccaagtgtcgccgcgtctgccgcagccagaagatcaccgcccgcaagagcacctccaggcccgagcttgttcgtcagtccctggcgtggacttgcttcgtggagacccctcgtgccgagcctgcgcccgtggttccccaggagggggaagcctccggcgttggtagcatggaggatgcgctgttgctcaccttccgtcctggcccgtcgcagcggtagacgagcagttagtaggcttgcgcgtgtgttctttctcgtttgtcttcttgttggagttgtgtggggcatggttatgccggtgtgtggtgtaactgtgtcggagcctgtctttattttatttgcttaagcaacttgaactttaatgaaccaatttaatagcagtaataaattcaagaattatggtagtcgtggatggttagctttaattgtcagctctctctgtttgctggttttgggtggggttttcagatggtgacgaccaggaaaagtgctgccaccggtgagggcaaccaatctgaaggcagcaaccacaaccaccagggcagcccacctccacttcatcttccgcttccaccaccaccaccagacaccaacgccattctcactcaaatcctcgcccagcaggccaacatgatgactgctttcctccaccacctccaaaatccgccacaacagaatgctccaccaccacccccacaacactctaaactcgccgagttcctccgcatccgtccacctaccttctctagctccaacaaccccgtggatgcgttggattggttgcatgccgtggggaaaaagctagacactgtgcagtgcagcgatgaggagaaagtcatcttcgccgcccaccagctgcaggggcccgcatctctatggtgggaccatttccaggctacgcagccagaggggcagcctattacttgggcccgcttcaccgctgctttccggagaacccatgtgcccgccggagtcgtggcccttaagaaaagggaattccgagagttgaagcaaggcaaccgctctgtgatggagtatttgcatgagttcaacaacctggcccggtacgccccgagatgtacgggaagatgaggaaaagcaggagaagttcttggcgggaatggatcctgagctgtccgtccgtctagtctccggggactatccggatttccaacgtctggtggacaagagcatccgcttggaagacaagcacaaggaactggagtcacacaagcgccgcttggcgaatttccgcaaccaacagggtgctaaccaaagggtccgctacaccaatccctatccagggggatcctcctcgcagcaggaacaacagcagcagcaaccacgctccgcgcctcgacctcaattcgtggtgcgcgtcccacagccgcagcagcagcagagtcaacaagggactcgtgcgccccgtcctcctatgccaactgtgcagcctggtcaaagccgcagggacgctcaaggtccgcagcgtctgtgcttcaactgcttcgagcgggggcactttgcggataaatgcccaaagctgaggcgtcagcaaggccaagcgcctccccgctccaacaacggtggtaaggatgtcattcggggtcgtgtgaaccacgtgacagccgaggacgtgctgacaactccagacgtcatcgttggtacgttcctcattcattccatccctgctaccattttgttcgactctggagcttcccactcgtttatatctgtgccattcgtggggagaaatcagttgggggtagaaaggcttaggaaccctctgctcatcaccacccctggaggggttatgacagcaaagtattatagtcctgccgtccctatagaaattcaggggattccttttccctcggatctgattctgctagacaccaagagcttggatgtgatccttgggatgaattggttggctcaattccaaggagtagtggattgcgcgagacgcactgtcactctgtacccagggccagaacaaccggttgttttctttgcacccccaacctctgtcagtagttcagaacttcatcagataggactgtcagaaatccccatcgtcagagagttcggagacgtgtttccggaagaactacccggtatgccgcccaagcgagagattgagttccggatagatcttgctccaggaaccactcctctatacaagcgaccctaccgtatggcagcaaatgaactggctgaagttaagaaacagttggaagagttgaaagaaaaggggtatatacgtccgagtacttccccctggggtgctcctgtgatttttgtggagaagaaagacaagacgaagaggatgtgcgttgactacagagctctcaatgaagtcaccataaaaaacaagtaccctcttccccggatcgatgatctgttcgatcagcttaaaggtgccactgtattctccaagattgatcttcgttccggatatcaccaattacgtattcgtgaagaagatattcctaagaccgcattcaccacgcgatacggactgtatgaattcacggtgatgtcattcggtttaaccaatgctcctgccttcttcatgaacttaatgaacaaagtgttcatggaatacttggataagtttgttgtggttttcattgatgacattctggtatactcacaatcagaggaagaccatcagcaccatctccgtctggtgttgggaaagttgcgggaacatcaattgtatgccaaacttagcaagtgtgagttctggttgtccgaagtcaaattcttagggcacgtgatatctgctaaaggagttgctgtggaccccaaaacagtgaccgccgtcactgattggaagcaacccaagacagtcactcaaattcgcagtttcttaggtttggcaggatactaccggaggtttatcgagaacttctccaaaatcgctcgacccatgacacagttgttgaagaaagaagagaaatttgtgtggagcccgcaatgcgagaaggcgttccaaactctcaaagaaaagctggtttcctcgccagtgttaatcttgccggatactcgcaaggacttcatggtgtattgtgacgcttcgcgccaaggattggggtgcgtgctcatgcaggacggtcatgtggtggcctatgcctcccgccagctacggcctcatgaaggcaactaccctacccatgatttggagttagccgcggtggttcatgctctaaaaatctggcggcattatctcattgggaatcgctgtgaaatatatactgatcataagagtttgaaatacatcttcactcagtcggacctgaatcttcggcaaaggagatggttagaactcatcaaggattacgatgtgggaattcactatcatcctggtaaggccaacgtggtcgctgacgctctaagtcgaaagagccattgcaacactcttaacgtccgtggctttccacccgaacttaaccaacagatggaagccctgaatctgagcgtagtgagtcgtggattcttggctgcgttggaagccaagcccaccttgctcgatcaaatccgcgaggctcagaagaacgacccggacatgcgtggactcctcaaaaatatgaaacagggtaaagctgcgggtttcacagaggatgaacatggaaccctatggaacggaaatcgggtatgcgttccggatgtcagagaacataaacagctgatacttcaggaagctcatgaaagtccttattccatccaccctggcagtacgaagatgtacttagacttgaaggagaaatactggtgggttagtatgaagcgggaaattgcagagttcgtggccctttgtgatgtgtgccagcgtgtcaaggcagagcaccaacgaccggccggacttctccaacctctccaagtaccagaatggaaatgggatgaaattgggatggatttcatcaccggacttccaaaaacccaaggtggatatgattctatatgggtagttgtggatcgattaaccaaggtagctcgatttattcctgtgaagaccacctatggagggaacaaactagccgagctctacttcgctaggatcgtgagtctccatggcgttcccaagaaaatcgtatctgataggggaagccaattcacctctcacttttggaagaagctccaagaagagctgggtaccagattaaatttcagcaccgcgtatcacccgcagacagatggacagaccgagcgtctaaatcagatcctagaagatatgcttcgcgcatgtgtcctagatttcgggaagacctgggataagagtctcccctatgccgagttctcctacaataacagctaccaagccagtatacaaatggcaccttatgaagcgttgtatgggcgcaaatgccggacaccgctattgtgggaccaagttggggaaagtcaagtgttcgggactgatatcctgagagaagctgaagcgaaggtcagaaccattcgggataatctaaaggtggcacagtcccggcagaaaagttatgcagataaccgtcgccgtaacctggaattcgcagtggacgattttgtgtaccttcgggtcacgccattgcgagtgtgcacaggtttcagacaaaagggaagctcgcacctcggttcgtgggtcctttccgtatcattgctcggcgcgaagaagtcgcttaccagttggagctgcccgcctccttgggcaacgggcacgatgtgttccatgtgtcacaactcaagaaatgtcttcgagtgccatccgagcaggccgactcagagcaaattgaagttcgcgaagacttgacctacgtggagaggccagtgaaaatcctggacaccatggagcgcaggaccaggaaccgggtaatccgtttttgcaaggtccaatggagcaaccacgccgaggaagaagctacttgggagcgtgaagacgagctgaaggcagcccatcccgatctcttcgccagttcttccgaatctcggggtcgagattccgtttaaggggggtaggtttgtcgcgtcccaaaacgaccctaaaatacatcctctaaataatgcttagaataattaaaatccgtgtgagagcctcccccaattaaaatgtgcaaagttaaaagtcaaataaggcttggaggatttttgtatatttcctaaaagcctaaaatgcgtaaaggggatcctctagagtctccttgcaggcttgcnagcatgaggttgttcattcaaantcaaccca

SEQ ID NO: 16486 - DNA, 2608 bp, Oryza sativa
  unsure (1)..(2608): unsure at all n locations
tgattccctccctctttccccccacttttccctctctctctccatcggattcgttcgggatcttttcccctaaacctcgccggcgcatcaatggcggccggatcttccgcggccgtttccccctcatccgaccgccctctctcactcccaaccctatataaacgctccccgggcctccctccgccgtttgcgccactcgtcgctctctctccccgccggaatcgagctcgcgccgtcgctctctctctccgccgtcgccgacgagctccggtccgccgccgtcgtcgccccggaccttctcccgtttcggcgtcgccttcttcgggttcgccgcaacctcgccgacctcgtccacctctccgtttcggtcgccgaccgccggaacgccgccgtccccgtcgacccgggccgcgccgncgtctttctccggtccggtcgccgttcccgtcgtcgccgtcgacccggggtgagccgtggaccgccgaattcgcttccccttccctcccctctctcgggcgccgctccgccgcgccggtggtcgccggcggcgaccatcggggcgcgggtgcgccgccttcgggcgcgtgccgcggctgccatgtggggcccggccgtcagccgcccgcgccctcgggtgtggctgacgcatgggacccacagcgccggccggtgtgagccgggtgcgcccggtccaccgtggccccactcccgtggacccggtccgcgcgccctcttcccttgggtgacgcaataaatccattttaaattaaaatttaaatgaagaaattcgcaaatattcatttaaagagcatataaccttcaaatggccataacttggccatttgaactcggaattggaccgttcaagtctctaatttttccttaagaagtcaagaacccatttttgggctttgtttctacttgttatatggagtttattagagtaaaagccttttcttttccgttggtcgtgtagacgctgcagcttcggaagatccgctcttcgtggaagttgaagctgacgtttgggaaagcgagcaaggcaagtcacatcatccttgaacatattgaatcccagtttataaaattatgttgctttaaattattgcattatcgctttatttaaattcccgcgttatcactgttttatctagccatgcctatttacctttggtatgaccttattattattggtattggtattattaccttgttcaccctagattaaacaaaaccccaactagtggacactctactcatggtaccactagtatgattttaggtagatgcttcgctgtttaattaggtaacattaggtgattttacaactctagactttgggatgttcatatcacctggacactatggaatggtgtcacgcccggaatttctatccaaaattccaaacgcttacatgtgtgtgaaccctcgtccaggaatcagccgaggcacacaataacaaattgataatagagtacaaataatactctaattaataagcgaataaaatgtcattacagaggtagatagttcttctcaatcaataaagttctaagcagcggaaattaaataaacggcgcagacggctccactccacaggtagcttgaccaaggctacacctaatcctccacaccatcagcctcattgtagaactcttcttctgatgaatgattgcaaggtgagtatatgacatactcaacaagccacgcagcaaatatgcaagtgcacaggataacaaaggatggcataatatggttgtatttgcaaaagcagcatttagcaaacatttgagaatttgataaaacagttaagtaattaaacaatattaatccaacgctatacaacataccctgttgtataggcccaaccattctgaacaaccaccccggctgcacagttctatctccaaaccaggaatgtaccattccaaaccaggagctaatcaaattattaccagtttaagcatcttttacaatgatgagaggtgtgagactaatcacgaaagacattgttagacccgcccataaccgcgggcacggctattcgaatagttatactctggccagaggtgtaccactgtacccacaagacacaaccccacatcatgtcaccatgtgcctcaataccaccacggtatctcggaaaggagttgtgacaatacccctcgcataacacaatccactgcagcccaccttactggatcatantcacccncntatnnaacagggcatggnactcccagccgacccncgtgggcttnatctnncgcacttctcaagctggtgcccncgcatgaaccatgctatacaaaagattaagccgttgnccatgctggctgnggntggaccgataattgttcacaccggaactcgtggaccgggtcttattggnatgagccggaccataaaaacatgttgccccaaaccaccattataagttttaggtggcacttanntaataactaatacgcatggccttgggaaccttcaatagacctctggaaaataggggggctttggtttccatagggcctagtgttaagcgggctatcattggtttatatctttgcccacttataaaggccacttgaaattgtacccccgtgta

SEQ ID NO: 16487 - DNA, 8817 bp, Oryza sativa
gcccgaggaagacgacgactgacgggtgggccccacctgtcagcgacagcgcgctcgcgcggccggctccgaactgggctgtcttgggctgagaagaaaagaagggattttggtccgtctttcggcccaaagccaaaagagactttttaaaacctttttcaatttaaattatttcttaaatgcaattccatttattaaaaatactttcttagctcaaataaatcccagaaaaatctaggaattatagaattaagcaaagtatatatattttgaattttcagggtgtgacaaatggtttggttattgtggaattggcttcacaccgctccttctattcaaaatccccaaaatggttttaggctgggctcggggtgcatggttttgatagtagcacctcggccatataaggaccggtcttcgggcctctgttgcaaagcactaccgtacttccacatgtctagtgggtaaggcttagtttgtggctcagtctggttataaacaaaagtacacggatggagatggaagaagtcgggggtcgatggacatctctaggacaaatgaaggctacacgagctgtggcccggtagtcgagatgtcatggcacagggccggtgtcctgctgctaggggctcagtcctgcctgcctgtcccgggggttccggccgtaggtgggattgggtcggtactcttgtctatggctaggatgggttggaaactatgtcacgtcttccgtctgtataccgtggtggtatgtggcacgtggttacacgtgaggaagatgtgtcttgtgggtaaagatgtacacctctgatcagagtataatctattcgaatagccgcgccctcggttatgggcaagccgagcaatgtacccaagttagtgttttaattcttaaaacctgcttaacaactaaaaggtggaatggttggcctgggttggcttgggacgagctgggacccagggtcgggttgccagttcggtctgaatcatcgtaggccttgggttaaggcaggttcgtgtgggttcacggccttgataaataatattgtatagttctagaatcgtgtttactaaatagttttgagcaactaaatatctttaaatgctatttactgcaaccctaaccctttatagtataactcctttgtactcccttgcatttattctgcacttgtgggtgtgtcttgttgagtacggtggttgtactcagtcttgctcaatttttcccaaacccagaagaggagcccctgaaagatgaaggctttggtgtctagctcgtgcctgccgtcaagcgcctgtggtcgtcgccctagtcttccgctgtttctcatttgtctttgtgtgtgctgggccttcgctgcccatgtaataaattaactatttacgcttccgcttgttaaactctgaattgtatcaacttttggtgtaccttgcctcctgggacaaggattaatgcacgcacgtaaggaacgcccgttgggttatttccggtcgtgacaaggcgacggtggtgcaggagcggcagcagtcattgcctgtgatgaggatggggttgaagatcctgctgcaggaaaggccgcgctcaggattatgtctctgcggtgccacaagataaactgattcactgcatcaccgagaagttcaatcccctcaagtgtaggtatgtctagttccaaggaaacgtggttgctatggaccttggcgacctgtatccttgcgtaatcctcagggattgccgtgttgtggaattgacgtccgggtattgcaaaacccattgcaacctccttagtctttccagcgcgaccgattggtacgatgagactgcacggaggtggtccagttatactatccacagggaaggtagttgtctgcactgagcctacactgctgggtacattagttgtttgctgtgcggattgtgtgggttgttggctatcaaggaataaccttggaaaggctgtcgggttttcagctgccaacgagtagaagtgttccttcacttgcgcatagatcttgtccgataggtgttctttgtatttggctctcttcttataacttggtgcgtcttgtggaaacccgacctttcaacttgtctttgaagacaaaccccttacacgttcagagtgttcagccgtccccaacgccgcagtaagctgatctcgctccctccgtgggacgaactgtcctgatctttctttctcgactatctgctgcaaattagtagtcacttcttctatgtctggagtctcgaatagtatgtctccctcatccgagacttgacctgtgctacgcgcccaaacccagttcttgctacgttcaaccatggggtctaccagcaggggcttaccggccgcggcaaatctttgctcgatctcccgccattgatcgacgtgaccagcgtatgacatttttttcctcaaagccaatgcttcagctgttgtatgatccgcaacaaacgtgtcccagtcagcctgcgatatatgtccataatccgtaaacggtgggagattcttctgaacataatcccgatttagatcggactttcactgtcgccatcgatctcccatctttttaagtgcgtaatctctccccctgacctctgatccaggagggaacacaaaatacttctgcaactcattccagagaagtgtcttgatgttgtcgtccactgtttcccacaacttgacattaatgggacaacgtgtcctgactagagtgccacatgcgttgctgaacttggaccgcactatcggtggctcgacgggcttcccatcctgatcgagagcaatcacgttgtaagtttccttgggtaatttattcttgcttctctcaccacatctttttttcccactcccgcctgcacttgtagatgtctccgtacgttcaggtgcagacgtagcggtgtccatctcaacttcttgctctgtcctgttcctctcggctttacgtttcgagcggcgtcggactaccatctgcaaagaataggtaactctatacaccattaggttcatgtcacatcatagttagggaataatacatggctaacgattttcaacacttacggcctgttcgataggtatgtagtccggatcatcatcgcggggggcgacttgtgttatttccattggaaacgggtcacttggtgtgcgccacgtttcttcactagaagcgtctggctgcttattgctaccggaattttgaggagcgttaccttcttgaggcgctattggtgcattcgatggaaccttttcgttcgacatgttccaacttgacgtaaaagaatttgacataagtcccaattttacgtaagtaccaatttaacgcaatttcacataagtctcaatttgacataagtcccaatttaacataagtcccaattatacataaatctcaattaaacataagtcctaattatacataaatctcaatttaacataggtcacaatttaacttattttcacataagtcccaataacttaatttcacataagtcccaatttaacataattctcaatttaacataagtcccaatttaaacataagtcacaatttaacataggtcccaatttagcatcagtcacaattaaacagaaatctccatttgacataggtgccaatttaacaaaagtcccaattatacataaatcccaatataacataagtctcaatttaaacataagtcacaatttaacataggtgccaatttaacaaaagtcccaaatatacataaatctcaatttaacataagtttcaatttaaacataagtcccaatttaacataggtgccaatttaacaaaagtcccaattatacataaatcccaatttaacataagtcccaatttaaacataaatctccatttaacaatccacaattaaaccttctcaaaattaaacaatccacaattgcacatatcacaatccacgatgcacaattaaacaatccacaatccacaattgcacatttcacatttctttttttaaaagtaaatgttaccgagcgacggcaacggcgagggggtagaagtcctggcagcggcgtcggcgacggtgaggggcggggcgacttcggggaggagccggcggtagcggggacgacttggcggcggggacgacctggcggcggcgacggcaacggcgaggggggagaggtccgtgcggcggcgacggcgacggcgaggggggagaggtcctggcggcggcgacggcaacggcgaggggggagaggtccgtgcggtggtgacggcgacggcgaggggggagaggtccgtgctgcggcgacggcaacaacggcgaggggggagaggtccgtgcggcggcgacggcgacctggcggcggcgacggcgacggcgaggggggagaggtcctggcggcggcggcggcgacggcgtggggcggggcgactttggggaggagccggcggtggcggggacgacggcaacggcgacttgggaaattttggcagcctggcggctagggtttcgctggagccgggacttagaaaattttggctccccgcgctccctatatataggcgcagatcatcgcatgcaggcggcttaagggaccgcatggaaaaaatatctttccatgcggtcgacataagccggccgcatgcgaaaaagatctttccatgcgggctgttaagccagccgcatgcgaaaaagatatttccgtgcgggccataaagccggccgcatgggaaaaagatatttccatccggctggcttaagtcgtccgcatggaaagatctttttaccaaaaaaactcatattttttttctctaagtaaactgtccatatatatttttttcccaatatttcgccacaattatccattccaaatgtttttggcactaagaaaactcatgaaaattgctcaaaactcgtaatcaaatgttacatgctaatgattacaacataagggggacctaaattcatgcacgtacatttggaacacaatgagaactaaaggttacgaaataactatgacttaataaccttggcaacaccatctgctcgaacgtacgacatatttgcttcatcgattgttctctcaaccttcttaattcgcataggaagatcagtaaacaatggtacatcgtcgaactggttgtaatcattggggtcttcgatgttgtcgatgccgacgatctgttgctttccggatatgacaatagtttttctttcatctgaagggtccttcacataaaacacttgagccacacgctctgctaaaacccatggatcatccttgtggcctgttttactgtgatcgactatcgttagcccgtagtcatcaacggaaacccctattgtgtctttaacccattcacaacggagcacagggatctggatgtttaggccatagtccagttcccttatttcttgaatggtcccataatacgacctcttttctccactcgtgtcaatcgcttcgacacggatcctactgttttgtgcagtgcttttcatgtccttcgtagtcgtactcaaggtaaatccattgatgtcgtaaccttgccatgaattgacaatacttgaaggcccacatgccagtctttgtaaagtaagttcctccacagaatcaccaactggcaggtttagatctttcaaccacggaggaaagcgacgcttgtgctctcttgatatccaatcattggaccgccctgggaagcaggctttgatttcttctaggtgtcgctcaatgaatggctcaacgatagcgagctgttgaagaacgctgttgtgtgccgcggacacctttttgtaatcattattgaagaactgcttcctaccaacagtaccccttccagacaatctaccttcatgtcgatgaacaggaatgccaatggcattagcatcctttatgtagtccatacaacactcgactgcctcttcagttgtgtattcctctatcaatgatccttccggatgagcgcgattgcgtacatagcctttgaggatcgacatgtaacgctcataggcccacatctgatgtaagtataatggaccaagttcaataatctgagggacgatgtgaacgatcaaatgctccatcatatctaaaaatgatggtgggaaatacatctcaagctgtcatacagtctcgatggcaaatgtctgaagcggacctaattccaaaggatcaaataccttctgcgaaattcgattgaaaaagtagcacaactttgttataaccacctttgtgtggactggtttgactgcccttatagcaattggtaggaacaccgttagcaacctatgacagtcatgcgcattgtatcccgaaatggtcaaatccttcattgatactagctttctgatgttcgatgtgaaaccagtaggcactctaaccccttgtaaacatttactgaaggcttttttctcttcaagtgtcaacgagtaacaagcaggaggaatctcgtcttaccatttggcagcactactgggtgaaggtcatgccgtatggacaaatatacaaggttgttacgtgacttcaatccatccttcgttttactcgggatgtccagcaatgtgccaacggtgctatcaaacacgttcttctcgaggtgcataacatcaattgcatgtcgaatctctaggtccttccttgaatctaaatatttgaagaaaattgagtgcttcttgaaaggcgacgcagtaccgttgtcaccatcagctttcttcctctttactgtcttcttctttccctttccatatacaacattaatcttctttgttatctcatacacgtatgtaccacctcttgctactggggcagtgtcattctccactgtattatcgaacaatctagccatcttacggtacctatgtctttgtggtaggaaccgtcgatgtcgcatgtacactgtcttcaaagacgacgtcaggtatctgtatgaagttttctccagacatatcagacatccagtcttccctttaatctgcccagataatgaaaagtttgcaggtaggtcattgatggtaacgaatatgatcgcacgtagattgaagtgctcccgcttaaactcatcccatagtcgtaacccctctttccaaagctcctccatgtcctccatcaaaggctcaaggaaaacatctatgtcgattccaggttggtttggaccttgtatgaggatagtgagtagaatgtactttcgtttctgacatattcatgttggaagattatacattgtgagaaggactggccatgtgctgtgcgagctgcttatgtcaccaaacgggttcattccatcagtgctcaatgcaaaccttacattcctaggatccttagcaaattctgggtgttttgcatcaaatgtcttccactggcgagcgtcggcgggatgtcgaatcataccatctattttctggctctcttgatgccatctcatcaactcagcatcagtcgggtttgagtacagacgcttcaggcggtccttaattggtaggtaccacatcaccattgaaggaatcttcccgcgcttacccttatcagaatctggatcggtacactctgaatctacgggcccattccccattttataccgacttgtgccacacgttgggcaacattccaattccgcatattctttacggtataatatgcagtgattcttacaagcatgaatcttttctacaccaagagataaaggacatatgagtttcttcgcttgatacgtgttcgatggtacaaagttaggcttaggaagcaacacacgcaacaaactcatcagatcattaaaacttgtgtccgaccatccatgtttagccttcaatcttagaagttcaagcactgaacgcaagactgtgaaatccttatcacatcccttcgtttcatcgtaaagaagatccttcgatgccttctctaatgcctgccaattctccaatcctcgtgacctgcccgctagcacctctggtttaacatggcgtagcatatcctctaaatcaaaactaccatcgaaatcatcactatcggtggaaacatcgacaaccattctttcacgcgacatgtcttcgattataaaattctctgcctcattcatctcgaaacataactcttcatcgtcatctttcggattggcgaattccctgtgataggttcaaaccttgtagttggcggtgaatccgtactccattatgtgacccaatatttcaccaggatctaccaacaatttctgattcttgcaatgacggcacggacaaaagatctttgtcatattctccctcaaagcatgcgccttagccctgatcaataaatttagatgccttccttataaaatatcggcttgcgtcttcacatttcatacatccatgacgactgatccatctattatattaaggcaaaaagtttcaaataaaaaattgaccgaagttttcatacaaaggtttaatgcattgtttccaaaaaaaatccaccatcctgtacctggttgtccattgatacatgcaaaattgcccataaacttatttttgagcttgatttgcaaaataatagacaaaacttgtaaaatttaaaaaactccctttccccacgaatttacaaaaggggcaaataggaggatgaaggttctacctttggttgggtcaacaaaatttcggttgaacctcccctaatgggcttgttaggaaaaaaactttttttaaaggcaaactggcctgggagacatttggccaaattgattggcccttaacaccctggtaaaaacctttcaagggttttagaacccctttgaaaaacccctgcaaaggcctttttcagggcccttaagggcctgcctattttgccctaaagagccttgtttggttataaccct

SEQ ID NO: 16488 - DNA, 2707 bp, Oryza sativa
  unsure (1)..(2707): unsure at all n locations
gcggcatgaaactgagcttctccttcgtccagcncgncgactttagaggatcccccctgtcaaagccacaaagtaaagaccttccaaactaattgcggtacactaataagttattgtgctgattattcccatccaaaaaaggcttacactaaaagatattttgtttttcattacatattttatttacagaggattgatgttttaacttaacaagatgtatatgaaggaaatataacataccattgacaatacttcatcaaccctgtacaatgaaggataaataaaattgagctgcttttttgcaggcagtatcatcatgctgaaaccagcagcacaacgttcatcaagagaaacatctgcgtaaccaccacgaagagcaagagacttgcatatggacagaatgtacaacggcaagaatcttaaagattctggatatataagtctccctcctatccggtgctgtacaacatataggttccggtattccttcaaacttctcacaagctttaattgtaattgttgccgaacactgtccagcttatcagacagtgaattttcaacagctgcaacatataataagtcaaaactatgaacactcaaataccatatatactggcatttacaaaatggcaggagcataaatctagtactaaccgattctactcaacaatgacacaatggcaccagtatctgcttgacgatacatttcaccaagatctgtgaccacaggtgcagctgctgtatgcaccctgatacgcctttcaccagaagaggatgtatatctggtggtggttaagaacaactaccacttcatacaatatatgctgctaaaaatgtatcaaacagctaacaataacaaatatcacacataacagaatcttctaataataactaatatcgaacagctaacaataacaacaaagcagtactccagtgagtcatgcagataagtattgacacatctaaatgcactcccaaaatgtttgggcataaacagattttacaagtttcatcaagctatcacaagttaagggatgtcccaaacagcctatgctaatgacaatttgaggaaaggtgttaacagtcaatttgtcaggttaaattgtccatatgtaacattatttttttctaatctaaatgaagatttgaataagagtgttgcataaccagattggcaggaaaggatacagcaatgccacttggaaatatacagtctgtgtggtcattagggtctcctctaaagaaagttgcattgcaaatgctttatcagagtcaacagctggaagtgctaataagtcggtggaccttagcatgaaatggccatgataagttgtgaagcgcacccctgcaagcagacatcagtttgtaagtcattgaatgttaagctgataaataaaactttaaaatattgtcagctcagaaccttttccacatctgatacgcataacagattcccatgcagtttcccgtgtaaggtctctgctaagctcatgtttgagtttatccccatgagtaactgcctggaaggatggataatggtacacctgaccaccagtgtatttcgccagagaacctacagaaatgtagcaaaattaaagaacatggttaattgcaatgcacctttccaaggtttggcagaaaaatctcacctaaagaagctatatcacagtatttatcactgaaagaaaatatgtccactgcaatttgatttttcgtgaactcagcagccatctgtttataaaaaggatcttctgggactctgagagaatgctccttatctgttccatatgcacggacatcatctcctcgaagtctcaagcgaccaacaccaagagatggtaatgtgctctggaatacaagtaacttccctccaatttgactctacaaaagatatgacacaattatccatatctgggtagtgggtacaactaatggtagcagaagcaattgtaggaaaattggcatcttaccataaccatgaatgctgctttaagtgctggaccaagagcagattctacatttacattgtcctggaacatatttggcaagctatcgagaaatgaatcgacaacatgtctagagtcaaccaaattaaccaagaggtcatcaggcaacggcaggaaaacatcatccaaatcagcgaccaccatcatttgaggttgtgacaaagacgactgatacaaccagataatacaagtcatgtaagtaacctcacataaattgaactaaatttcagacgctagtatattattgcagagcaaatggataaaaggatagatggatataccttgaaattatgaaagtgcaatgtgctatcaaaagttaagaatccaatctgtgttcgtggaaaccttgggaggtcatcaaggcatgatttgatggtctttgcaacaacctgaaagaatgcaagcattgaatttgtttgaatccaaactacaaagcataacctataagaatatgctgcaccactagtacatattatgagttacagagaaaaatatgatcccctaagtgattgaaatcaaactgcaaaacaaatagcacatacctcaagcagcccgcttcgaactgcagatacggacacatcaataagaaagaaataggagggtggcattggtggccgcaccatatattcagtgggagcaacaaactctactgttcccttagaaagctcaggtctttgatctgcatcatatcttctgccgct

SEQ ID NO: 16489 - DNA, 9028 bp, Oryza sativa
  unsure (1)..(9028): unsure at all n locations
tatcttctgccgctaccatcaatgccacaaaaatactctccagganctgaatataaagaaaaaggaattagtttgcgcaaattgattacggccaaacaagtgttaagaagtaacccagcactaccgcagcaagttcagtattgtgaaaaatcatataacagaaggctgtcctttacaaatcaccactatttgtatacacaacagtcagtgaaataaactgtcaccttctatataatacatatgatgcaccaactaatttttctgtcataatactacaatcgctggcattgaaaaattgcctctttgcagagtagcagtctgtccattatagtccgtttagcttgctcctctgtctcggagattacaaacacgataaatggcctacagctccaccatagaatatattaagtaatttataagcaaccatgatcttataaatccaattgtctggcagcaataacttgcttcagattgaacaggacatttaagcttaaggatttagtctctctctttttgtttacagccgcttatgaattttacgagtgagttattatgataacaaattccatattagaataggagctatatgcaatgcctaaagaagaagagtcacgtaactacaacatgtattttatgcctaaagaagccaagcatttctttactatgttttcctgtcatggcacttgtgacttttcatctctagtaacaacctaactagcatcttagtccaaaacggatacatatgggatgggggtaaattgatatatttcttcagtgccatactattccagttaataaataggatatgctggtacatactcattccaaatgcgataattctcaaaatactagagaaatttgatccagcagcaataagcttacttggattgttaactacactgtatgaaaacagcaaaggtataaataacttgaatatcctaattaaagaaataaattttaaaaagcagcttctggaagagccttttatggaattatatgggccggatctcgcaactccaaatataactacatatgcgaaatcaaaccaagcttcttaagacatccaaaatcttagatgctttccattcttgctgtacgcatttactttcgatattgtcaacttacatatatatgtcatgggtgttaccatcgaagtgttatattttggataagaggtcatataaagcactatccatacacaagatgccactgactataagaaaactaaattgctcctttcaatccagtggaacttccttctgctgatgagagactttggataagagttcataaaaaagactagccagtttcaaggtcaggaagagaaaggaaaatgctgggtttctaacaaacacagaaacattccttataaattttccgctttgatttcgatatgaaattgtttgtattcaatgcattgatttgaagagtttggtcttccattacagcaccccttaggaaagaggggtacatgcatcagatttttgaaagagcgctactgctaccctaatgaatacttccatacattctaaagttcaactgtaacataaaaagtttcacacccaacttttttcccattttagaaaagcaccacaacattatgatatgattcaatcatcaactaattccctatcaaaatatttttattaatgggacaaattatcttacttttgcagtattgataaaatgtaatttgaactattgaagaatactttggtttgaaacagcacagccaaacacatagttagttgaacataactacaaattcatcttttattgtaggatacatatgttgctagagctagagaaatggtcagcagaatagacaaatatctgtgtgccgatgtactctctatcggaaattcaaatattcagtacacattgaattattgagcttaaagaccaaaaaataattaccatcattgagcagcgtgcaaagattgcagcgccatttccttccagcatccgcgaatgttgcgtaagggtttatatatgttctacatcttcggcaacggatgacaccagctgacccaaagttgataaccggaacctcctgagtgatgagaaacatgaatgtcagaacaattctttgacaaagagggtaaaagataaataaagtgcctaaaagtcattaccccatcaggtgattctgcgagaggatgtaccacagccccaagaggcagatgccaccttgagaccaacgactgggatgctggaattgcatgggttgtcagccggaagtacctcgggtggcagttcaatggatatgcctccaaaaccttagttggttcctcgtcaccatccaatggccttggcagccctttgacgtcgacaccaggatcaagcgatcctggtgcagaactaaccgagagcgactggaagtcctccactaagctctggagggtgccccctgtaggaggcccaccagtcgcatatgccgcctgattgccaaaacccgccataggagggggcggcatggtctgcactggctgctgaaatgttggtcgtgacatcgggaactgttggtttgcaggaggcggaccaccgtaaaaaccttgcatgggcgggggctgtgattgtactggcggtggtggcctcacatacgccgagggtggagccataccactcgctgtaggtgactgcacgagcgaaggcggagggcgaaaaggcggctgtgcggatgcaaaagggccctgagacggcggcacgctggcggcaaaggggccctgagacggcggtggcgcggtgccgaatgggccctgagacggcggcggcgcggtgccgaatgggccctgagacggcggcggcgcggtgccaaaggggccctgagacggtggctgcggcgctgcggcgaagggaccctgagaggacggtgcactggtgaaggggccctgcgggggtggtgccgcggcggcgaaggggccctgctggggcggtccagcgccgaaggggcgctggggaggcgggggacccctgtacccagccattgccgcaggtggcgcggccgcgaacggcgccgcgggggacgcagcagcctgcgggggcggcacgaacggcgcgcgcggggcggaagcagcgccgaacgacgagggcggcggggcggcggtggcggcgccgggcacgaaggcggagacgggcctcccgggcaccccctgcggcggcctgtcgttccccatcggcggctgcatcgtcgggcacctgcagcgcggcgaattgaggaagggatcaggctttttttttctgtactcccttgatccgcgatctgatcccgcttcctcgggcggatctgaacacacgcagggtagtaggagaggggggcgaggtggggggggcttaccgggatcggaccgcggcggcgctccggcgagatgggggcggaggcggaggcgcgcggcgaggagggaggcgagggagatggagatggagatggggttagaagtagaagaagcctagaagaagaagaagaagaagggggatggatgatgacgtgggtgggtcgtgctcgtagggaggaagcgaatagtagggctactcttctgctgctgtcacgcgttgcacggattcgccttttgattccaaatcttacgattcatctatctcttacttttcctcatgaaaattcgatcttctcttatggttgagagttgatttttaagttttatcaaattgttatgtcataaagtattcttatctggtttcatcaggaaatatgttaaagtatgtaaattgcttgttttggtacagtaacttgactagtttataactttatatgaacatggaccaaaacaatccatgcgagcgaaattgatctaacgtggggcaacttggtgacacctttgcgagttagcagttgctttgttttgaaaaataaattgcatagcagttgttttgttttgaaaaacaaaatccacactctatagttcaagcaacctacaagacattgctatacgatcccggtaggggtgatgtcccgatcttcacggcgtaggatcaagaaccgataactagcctcaaagagaccaaaataactggctgcaagcagccaagataacagtgcaacctaacgatcgtgcttgaagccaaccaccgtctctattacggcaacctgaatagagggttcgcccaaccacactctaagttactaaccaacacaacttggaatcaatcgaggaaaaaattctcaaaaggaccagaagcaccaattggagggcgtcgatcgccgcttctgtaatctcacaaggaaatcacaaaagcaaagggatagagatctctctctgaatttgctagcacacagctaaacaaaggggttcatattctcattgtcaaaaagtcctctaaatgataaaacataggggatatttatactaggaacaatcctcctagataggaatgaaaggtcttgggagtttacaggagtccaggacataggctagctcaaaggtcacttatacaataagtgaattcccgagaggactcacgcgtctgtttggcttctgagcagttctcaatgatttgtccataactccttattgggaagttgaaattatgagccgtttgttagaggtgaaactagacttaattatctttccaaccatatatattaagcacggagaaagttgactggttgggtcgcacgagccttggaagttgagcctttgcagcgtaaagccgtaaaccatcttcttgttggcgtacatagctactggttgagcatgggcggattcctcctcgacgtaacccttgttgtcctcaacgtaacctatccttcttggcgtagtgataatgttctcgggcgtaaaccttagcaatacaaatgtagagcatttaggtagtataaaattctcactaaaatttggattaagttgagcaaagagcgagttcacctcttgttgtattttcctagcacggttgcgcgtaattggacatgatatgcttgatcgttcttgctgagacgtaatccatcacttggtttatgtcatcttcattttcttcatgtgatgtatgacgtaaaccatcacccttgtttacgtcaagtatagctgggatgtgctcatcatcatgtgacggaggctggggcatatcacattgcatcataattattattgttgaatgctacattctgcaaaactaaaagcaagttaatgtgctcatgtatgcacaactacaaacaattgccagcatgcatatgtttcattatggtactacacattatatcattttttgcatgtgtgttgttttgtactaggttcgcacgagctatgcaagttattgtacttgaatgagcactttacaagttgttgtacctatttgcacccacatcacaagttcatgtatcgggagagcgatttactcttttttattttagggaatatgttgaactatatttaatatctaatgatattgtttctgataaacttacattgaacggtaacggatacggtttagtacttgttcttatacgttgtttattttcgtgtattgttaactcaaaatcggctctttccttttgttttcttttgaagtctcgatttttcatccaagtgtttcattatagtataaggttttaattgttatttgtacactttggttatgagtgatttaaggatgagatatcttcttggactctaaattcaaattgagctacacggaagatacattttatgaaggatgtatatcaatatgaaagagcattggaataacgattacctatactcggtttgaattagttgtgcggctgtagctattggcggctcagaaaataggcactggcgcatgtttaatcgtgtattaagtactatagaattttgtggaaaaccatatttgatgaaagtcatgcatatggcttggaggagaactcccgtatctttagagatccacccctacaatatgggaagtattatgtcttctaaaagaacgttggactaaaaattatccctattgcacaatcgtgcatcccacccttagacctccgtctccatcaccaacgctgctccacctctacctctagcctaccacactgtagcctggtgtccgccacctccacctttagcccgacacacagtgcaccacctttgcctccttgcatcctcacacacaccaaaccgcgccgcccacaaatatgtttcatgttgccaagaagtgaagaggaaggactaaaggtgggttgttcgtcaagcctagaacttctatttggttatttgctagttgctattgcttgatgcactgtcatagtttgtgacttgtcatgtgaagttgagaactaagttggaacttggaattgttatgttgcaagtgcatggtgcttctgatttattgttgctacttgaactaagacaaaacctacgtttgtgttccctcattcatcatttgtcttcctaacggtatgaatgtaccctttttttcaccccatcagtgagagagaagagaaacaactttttttttgaagaaaacgatggtaggagttctaccaaaatttatagaagaagagaattgaccctgtttataaggaaaaccgggcccgaaaaccatacaactgcacagttttgctatagggaaaccgacaaaacctcacacagaagacaaagtgaaaagcctgtggcaaaacaactatgaaccatagaagtgaccgaggaaggagcaagacctttaaggcgaagcctccaaggagggaaccaacgacagaagccgctgctaacgcccgtccaaaaaaggactaggttttcacccaaaggaaaagagagtcaaacaagacgacacctccaaggaggatacggcacccgtaggtgtcgatgtcaccgaacctggaaaaccaggtagggctttcgcccgagactcccaagaaaggtgcaggacctccaacagctagagcgagagtgctaagtgttatcgttgcccagctcaacagctaaacccgatacagcagctccaactccgcctaagcactaaagctctagcacaacagagggccaagaagccctctccatactcgtcactacgaccggttcactaagacacagggcacttgaagcacaagcgaggccaaagagcccgaacaacaaacaagctggaccaacttcatggacgaacacaactcctcaaccacctaaagactccacgaccatggtctggaagcagaccggccaacagaagggaggagcatcaaggaaggtgaggaggtttgcctcgccggaagaggaactgaaagatgaagccaggttaacagagacatcggagtcttccatgttccgacgagatcgaggcggaggcatctccacccagaatcgttgggcttcgcgggagcacctcttgcaactgcgacgatcgcttccaactttgccaccaacacagagaagagttggggcgagcagagcaacagaccatctagacaacttgcagggaggtggcaacagaggtgggggtgtggaggagggggcggatgccactgagaaggcaccggagttgccgacgcgccccaccgacgacagccccaccggaccgccgagagggggacgcgcgccgccacgcatgcgccagccttctgcccgcacatgtcagccaccgccacccacacgcgccggcctcgccgccgacacgccccagccggagtagcagacgcctccgccgccggtcctacgccatgccaacacacctgagattgtcatgcactaacacaattgcccgaactctcgtagatgatggtaggggctgtaggatcgaaatacaagaaccaaacctaccagaaagggacgaatggtaggaacaccgaaaacataaacttttagcggaaataaaaatttaccctctaacctgatgaagtcctcggcgtagccggtctgactgcatgctcgcctccggtcaaaccgtcgggatccaaaaaacatgtattgacgaaactctagctagtgcgctagcttgccgcggcgagcgtccatggggatggggatggaggtgagtttgaggacgggaaacaccacagtggtggcttctgctactgctttgactgcatgctcagccaagaatgtcgcgaacccccgtgattgtgcccaacgtgcccttgtagttgtcgtcattacctcgccttgccatgctaccaatgtcgccgacgtcaagttcggcggaggcgaggtagggcacggagatggctaaggttgccggatccgatggtggagaggttgggaatgaaaatgtatgaggccaactgcggtggtgaggtcgctgatttgttccaaccagcctgatcatggttgctgctcgaagtgagaggagaggggagaggaaaagagaagaactgtcggtcacctcctcacacatttgatgctgcctaagtaagtagagatggggaggagccactggagcgagcgaagccaccggtagaaaaagaggagggaggagggagggagaaggaaaagtgggaaggagagggaggagactagggatcggacgtctgatccttggcaaaactccgaacgatgtttcactggatataaaaaagttgtttcagatgtttcactactcagtaaaatttgtttcaataaataaatgttttacatgtttcattgcttggtaaagattaaagaattgtttcaaccaaatataacatcagaaaaggctaattgcaacatcagaccctgtatgtgcaacatcaaagaagacataggccgataaaacagagtgaaacactctaagacaaccaaatgcaacaaaagaaataactccaccaatgtaggccaatggcgtcttgctccgccttatgtgcaacctcctcacagtggcgttgccactttcggcgagcttggagctctctctggcgacaacgcttaccactcaaccttgcacgaagcctccttgcggcgccacatccacaaagcctcctccttgtgtgcctccactgctgccggagagctcggagccctctctagcaacagtgccttctgctccactccatacaaagcctcctcatggggccgcagccgctaccaaggagctcgaggccctctccgacgccgctgctacccaagactcctagccg

SEQ ID NO: 16490 - DNA, 36569 bp, Oryza sativa
  unsure (1)..(36569): unsure at all n locations
ccagaagttattcacccggccgtgggccacaaaagaaaagggcgtaaacagggtccctttgagncccaatcacaaaaaattctccacatgggcgcagggtttttccctcttatggcacctctaaaggggggagcacttgggagttggattttttgggacaacggtacccataacgttgaaaagcctccttgggcgacatatcaaaagcctcctctggtggcctccgtcgccgggaagttggagccttctaacaaagtgcttttgtctcactccaaacaaagcttctaaggggccacaagcgcacaaagaagctaaggcttctcggacgcgttggtaccaaaactcataccggcagctcctcctggtggctccacactgnagagttaggctccgncaagcgcggaactttcctaaagaggacgttttcacttccttgcacacntcttcctggaagcggtggcancaatgagtttgggcttccacgagattgattcctctaaacaagcgcgattcataaaatcagataaagggattagggtagaggaagatgaaatgggaagaaaggcatcggtgcacaagctccgcccggatggttgatatgaagcattttcgaaaggaaagaggagggaaggggaaggaaaagagggaaagaggccaaataccaaaagaatatatttttttaatgcactgaaggattaattagtggcttatattaaatagttataaaattataatatcatctttataaatcgatgaattgcaatggcatattttattttcaatgacaatatatttacatggtacttaattagggtaatattaatccgggactattgtatgtggtgccacatttttcaataataaaaaaaattcaaatcttatatcgtaaattccatatattaatactataatttgaaatcttagaacattaatatacatttttcatgctcatgaattaggaaagaaattaattatatattcgattaaaaaacatattagttgaatgaaagtataaaaaagaaagtataaaaaagttaggaaaggtatcccatatccctgcgtaatttgtgcctaagaagaaaagattgaggaaatcccccgtccgctcgccgtggactccgactcctcgcgagttcgccgccatcgccgatccccatccatcccgcgagtagagcagagcagcgccgcagtcgttcgtcgccctgctgctgctccccgccgctggtgaggatccatccgatccgtcacacgcgtcctttttttttccatgtattttttttctcgaatctgcttgcggattaaccctagcttctgttctagaaattatttgccttaaaatcttaatactaatagcactttgtttgctcccaaaaggattggggggttcaactgaaccctccatgttcccatgttagatccgcccctggattcagtacttatagcactgcatttctgattggatgtgtgtgtcttcatgaagggcttgaggaaatcccaggattgcgctcgctggcgtcgcgtggcagctccaacaagttgaactgtattgcaggtttcaggtaacttgttcatcttttttaacattatattaagatatgaatgatgtcccttgtgcaaacatactcattgatgcatcttatttttctcaactctatgtttggtttaacattgtttatttgggatcccaaattgtttagatagttcagctgaatgacatgtgtattaccaaccatcaacagattggaaagctatgctatcatatatagcaaataactcatcggcaactaggaaacatgttaaaagttaaaacattgggaatttatgcatgtatgctgggagccactaagcataggtcttggacttaagaaggaataagatacattaagatatcttgtctctctcgtataagttcatcatttatgcttagttacttttaaccctctgaccgcagcacactcactgttttttttttgtgccgtcagcacactcactgttgattggatgtgtgaaatcaacttaatagctgttgattcaatatatgcaaagtaatggtcttaattgaaatctgaacccatgcattttattagaaatttgaggctgcgttgattgaaggtgaaaagctgcttcttatgtataaaactgttgaagtttgttagcctctacatttgtctgcttgcatcgtatgggcattttcttatagcaaactgtatgcatcatataattatagtcccaatgctgaatgcagatgcggcaattgttagatatgtgcactcaatgctagttttaacttgctgttacttttcagtgatccttgaacaagcttattgaagatgccaaatgcagagagcagtttgttcaagatgccaactgcagatgcaaatattgctgccctgcacaaggaatgggacgatgcattgtgcccaatttgcatggatcatccccacaatgctgttcttctgctgtgcagttcccatgacaaaggatgcagatcctatatatgcgatacaagctatagacattcgaattgcctagacaggttcaagaaaatgaaagtagaccacaatgacggttcgtcacagcaaagttcatcgttgcctagggacataagtagccaaaatgtaccccagagatctcattttgatcccactggagaaatccaaacaggcatatctgaatcccatgaaattttcaatcatcgagatgctatccaaagctctgctggcctatctggacagcagggagaaaatagctataatcaagatctagatttgactttggaagctcagcaaagagagagcagtagcactgtggagtcaagtgaactgacacgcttgaaccaattggcatgcccattatgtaggggcactgtcaaaggctggaagatcatcaaagaggccagagaatatttggatgagaagtcgagatcttgctcgcgggaaacatgtgcattttctggcaactacagggagctccgtagacatgcccggagagtccatcccacaacaaggcctgctgatgtggatccatcaagacgccgtgcatggcaccgcctggagcaccagcgtgaatatggtgacatactaagtgcaatcaggtcggctatgcccggagcagttgtgtttggtgattatgttgttgaagggggtgacatgttttcacctgaccaggaaggaggcatgccaaatgaaccaagtggatctttgttgacaacattctttctgttccatatgatcagtagtagtccgatgagatcaggagatgagataagaggctcatcgaggggcctgagaaggcagaggcgccgttatttatggggagagaacttactaggtctccaatatgaagacgaggacgaggacgatgaggaggaaaacctagatgaagatgttcaaagaccaaggagtcgccggagatttgtaagatcaaggtcggaggagcgatcctaatgcaccacctgggtaataaaccttcgttgctcgttgtgaaattcgatcaccatgaatcgttgatgattccttgcatgatcctaaaaaaatgtcagtggactagtggagttgcaggtggtctgctgctttgaatggcaacatattgtgttcatccctgcagtagaagacccgaggcaaatgggttaattggattatctaggtgcattccatccgtgttgtgttcacaaagccttctgtaatatgatgtaaagaatagctgaaattggcatgcttagggcttgacacttgctcaaccaaaaatgctcttaagctctgttggtgttgtggagatgcatcataagcagggctgcctcgtgagcagtttggccatttgttgtatagagtatctgcaaatacattgaaccgaatttgttcgtgttgctgctgttctactttgaaatctttgttcaatgggaattttagaatcaaatttcgtccaaatggttgtgcgcgtttgacaaaccgactgaaatgctcctcatcaaatgcacatgtggtgtatttacttcatttgattgagcaagaatgaatcaactcactgataagagcatccctatcttttactgttgtgaagctgatataccctgacgctgcaacctttagaagaatagtttccatatttatacaacactaatccttctcttctttgtattatatttgcttataaaatacaaggtctttttagaagaaagagcacgagtcgtcagatgtgtgaggatctatgacagacttctatacacacacgatgagttattttttgcaaaatagcctatcacgcgttaaatttttcgaggaaaaaacaagaaaaacagtgcacgaatgggtgttatcaccggaggattgttgccaatgtttgctgatgattatctgattatcaatttagatattctgccttaactgtagcgctaccaagcattgaacacgcagtgacaaacaaccagctgattaatcgttattggcaacaaaagaaaggaagaaaccatcaaccacttacaagtaatcaagtagtacaacttaataatacagataaactagtccatgtaagtttgcaaccagttaaatactttagggaacatatgcactatacaaacacccaattaatcttgcctttccttgctggaccaaaaatggttttgcaagtgccaagactacaacttcttcactgaccaatcaagcttcttatttcaattgcacggcataacgatctggattaatataaaattgtattctccatgcttgcctctaaattttcctacaaatgaaaataaacatcatcagaaatatgtcaatataatgatgcacagctctccaaaaaaaaggtcaatataataacagcagctacacactatcggtgttcatgtttgcattactgagccaagccctgcaccttgtgtcataactggggattccccagaaaaatagaaaaaaaaatcaagcatgccattttttagtctgctttctatatttttaattattttcaagagtggttattgaaactcggtgataaccgtgaacttgtgccgtaaccgagtgccagacttatcctcttaggtttttgccttctttttgtatcatctgtaatttgtttggttttctgaatactgagctatcacaaactcatgtattccgatgactgcgtagaaaacagctcgaatttggacatatagaccaaaacagacacactcgggaaccaggaaaatttccatcagaagcagctacacaataagattgactgtcctctttacatgccgcgattattaaaagatattacttaggctcagtttatggttgctatgctatgccatgctaattgtgcttggtttttaagttgctgtagagatgtacatttatagtcattgtagtcgtcttacaaatcaatgtaaagttagagaaaatatgttaagcaactgtcatgtctcccacaattgcttctgctacttaaattaaaagaaaaaacagtctaccaaatgccaaaactactagaagcagtcacactaaataaaattatcataatccacctcaatgtcaaacggaaccttagttgatatcacacagctttaaataaaaatgcacataccattgatttgaagtcatcagagtgtctagctcctgttccaaaaaacaatagtctagcttcatgtgtcgactctgcatttattccctttttggcacatcgtgcactttccttttcttcataaaaattaaaatcgtccagaagtgacgtttcctggtcataatccttgaaaattttcaacattttcagaccctggagtaggccaatctacataacgtgaaaaaggatatcagatcaaaaaggtttagaaactaagaaattacaaaattaagtcatatgaaaacatattaaagagagcacggataaatgatgtgagatatagcattcattatcagatagcaccgcctttgttcacaggaggaatctcagtacacctgctaccatggaatttattacagaataaacttatcttgaagtgatgtgctatgtaccaaaataggggaaaccatccattttctaaatgaaacaaccatacgtgatggaatttttcagcacgaaaaaacaaagaagtggatgcatggtacctcctgagtgtccctgctgaaagtaacaattctgttgtcattattttcaagagttatatgtttgaagagcctattcggaatgtcctttataatgtgccaggttacagggaaaaagccattccatctatctagtttccaaaagtccatggtcttcttgaaatcaacagggcctaatatctcagccaatcctacaaactggccactggaattaacctgaaatagggaacacaaagaagcaactatcttgaaattttgccaggggatgaagggatgcatgatataaaatagccatagtaccatccagcgcaaaaggtgtgtaattcaaactttcagcagcacaaagtatatgtggtggattaagtctctctcttctggagaaattcatcacaaaatttaatggcagatgtatctgcaatgtaatttcaagtaaaattgccttttaaggagatcacacgatacagatgaaataatcaacccgtcgaatatactaataaagatagcaaatatttagaaagacagaaaagtcaaaaacgtgctagtaaacagcagttcaatctcataatagaaacttgccgttatgtcaactattttgctcaaacatccattattggagatgggttttaagcgtaccagcacgtgctcttgtttcttgtatgaaatgtattttttttttccacgtgtaggttgtagagtgatagattacactatctatgtaactatgctgtcataattgtttcataaccatttggattacatgcaagaaaatgaggacacatgcccttaagggcttaaaatactaaaccatgaaaataaagggccatataacaagaatagaatttgatcactaaccgaaaagaataggaagacagggcactttttgcccttttccttaattaaaatctgagcttcacgaaaagctgcatccagcttattgttcccatgtggtgtacttgcccaaacattgtatttgatacctttatgaatatcatcttcactatatgactttatcataaagaacttggcttgttcatactcaactataaagtctggtctgttaaactgatccctacggaccaaaggacttctgatatcttcctgtatcttggatcttgttgcattttccaatttgtttgcacggggaccacgaacttgctccaatgtatcatcagaatgtttgcatacattatcgttcttaatagtcctatgatgatcagatcttgtgacagtatgtttgcctgtgcccatcttgaacctctgattagtagcaatactactgacaaaactgtctcttgagtaacgattgccatgagaagcacctcgcccgtagtttagctgtggatgtgcctcagcatcatggcaccattgacgatgatgcaaaggtatcctatcttggtagcactgatagtcagagttagacagcgatggaatctcatcaccgtaattttgtctacttgagcgtgcgttacaatggcgagaaagtgatggaatctcatcaccataactttgtctacttgagaacgagttacaatggcgagaagaaagcgatggaatctcatcaccataactttgtctactcgcgtagttacaattgcgagatagtgacggaatctcatcaccataactttgtctacttgaaagcgaggggattctagcaccatagttctgactagacagagaagggatctcatcaccatactgcatccctcttggcagtgaaggtccccaattgtcaaaactccattgacttgaagaggaagtagtctcatccatggaattggcctgtctaggtatgtcaactatctgttttgatgataaaactaaaattagtaaacacccatatacagtctttaatcgtttaatagacatgccaaatacagaaactgtatatatagacaaaatttattgtgtagtcaaagggatccacaaccatacctcactgtggtgttcaatagattgaccattgctggttcgaaaggcagtagattgattggatcttctggaccagcgttcttctgaatgataatctaaggtaaaatcagctttaccttctgctgcatacaaccttcttatgtcaggactagcagaaggatatgaagcaatgtgatctggccttcgctcaaaggttttgcttctgacgctcatgttcccaactacatctcctgacccgtctggagtacttgacactgattctacttcagaagaacttctccaagaacaggttgatgaagaaaagcaagactgctgcctacgatacccacttcccgatgacatttcttccttagaatctgtatttgacccatgggaaatagcatggttggattctgaaggcggctcttgacaatcctgagaaagggaagagttgtttgtatgttgttaaacaaaattgctatgtttggatctagggcatgctatccacagatttaatggttgaattaactcatacttgtcttagcacataattactgaacaacgattttgttcgctgtgctatcttagtcaagtacacatgatcctatttctgatggagtgatggtacaaccagaaatctaactacagatttatttataaaccaatcgcgccattagtacaacatctcttgggtcctattagtttctttacttaactgctccaaagtatttatagtttagaaagatatataacacttcaggtaatctggtcaccgatagcagattaattgaagagattgtgttgtataaaaagaggatgagtaatcaaagaacaaaccgatgccaggtttgatacatcctcatttgcgagagacataatttgggtaccatctttgcatttcatactgttacctgcagaatgagaaagaaattgtccacagagtagaagtagaacacaaattgactgtctgagctattcagaaattattactatcaaaaagttttggaaactaattacgatggcacatacatggctgatatgaagaagtcgaatcttccccaccaactgcatcatcattcctatcgttgtttcttgtgaagccggaagaatcaccttctgtgtgcgataacgctgacatgggcggatcggaaggttccttcatctgccaagtaaaaacatgttaataaacagcggcgaaagcaggaatttgtgcgcggttaaataaaaaaaccttaaaactgagcaatccaatccattattaaggttgtaaatatgggacaagtgacatgaagacaaaattcgtttgattttagatgttccccatgagcagacaaaccaaagttcactgggtagtagtattaattaagccgaataccctaatacgtttagtgtgattttgcaatgtaactactgcttctacagatgaaggggctcgattattcccagccaagaacctgctatggcgacagtgctatctcaaatcttggactgaacgatggatttgggcaaaatacgtgcacaagaattgaaccggggccatacctacctggagcctcaacggtgggttgctgaggagacgctccgagacggcggcgatgcggaggcggcgatgcggcggcggcgacggggagtcgcctggtgtgaggaggggtctgggctagttttcttctctttttttgggggggttttatttattgagtatttgtctttttttttacgcattacggattacattaaacggcatgttttctatactgtttaacggtataatctctttggcccagttgtaaacaggaaatagctgcagcaactttattgttaaaaaaaatctccccgacggttaaattgtttttttaaaaagaaactttatatatatatatatatatacacaaatttataatatttaatacgtagttaatgtactaatgatatttctacaaatagatatatgcttaaatgaactcagtcttagtggtactgcgtagagaacatttatctactattataaaaattgaagatatttttgtcggtggtttggtacgtcatctgtgtatgagtcgatttttaagttcgttagttttttggaaatacatatccatattatctctactattataaaaattgaaaaaaaatttgccggtattttggtacgtcattcgtatttgagtcggtttttaagtttgttcgcttttgaagatacagattcatgtatgagttaaattttaagttcgtttgtttttggaaataaaaaaaaagtcgtataagaaattaaaaaaatatccaagcgaattctcacagtaaatttcatcctagctaaacgtataacaataataagattaaaataaaattcacccattacaacgtacgggtattttttctagtttttttttaaaaaaacaactaatgaaatttataattttaattattttttatatgtgctcttaaagtaaccatcgtaacacagttttagccttttagggctgacaaatgttgatttatatttatttataccactcaacaaagagtttatatttgctcatcaactgcctttctttggttgtgtgagttttttttctgaatgcatgagtttggcttccactttaggaggagcctatgttaccgagatacggggatacaaatacgtagtatgatgatacaaacataagccattttttaaaaaataaggatacggtgatatgtttatatatatagacacacacatgtaaattaaaaatacatacagaaaattaattaacctctccaaagaaatagcaatacaatactagtattggtactgccaattccatatattaattttgttcagttcctctaactatctcttactataataatctcttataataaatcaagttggtgaagtaattaagcttgccgactgccaattattcaagaaaaaaaatactactactagactagtgaactgatccatcatggttacaatatcaattctaagtgtaggctacacaaatagagccagcaactagaagatttcaccaagtggaaacaagagtagaataacagatttcaccaaacacaagtgaaaatgtagttcatagtactacacaaatagcacatgtccagactctagaccagaccaagggtacagatctaacatggaaggcctaaagatgggatttactcacaagggaatgaagggaaaacagctcggtggtgatgggctgacgacgatagggttcaatctttctttttggatatttgtatcggggttgccgatagagttgccgatagaacgaaatttagttccgaaaattttgataaaattcagttaaatttgaacaaatattgccaaaattcatgaaatattaaaaaaaaatcaaccgaaataatattgtacctagggagggggtggttcccgataggaccaaaatttcgaaaatttcattccggaattttgaaccctgcctgatgatgttttttttttctgcttgccggcccgcagaggcactgctatggcggatgggagaccacctagacccaaaaccctgcctgcggcggagaaggtgcctggtccagtggaggtgaaagcattgcaccacgcctgctgacagatgtaacacatcctaaacgattatagtattaggatgtgttacatcccgtattggttggtttattttttatgggacgaaggaagtatcagataagtatttataatcgtttgatttatttgcaaatcaagaaaaaaatggatacgtacgggatatgtatcagagtgtatccttatatgtatatgtattcgtcggtgtatcagatactgatacgtgacatgtgtgtcatatcggggtaacgtagggtgtggagccccgatttaattaaacactactaaaattcttttggagaggttcaattattcaatattttataacttataaaatgcacaattacatccctaaacttgctaaatatatcatcgttggggcataggcgcatagcgcgcgcacactgacgtgacatacatatataatatggacaaacttctaatccaaatttgcagtactccctccgtccataatataagggattttggagggatgcctaagtgtcatatccctccaaaatctcttatattatggaacggagtattaggattctcattcaaccatttatattttaggatggagagagtggtgattaagtggagcccacctatcattttctatttttcttttgttttctctctctactatttccttcctccctcaagtaaatcgttgatggtgttctgcaatggttttggcaccttggcactgcaagtctgcgacagtatgactagggacatttaactttttatcgcttttaagatgtggcaattaattatttgtcattcgctgtctatgacatatgagccctcatgtgtttatgacatgtgggtccagtgataattcctatatcaccacttgtaagagtggcaaataattaattattcccacgagtggcaaataattaattattccctatgactaatgggtgttcgagttatatactagatccgctcgccttgtccatcaccaccgatgatgtgccatctctgacttcacaccatgaggaggaagagaaaggatgagtgagagttgagaagaaaaataaaatgaaaaaagagaaataaaaagaaatagaaaaaagtgggtaggaaagatacattgtttatggatgtaaatatacatttgacaagtttatggaaccattacccagtataaaacctcttacaagtttaataaccaatttggtttcgagaaacatagtacaaacgcaggtgctcacaacgcgcgtacccttgtctctatgaacgtccttgtattttgctcatgatttaattagttgagagttatagaaaatcaaagatttgtacaacatctacaagaaaaaaatatatttagacatagtctgacaaaaaacaaatcttattatacaattactatgcggagtagtaccatttcagaaaaaaaaagaaaaaaagaaaaggaagaaatgctagcacaaatctcgatgcacgacgaacgatgtaagatgcgtagcctttcctcctccctgtctttcatttcaaagtagacaaggcgaggaaaaaaaaattcctccttttccccgtcttcccatcgctcgccggcgaccgccatgaactccggcgagcctcctgcctcgtcctccctcggcaatgccggagaggaggaggaggaggacgacttctactgggacgccgaggcggaggccgagctgcaggccatcgaggccgcttacgccgccgccaagcgccgccgcctccccgactggccaagccccaacccggtcaccgcatccgcatccgcatccgcatccgggggttgttcccccgcgccgccatgggctccctctcctcccgctttccgaggtgctcttcttggctttcccccctttctttgacatgatatgacgtttaatttaaagaatccctttttattcctggagctggatcgatttcatgtctctcgcatcagttcttttagggtcatagggattaatgtttcttggtagtacaacatatgcatcgttggggggtaaatttctcaattttgctgaaatgaaatgccagctccgtgtaacatttccttctcctgaggaaatagtcagaaatattgaagaatttgttttctaggttcttttgacaggaatcagggatttactggcattgccgtggttaatttctgaggtcaatgtagtttatgtatatcatccttcattttgattgaaatgggtattctgcaggtaatgtgaaggcaaggtaccaaccagtaatgttcaatggcagcatagtgtactgcaggaccccttcaaaagtgaagaaagccacaagggacattttatgcaaaattgaaaccatgaaggcctctggccaggtttctcttggattcgatctcgagtggaggccctttccgagaagaggtttgctgtttttcctaaatcctaaccaaatctttaattgcattttcagcatgttcagattgagcaaatgtgggtttctggaatcaagtcttcttttttgaaaaaaaagaaagcctcaaactcttgcaagtaatgatattgacggaacataactgatggggtatggattttgcaggagatccaccatgtaaagttgctgtaatgcagttatgcatggagagaactcgttgttatgtcatgcacatcattcactccggagtgccacctgtactaaagtctcttttggaggatagttcgtccgttaaagtaaacacagcttccctctttccctgcagataaatccccatttttcccacgcacgggttaacatgttttcatcatgcaaaccattgtttccatgtcagtgcaggttggaatatgtatagataatgacgcaaggaaaatgttcaatgactatgatgtccatgtacagccattgatggatctgtcaaatcttgctaatgccaagttaggtttccctcctaaaagatggagtcttgcttcattaactgaaatggtcacatgtagagaggtaatatttatggtatcaagcattgttctctttgcccagttctggtagcattgaataaaaatgtgttctttctgttcagttatttatgtttgtggtctatgcattacagcaagttcggttgcacaactagttaaatgatacaagttcacctaatatttggtaggatctcttaaatgtatttcaaatacaagcatttttcttttgaaggttcttgataagttgatatacctttgattagtttatatctattagtggctcaccactagtccaatacatgttctccatccctgccctcacacagcaagacgttaaataaaacaatgcaaagcccggtgttagtgatgcggtaatcagttacatagaaacacaaccatgtcggctatcaaacttgttttgacacattatcatatcatacagaaataaaaaaagagttttggcaactggcacctgcagaaaggcgtagctattgtgtgtatgtatttgagtgtattattgtatcatgcacaaataaaaatggatggtatggttgtatgcctgtggtcttctaaaacattttcacacccaaacctagggctccttaaaatgaatgggtaaacctagtgttttgtgttaaaagcgcctgaaaaatttgggttttctaaaatttaaattttgatgctttaatcgctgcatcttctcgtctatagttgccgaagccaagcaacataagaatgggaaactgggaggcatatgttctctcaaagcaacaacttcagtatgctgctacagatgcctacatatcttggcacttgtatgaggtatatgagtgtactacttacttataaattatttttttctatccctacagtcttgacagccaattctactcttgattaggtactgcagagtctcccagacaataatgttgaggttgaaaaggagacaattacagcagcatagatgcaaatgcataaactgaaaagtgggttgttaatctatttgattgctccctaatgttctgcatcttcacttctcaaccaggttggcatcatgaattcacaaatattttactttacttggagaattctgaatttctagtgatggcttatttttcacgcctgcaattattccttaaatgtcttttcctacttattttatcaaaaggcttgttcattgttatatgatggagattttacataccttttatatatatatatatatatatatatatatatatatatatatatatatatatatatatatatatatatatatatatagacggtggatggccatggagcccgggcaccatggtgcccctaacaaatttactatatatatatatatatatatatatatatatatatatatataatgcattagtcctactgtttcgctgaaaaaaggattttacatgacataccttccaatgatctatgtggtatttagttatatcatctgaattttaaaatcttgagggaatcagaactgctgtttccccttggtttcatagagaagcaaagaaactgctggttctaatttggaccgcagaaaatttccaacatagaagtaatgattttagtgacaactgacgagctatatcaaatgttcagaacagaaacttatagtcattccgtttcttttccttttacattatagaataggccctgttcttttctccaactaaagttggattaaatcttggatactcgtggcacgcttttcgaactacttaacggtgcgtttcgtgtgaaaactttctatatgaaagttgctctaaaatatcatattaatctattttcaagtttggaataattaaaacttaattaatcacacgttattacaacctcgttttgcgtgaaacacttaatcttcatcttcatcttcagaacattcaaacaccaccctagtttctcattgcttttggaactgagtttatgcttgccatgccagagttcgctagttgtgtagcagacaaaatctcatgaatgtcgtaaaaaaggtcaaaattttggaatagcaccttattttcggaagtctcttattccttttttttttaaaaaaaacatcgttttattgttagttgggtctatagtaagttcatcccagtgcacaagtaagtctcatatcatgaggtactatatgttggcaatcctttgttatggtatgtagaactgagatggacattaatgtgtaaattgtacggatttactccatgcaggcatgaactataagttgattcatccttgttagttactacctgcatattcatttgatctcagattcccagttgatgaatgcagtatgcattttattctgtaattatctgaagaagtacaaatgtataacaacagttgagatgccatttccaactttactagggaggtcagacgaaaataggctggtgaaattgttataaccttgtctagaaatgtgaatattgtatcgctatgtatgcagggttgagtagggatatcttcatcagaagtcagaaccaaagcagtatggaaccttcttgaacatgcgtcaaaaggcagtgcgtaggaacatacctaccattgttgtaaattgtgctaagatgcgattgctgaacttttcagctgctgttatctggaaaaattaactgtgtactttttagaccgaattggaattacgttttattttattttttgtgaggaagaatttgatttattttgtcaccttggatgaaaattaagatttttgtgacacactttttaaactgctaaacggtgcgtttcgtaccaaaccctaaaccctaaaccctttcataccaaaactttctatacgaaggttgctctaaaatatcatattaatttatttttcaagtttgtaataattaaaacttaattaatcatacgttaatatcagcttgttttgcgtaaaaaacttaatcttcgtcttcaggagaaaagatcgccttaccttagtgtgtcaagtattgcctttctggctggcattgttttctattatctctgtccaaaatataacttgtattagattagacacatcctagtactgtttgttcagatttgtaataatagggtgtgattaattcggttatattttaagatggaggaagtagtgtttattgatcagcccattgggctatattcttctttaatccaggaatacgttggtcttctgacccacttgtaatttgtcctgggcttcaagccattgtaagcccactagttctctcatctgtttgcctgtctggggttgtcatgtaagatgggttagccaaatggcccagacgaagaggtgaaatggtgaattgacatattgtgaactaatgccttctttggaatgggtgaattttgcggggttttgaataaaataaactaacgccttgtttagttccaaagtttttcttcaaactcttaatttttctatcacatcaaaacttttctacacacaaacttctaatttttccgtcatatcgttctaatttcaaccaaacttttaaatttttgtgtgaactaaacacagcctaaaccctgtgaaaaccctgcaattttttgcgttccatataaggtgcccaaactgatgctccaagattgagcatgacaataaggaaaggaagggcttattcactttattgtcaaagtaaatcttaccatttgttagtaaagctaaagattgacaatgcccaattttagcaaggttaaagatgtgaaggtgctatttggtttgataccttatcaagttttgatgtagttttgtgagtggaaggttctaaaattataaatttttggtagaattggtaaaggctgcaatggttatcttgtttaattagaccctactaaaatttgacaactgataaggttgcaatgataaaatcttattaatttgttaccctactagaatttgggcatttggcaatgccaaaatatgatggtttattttggcaatgaagtgataacccggaaatgcacttctatattgctaataatgagaaaaatactcatcattttacagtaacagtgagattaggcacctaaactccccttaatcaaactctgagatggcccattcaaccatgcaagaacagtaattttgacggcacatacatatcaccggcatatactaaactaaactcttagatctctttgaaccgtcctaaacgattaaaccgtcaacatctgagctcattgttcttggggctacgtgacacgtatcgattcttattcttaatatatcattagaagcatgccgttgcaaattaatattagttacaattagaacttgacccaaatcaaacatttgagagaataacagatatgcttaatttggtctcatgctactgacagtgttcatgggtcggctgcgcatgcatcattttcttgcatagttttagtgaacaaattaaaacagacacactttggtcggaattttaccagtcaaagatgcacccatatggatactgctagatatccttggattaatttctgatctagtttcaaacacaaatcagtgtgctaagaaagcatcagaaaagaaaaataccatcagagaatcacttgggttaaagattctcctagccgtctaagccacatggaaatgcagtagtaacaataataaaatcacaaaatggaatctttctctccatctcaaccgtccacttgttgccggcgcacgtgtcaggcatccatgcatccatctgggtcacctgcattagtactgaactactaatcatgatcagttcttcacatggatttctgttggtcaaagcaagccacaaacatctcccccatgaaaaaaaatgagagatagaaaaaagaaaaaaaaacaaagagaagccaacatggcattgtgatcttctgctcaagatttggacagaggaatcatttttcttttgaacatgctgtgcccatgccttgtaaaaagagcaggagagaaaaaaaaaagatatgttttgtgtgttgttgcaatcgggacagggagaattcttagtattggagcactacctctgccgcactagttgtttcttgcacacttagagtactagtactccatccctctctgaaaaatgtattgacaatttcagtactagtggagccaacaacagtgacaattaatttgaaacttgcaaaaataactaacttttaaaaaaatggtgcatggtatatctaactgagattgacatcagtattttaccaaaattttcagacaatagaagtattgtctttacttgctggacttgtttttatgcttttggattgctcaccaagttttgcaactttcttcattaagaggtttacacagctatgtttttgaaccattttggccgtctttatgctatatttgtttcagatgcttcaaaaatttttgaagaccaatgacatataggatgacatttatttgtttaatttatctagctttttggtgaaaactttcatatatattcaaaccacatgcaagaaaaaacataaccttttctagatactaaaatatatgttcagaacaccaaaagttaaaatgaactaacttattttgttgtgagtaaatttgatgcaacaagttcttgcaacaaagaaagattttgagtggtgtttctaacaaacaaaattaattactgcagagtttctagaggcagaatctattgtatagtgtatattaggttcagtatgtggtctgaatcatagtataagttagtggtgttaactggtttggtctggctagtcattcttactgccaacaaatcttgtcagccagctagctagtactcagattgggatttatgatcctgactctgttaagaaagcttgagacaaatgcttctgtgaaatgactcccaatcatgatttgcctctatggctctgtctttttgagaccatgcatgcattcttgtcatggtatattcttccactactactggaggacacaaatcttgcttgtgaggtctgttcagcatgattatgtacattagagggcaatgtgactttgctccaacatctcacagtgatcactcatatatgtggtacctgataggttcttggctttgagcacacaaactatatatgctgtcatctctatctgtatgctaaggtctccatggtacaatgatattgcatgccccacttcttccatatatgctatggtcatagcctgtcatttatttgagtgtgtgatgtttagtgtgtcatcatcaatcccatccatagcatccattttgttcttgataagttcatcaatcttggtgtaagcatatatcccaatccaacgtgtcgttttctcgtgcatctaactaaattatgattagctgatacaaagattaatttgagatgatattaaataagatatatctctgaagaaatgcaaatcaggtatagtggagaaggcaccactgctggttccctctttcaagcccaccagattggaaatcaatgcttgggattaacttctgaagaaatcaccattttgctgcacctagtaaagtgacatttttctaggtccttaaagagaaattacctctcaatttacattacattagaaagatattgggaggtaccagaaattaatctaaaaagtgtggtaccacctcaagaccagagtaaaaatatagtaaaataatttactttgccgcttaatctcagcacatgaaaactgtaactagttgtggcatgtacatctgctattccattctacgaaataaaaagcctgttgggggcaggccttctaattctctaaaaaggattagttgaaattccctaattgtttccacaagaaaacatactttccttttgagagccagtaaaaacatagccacaaaaaatggttgtgaacaataagaagcaaaatgtttttaatgcacttgctatagttaaacgatcctcctataattcttcgaccccaaggatcgcgataatgtactgaagttctttgtaacgttataaagtttccttaactctttctgtagcttcataatgttcactccaagcgatttgaggttatagcatagttgtggttgaatctaaaggatctaggataatcaaatatccttggaagcaaatcctatggtaagcatggcagtagaatccaaatctgcaaatgttgtggcaggaatagggtcgatcaaatcgttcataggtacataaactgcttgatttgcttttgactctgaataacggtgaaatgatctttacattagtagtatagaacgcatgacgaaaaaaaagaacagataaagttcatagagcttgcacaagcactgaaagattctcatttttacagagatgtaatatgcatacaaatacctactatttttccttctcagatgcaaatactttctagctacgcttttatttgcactaccaggtttttaacgtaaactgtacgtgtatgcatgtgttaaatcttccatgaaccaggtcgaatttgatgtttgaacaaaatcttttgttggatttatgtcacgcctagaaccgttaatttatttgccctaggtttagagacttcgaacatgaatgcgatgcaaattgagctcattttttctgcacagagatctagtatagatctatgttctttgccattaagttatctcatatttgtttgtcaagctcacattgagttaatttgtatcttgcagagattttgtacatttccccattagggaaagagggaatgaacccaagcacatgagaatcctaccaagtgcattgaccaacttagaaaacactctactaaaatcaaagaccacaggttcattacgaataccagatgatttgggcttatccacaataaaaaaacacaaattaattagctactatacttaatgtgactatataatatgaatggctatgcttatcctgcatgtgatgcacctaggagtagttgttatttgctagaacaagatgaaaaatatatgcatttttgtttccatatccagacttgcaatctctcaaaacggcgcagtgtctttcacttaattgtcacacaccagagagtacatatcgatttgtgaatccaaacaaattaataaaatgtaagaaaagaagtacatgcaattgtttcaaagctcatggggtcatgaggctaccacatgacaaacctccatatataatctgactgagattctcaggcactcaggccttcatatggcctgaaaataaactaagtataattagtctagtgtcagcgccgaactaagctaattttgtgtcaggcttagtggttaaaataatccaagaaccgcagaacaatagtggttaactcataattaaggggaaaattgcctgtaaaataatgagggcatatttaatagctatcacatggtagttaaaccgttacaaccgaccaaaaaaacagttggtatgaggtcaagctccttggggaaagagacaattttccagcagtcaagctaagctaggctagtagtctcatctcacatccatcaaatgaactacttaattaaggacttaattatatgattaaaatggaagagaagagaaaacaagcagccgctcgtttgggattgatggatagatatataggcaacttacaagcatgatcagtacaccatggatatgaaaggcctggtcactagtatatttgggggaggctctacttacatgtttgagattggggtttgtgacctgcgtgaatgtgctccaaataaaatgattcttgggaatccgtgacgccatgtgatcgatatagatgttggtgttaagttgtgctcaaacggctaacgactcaaatttttatcctcattttgattaagggagtaccctttggtacttaattttatattagaatttagaaaaatagaaatgtaattgtattgtgtgagtgaagctgtaacatcaaatcagttgaatttatatgactaagaaaaaccctttgtctttggcaaacttgttcctatatttttttttattacatggaagatgccagcacacacactttgctcctctacgtgtacttcatactaacacatctataagagtgcattctctaacacatacttaaagagacataaaccaacaataatccctacataaaccaagattaatccctacattttgaaactttttcatttttaattttaaaaataaaccctttttaaatatgaaacttttggtcatgctagttagatcagcatgaccaaattaaacaacgttatcactccaaaccctcatggcgtggcagtgttgtttctttggcatggctaaatggtttatatttgaaaataagtttttaggaaggctcatttttaaaattaaaattaaaatgttaaaaataataaaaagtcaatgggtggagtcataccttaaatgcttcccctctcgtggatattgttgttcccggctatttgcattttcccaatcatctttagtagtaaaagatactaggaaattttaatgaactaaactaaatctcttgtgaaaatcttgaattcaaaggagccctaaaatatccatcaatcttgcccctttgttgcaacctcgtaacgtatgcccacatatcctaacctaaatggaaaaattgtgcacatacatgtccccctccataagcctttgtactcatggttccatatttttggaaacaaaagaaactcagcggtcactgatagaccaagcttcatgaatttcataccccaagcaaatgagtatattttacaaaacctaaggttttggggcatatgtaacacaaaagccttaggttttgcaatttgtttcatgaaatcccaaattttgttgtaaaatgtttcacaaaaccccaattacaagcttatatcattaatttgactaatatatttatctaaaataattgttaatatattttttactacaaataaatgttatttgcttttcagcaaccgttgatcattgtgattgatcatttatgtgcatatttaaccaattattatgccattatcagttacgattatgttaatttttgtgaagtgcaaaattcagaaaaagaaatgaattagatgagagatatgtgtattttgagtaaaagattgatatttaaacaattatggttaaatttgaagattttatacattaagaaaaatgtcgccaaaagagtgtccaacccaagggctgaaattttgaccagaaatattgaagcttgaagcgaggtcaatgaataatgtgtcgttcttcaaattttaaatattttttcatttaaactataaattttcaatttaaaaattaaaaattgaaaattttcaagttggaatgttaagttttgaaatttattatccatattattaaaactagaataatgaagggttaattagatctatgccattgcaaatatgttgatttacaaaaataccattactattcactatatcggctatgtgccgttggaatttgagaaaattggagctatgccactctatcacgatgtctgtcaaaatttccgttagccccaactgcatgtgagacctagccgtcagttccttcttcttcaccttcctttcctctcttctctttcctctacctctctccactctctccccgacgctcatcatcctccaccaccgggagagctcagggtttgccgccatcgtcgaccttctccttagcgggagggctcgggagccaccgctgtcgccgtcgtcaacctcctcggcgggaaggctcaggagccactgtcgtcactgctttcgtcttccactccatccgcggcgggagggctcgggagccaccgccgtcttcgaccccattcgcggtgggagggctcggccaccactgccgtccttgaccccatctgcggcagcggtgacttcgagtttgcggaagctgcatggaagccgacagtggcgccctgtctggcatagcggggccatcagtggggcggttggggcaacggcggcgcgcggttggcgtggtggcgaggtccgatggatgtaggtgttgccactactaatactagtggtggtggttggcatcggtgtcggggacggagaagctacggtggttgacggatataacaaggcgatgacagaaacgtgacgacaatgatattgtttcaattttataaaatttcagtgacacgtagtagataccacgaattgtagtgatatttttctgaatcggtatatttgttgtgatatgccccctaccccaaataataaatattgcatttggcgtgctgtatgaaatgagatcaattttacaaatatttcctcagccaaatatgattttgcagtgtacgttgaacatatatttttggggggaaaatagacgagttctaatctaatgactaccattttgtcaactgcagaaaacagagagatatagactaattagaaactaggtgaatctaactacgtacaggatatatatcagaaattgatgatattagccgaacaacatacccttgaaattagtcaagaataataataattgcctcctagaatctgaactaccgaaaaaacattccaatgatcagacactagagcactactagctcctttgctaccaactaaaaatctcataaaggtgaatgtttgtagtatataaatctttaagttaggatccgatgggacttgaatagatcatatgtatacgagctagctataatatatgcatggcgtatgacccaattgtgacctatttcaaaccaagttgttggatgcatgatagccattggatatcttggttatgatcactacaaagttctctgccatgttctcatatgcatgatatgcaattagctgtgttgactcaattatttgtacatgctaattattggccgtatatacgttagaagatcacatggcggcgtcaaatgctcaatgcaagagctatcatatatatatgtttgagtgtttagccaactgagtagttgaattggttcttttgtttttggagaaaaaataaattgagggaaaggactagttgattctggaagagatagaagcttagctatactcttgtccatgcatgactcagatgataagcatatggctgcaagtgatggcttcatgcatagatgtacacatggatttggaattaaatactgacactttcccattaccaatgctttccaggcaaaaaaaaactaatcttctagtgaaacttgttaattaagactcgcccactgaaataagggaacccgccatatagggcaattcccaagtgatacttattcatgaacaggaaagcaccattaatagtaactctaccatcagaattcaaattctagtttgcataaacattgttgtggtgtgtatttctagttggtgtagaggctggaagtaataatttcatgatgtaaaaaattgacttcgatatcaatggtttgcccaatacctaattaaatcatgaaattaggtatttaacaccctattttctaatttatacccataaataatgatggttattacaatgtggcataataacatctatattgtttagcatgcttgatgacaagttggttatattagggagatggtatggataaggtctctcatttttcccaaggtcaaagcatggagagactgccttaagcatcacagaaagccatctcactatcagcaggttccttctatgtgattagtcatctccttgcattttgagtagctttatggagaagcatatgtatgccagtctgtggtgatgtggacatacatgcttcatgttgttcttgctgatccacaactccgttctatgtccatgtaatcgcggataaactaatctgtttcacaccaggcataatacaatatcgttctctctttgatttctctctcgaaacacatcacatacacagacactcaaagtatcacttgcacacaaacttacgatgcacactctatacacaccaactaacaattttcacaaaaaaattctaaaaaagatgtatatacactttaaatagtattacatatatatgtaaaatcttagtttcaaattcattatatttcagatataaaaaaagaaaaagtttgacaattttaagagtatatataggggtgaaaatgggacaggtatttcccgattgcccgcttgacctaaggctcgcaggaggaatatgggagaaaaaaaaagatacctgttattattcgagttcgaatccgaattcgttggaaaaatatgggttaggatacgagaagacatgtatccgttcgtatgtcccctattataaaatatgtataaaaatttattatgaatccacctaaaacatgataaaagattggttaatcactattttacgtgctcataggtaatattgcactcttttttcttgatgtatctttttaaatactttaattaccttatatatatatatatatatatatgtgtgtgtgtgtgtgtgtgtgtgtgtgtgtgtgtgtgtgtgttatccggcactacctatacccgactccgaatttaaaagaaaatatgggttaggatatgaaaatgtcataatccgtacccgtccgttttcacccctaagtatatagttgtcagaattttgtgtttttacagctcaaatataatgaatttgattatgagactttgcatatgggcgtagtactattgttagtaagtgtaatatttttatataatttttaataaaacttagttggtgtgcatggaatgtacaccgtaagcttttgtgcataggatgcattccctatatacaatgctagttttatggccatcataggagttgttcattacaactacaatatcattagcaaaagctattatgaattcttgaaaatatgtacacattttttcatcataaacgatccaatgcatcagagagatatttgaaacacaacaacgactttcttcccaatatggtgatggggacatccttgtacacatatagttagcattactctattttgtgaatgaccctactctaattatgtgtagagtatatatattcaataatcaaactttttctcccctatgccccacggaatattgagcaaggcttaaacaaatccctctacataaagtttctgggattagcttctcataaacaaacatagaatgcatatcacgaagtccctaaagaaatgatcatttgtagtgattgcatgcaaagcaccctccttttcgagcttggctatgaaaaggctccaaattagtgcgttgttaatgcaaaagggctctttcatcggtgattacacttttgagctaatcccatagccatgctagggcaagcacgtagcaagtgccatctatgccatgaaggaacatagaagctcatccatctctacttggacggtgacgagcatatatagtttgaaaaaaaaaaacagttgctatatatgcatatattaagagcagtatctttcatccttacatcacacatattctctttgcaaatcctatatgattattgtgaaatatatagatagttgagccaaactccatgacacgtggcttaggtttttctatgcattttaaaaactaaatgcatatttaatcctatgaacttcactttgcacttagctgtgcatagttcaccttaaattaatttgtgcaataatattttgcacttatgaataatcaaattagggaaaatgttacaaaattaatgatggtcaatatttctaatttacaatttaggcgctgttgttataaattaaggaatacaatagaagatattttttttcagaaaacttatttttgaagggtggagcaaataattcatttcaattatctaatgaacaagctaaagggaacagtgtatttcttatttattttgatgctatggaatttcatggtctccaaggtgaactttaattttttcatacattttataacattatattaatatatactaaaatattgcataatggtgcttaattaaaaattagtaacctagctacttctaatatagtttcatgtagccaatttagataattttaggctgagtttgattctgttgctaggaggagctacttactcatttatcgtgacacatttttttgcgaaaactttctatactcaattaatcgtacgctaatcactcatcttgttttgcgtgccgcaatcaacgtagcctatcctctgattcaaatggaaccttaatcatattaattgaaggctttaaattatgaaagtttggagtagggatattaggagatcagataaaaatgacaaatatggaggttcatggttcatctgatcgatatatagaaattaacaatatatagattggttgctaaggtactgtccaatcaaatatagtttctcgtgtgcatttccagtccaacaacaaaatgagacacattgttgatgctgatctactgtgaatttaatttcttcaataatttacaaaggattccggctggtttgtaccccaagtataacccaccttggaaccatacatggacctagttacctatcttggaatcaacacaaaatgatttttgtaatgatgttcccaagtatagaaactttcatgcatggagtgtaagaaatttctatccgtataggtcggcgattctggacaatcatgcgagtggccgcttcccaagataattaattaagagcgatagccttttagcgcgtgccctatactcgttaacgccactaaaaccctagctaagctaggggtttgatattagtttataattaaccctccagcacaaagctttaagggctagctcaaaaggctaggtgatcaagagagaacacaacttccgagggcggtaaccgaccacggtgatgagctagctacgttgtacattgtgcaccatggcagtacacaagctttcttcttgtttaagcagtggatttcctagggcatggcagaggcagatggaggaacaccagctatagcctattgtgagagctcacttttccatggctgggattaatttcttggagatcacaagctcattatttgtaagagtgcccaaactaattaatgttaatttttgcatcaacttggccaattgcgtcatgggtgaggtgtcttggaagggttataaaaatgtccatgccattggcaagctaagctcctacgtgttccttattctagggtttgccaaattaaagggtagccttgtgcatggggtcggtggctccctaaaagagataaaacaaattaactgtgaatgatatccttttggggttatcaaaaggagtgtggatttagggaaacaaggcctcttgcacatgctaccctcttatgcatgcacaatggcattcaattgttgcaaatgcattggctaatttgttgtatccatgcaaatggattcatatgcatggcccatgcatgcatatacacttgatgtaattaatctatttatatgtacatctacccccttctcctttccctaaaagtacaagctacatatgattaacaaatgcaattaatcaaccaaatagaggctaagagatgttaacctcgattcagtcaatcgatcacttgtgtatttaggccgaaaggcgtacgttgcatttggttatatataagctcatgatcatgtatggggacctatctatctctctctctttctcaatggaaattaagcatatatggtcatgcaagttcatgcatgaatgtaccacacataattaacctagagtgacaggtgtcgaaagatcttcggcacaccaacctaatgattgcactgatgattttgtattcatatatttgagaaaattgcgcctcaagtcttcaatttaatctttgacaaataaccatatatttaattgtcatgtgagaagccaaaaatcatgctatatatataaacaaaatggccctttcattaagctgagatgtcaacaacaagggcaagtgttgtatatgtcgatgtatatatagtatatgcatgcatataaacttgtgcaatcaattaattttttttaagttgaagataaatatattctcagggttcaagtatcaacacatcgatcaagcaagtttttgcgttgttcttggacgcgtttttagttttttttttgttgagaagtttattaattgtacacatatatatagttttgccccctaattaagctagatgtcatgcactacttactatctactctacgcggaagaatctctgaaagaaagctgtgtttatttcctctttgatatgtgtaggataatcaagaagaatattaggtgcaaaagaggcctgtgaactgcactgttgtcatccaggatgaaaacaaaacagaaaagatccaatacataatgttatatatgttaggtatataaggtatgggtgcactagcactactcctgaaacaaacaaattgagcactagataattaattaaactaattggaaacttagtttttaactaatatttgaagaaagtcaagctagcccagttgcttaattagaatttgcagataatgagatgacatggcaggggtatgggaggagatgcaagtgactgagttggtatcacctttttagggctagctagctagatgtggccaattcagcaggaagctgcttggagctcttcaaaatttggacgcttgaaagctcctttttgtgtaaaaaaatatgtctgcgtcataccttttctttgtcttgcttatttaattttcttcttgataaatataggtcggcagatgtaatatttttgcaccaacgaaggagacacatcggatatgaagctgctcagcagctgctggttatatttagacgagtataactgttggactaatatgcatggatttacaggtaaaagagaagatcgtgcggtatccaaatcagaattaacaatggaaattattttccagtaaatttcacaacactacagctactttgatcaatctatcacaaaactacggatttaatgtcagttttatcacctttgtaacatcaatattgtatggacataaactctaaaatgtgtaattctctgataatttcatcattaaatctgtgatacgatatatatattaaatatgtagttctgtgatgataaattttgtactaaatctgtagttttgtgatacacatatttaaatctgtagttttgcaatagtttgattaaagtatatgtagttttatgaaatttaatttactctattttttactaactggttttgatatatctaggaaattctagtgaaatttattggccggaaatgcactctaccatcaagctaagaggcatccatgcatgcatgaagtgaaacatgtaatgttcttacttgttattttggataccgacattatctcaagaagacgcgaatattagggaaagtcctaatatcaaataattaaaaggagtgaggctttaaacccaggtcgtctagcccatcaccttgtagagctagccggaatactctgggcgtttctccaccgacattatctccagtgcagatttaaagctattagaatataactacacgatgttatttttcatgaaaatcgtctactagtatgtttttacatactaaatcttaatattttttttgcatatttttattttagttatgcataagatttcgagatttggctgcatacgtcatagatgacgtctgtttgtaaacacagagatcaacgtaactcttttgtattatcttacccccatccaattctaaatggtgcatgcatgcctagatacgcatgcgaatataacttttcgatctcgatcatttggaaacgtacaaggctatagcgcgttgtaaacgatgccatatatatttgaataccaaccaactttcactccatatatctacagttagaccctcagatgcccatgacaaacacaagagttgtacagcaaagcttttgagctgtgcatgcctttctcctagtttattggagatcctcagaacgagatcatgatttgcacaaaagaagttcacaaagttgggagaggaggaggagaatttttgggtagttggtaagctcaaaggtggcatggtgaggtggagacctcagcttgcatattgaggatcaagatgactagcaacaacacacactagttggatagggaatcacaaaaaaaggcatcatcagctagcttgatcacagtttaatctgtgtctgcatcgatcactagatgtacagtgcaaatgctggcaatgcactgtaaaggaaaagggacccatctgcaggttgctgcatgcatgcatgcaatgctgactagctatcattttacacttggaatttggtgattggtctccttggaacttgcactggatggtggtggctgaacctttaacagcatggcaccagttggtaccccttttgtttccctgatcgattgttttcatgttacacacggtttcatcagagtagtgtatatcacaagggtgatctctagctgcatgatgctccagcttggcagtgacatatatttgacacaacttttttgaccatggaaagtgtttgtgtgcaaattaattatcaacaatcaatctgtggttgttgtgctgtgctgtgttgttatgtatattctaactaaattatatgcaaaatagtttccaatttttgaaaatgatatggataaaaagtgtatttttatattatgtctaggaaaactaattgctatttgatatccactgttgtgccaacttaggcttgagttctgaacagtttctcagttaggccagctagctacttcatcgtttatcatgagcacattatatttcttaaactgctaaaccatgcgtattgtgcataaaatttttatatagaagtttcttaaaaaaatcaaataattacattattcaaattcataattgtttgtatctaattaatcatatgataatgaccttcgttgttttgagtgctgctggaaatctccagcaaacctcgcgaacaaacgcatcgttagccgtccatgcaaatgcatatacaaaatatttagttaaaaatattaaatcatttaggagcctgatcatactttgagataatgagaaaactttgcctgatgcatgcttattttgtcttagtttgtataacttcttagattgtaaacctcttcccggttgggaaaaagaagagtaaaactaacataaaattcagtatattaatagaaacaaagtttgaaccctcccattcaccagccaatattattactgtgaacctttctcatataaacaaaattgtctatatatttatccattacttaattttcaagttcttcttatggtttgcatttcagcagcgctgctggacggtcgatctcctccagaagcatggcattgatagtcactcggcctgccccttttgcgctcaggagcttgagatgacgaattacatcctcctcgactacgtgttcgctcggcaggtctggctccgtatgctgtcacctcctagctgggctgcctctctcctccccatggcagctggcttcaggaatggtggccatcttctagggcctgtttacctgagtatctccgtgctggcttcgactccttggtcctcctgatctcttggcaactgtagaaggaacgaaactccagggttttcgactctgcactctcttcggtctcagtggttctagagtccatcctttggaatggccatctatggtctttagctagcgttgctactttggggatttcatgggagtgtagtttggcttcgccccctttccgctgattggagttacgtttagccatcgtagtagtttcttcccttttccttggttttgttttttctcccttcccttggcataagccggtctttccgattgcgttgtgtaaaaaaaactcttttattctaatatattgacgtgcaatacttttacgcgtccgcgaaaaaaatccgttacttaatttcatttctcattcttaatttgcattttaccactcattttcatttgtgataagaactaagcaaacttatgtgtaagactttcattttcaaaagttttttttaaataaagtaatcttaaagacttaaatagatatttaattttataaaaattataccgtttagtagcttaaaaaatatatggtaatccacatatattctgtaagagtaaaaatagtagtgcacagaggtgtatgcacctccaaatgtccatataacctgttgccaactccctgaaactcactttcatatcatgattagagcaggtacaatagcaggctattaatcagctataaacatattttaatgagataaatgatgagagagaaaagcagcgggctacagatctgtagccagctgcagcacggacttcaagacgcaatgtgtgtatgtcaggtgagaccatatattaatattatagtaagtaactattgtatgaattggctattagattggttataaatgaattggagccaatagtgggctatactattaaacttgctcttatgaaactactcattcttaagtagtaattacttgcattgagaagacattttcagctccattaatttatcattttagcacaatttctcagcagggaatatcatcgataaatagagtacaacggtaacaacaaccatgcatttattgctcggaatatacgcaggtgacattgtgacagggggtgaataacaaattaaccaacgccatgagcattcatgcttagttagttacccttattgaccaaacctccaattaacaaggtagtttaacacacatcatgctcgcttaactgcagcaaagagttggaatctcaatatatacaaaaatgtgtagcttcaaacccatgagggctggggaatctaaccccctaaccccaaacagtgggctgctggtgtacgtgcctagggcatcaccgcatgtgtttatgcctcatcactaattagaatcttaatttctctctcatcaagccaacgagaaaaaaaaattacttaattaattaaggccacaaaatcagttcgaaaattctctcgtgatttcgccgagcccagaaccagaaccaaaaccagagctcgagctagattagttaactaacatgcctgattcaaaaaagggagttagattctatatatcttctaatatcattgattaccctttttttttcctacgctaagtatgcttatgatgattctctctcttccatcatcacacacactctctcaatcgctttctctctcttcttccttgctctctcatacaacctctatttaagcaccccttgctcacctcctatccaccaacacaaatcacttgcaaaaccaacacaaacacaacacaagcaacacaca

SEQ ID NO: 16491 - DNA, 753 bp, Oryza sativa
  unsure (1)..(753): unsure at all n locations
acgttggcgcagccgtttcaagcagtgcgccgccgtagtttaagctgtcgcggtcgctgggaaagaccgccgtcgtgcttggcaaagtggccgccgtcctggtccgccctatcgttgcgtcgaagaccaccgaagcatcgtcgcggtcgtcaacccgaaggtagccgccgcttccttcttgtcgcagtagtcgtccgttccttttccaccgccgttttggtcaccggtgtgttcgccgcgttgtcctatacgtgctggtgccctcagttggtcccgtggaaccgccgttcgccggcgagtgtccaccgcccgagccgttttattcgccgagccgccgcagtagtcggtgatgtcatcgttgacgtcatcgggatcttctcccgtgagccggtcatggaccgatcgattttgacggtcagatttggatcggatcaatttcgcccgtccgttcgcgtgaaccgccgcccatgcgcccggtccaccaaaccatagcccgctgacgcaataaatccccttttccttttcaaaaataattcattattgcgtcataattcaatttaaaccgatttaagtgttttaatccgattcctctcccaaacttcataagtaacacatctaagctccgatttagttggttcaattctctaataaattctaaaattgagattgaccattaaaaatatccacatgtgctgctctgggnatactctaaantnngcnnggtgcgagtacgaggtacttattccagcgcgc

SEQ ID NO: 16492 - DNA, 700 bp, Oryza sativa
  unsure (1)..(700): unsure at all n locations
gggcctttaatatagacgnactccaancgcncactttgagtacccacagcactcaaattcgaatttcttaggcttggcaagaactatcattgtcatcgagaactacacaaaatcgctcacccatgggcatttttgaagaaagaggagagattttctgtacccccatgcgagaggcgaaccaaactctcaaagaaaagctggtttctcgccagtgttaatcttgccggatactccacggacttatggtgattggacacttccgccaagatggggtgcgtgctatgccggaggtaatgtgtggctatgcctccgcagctaaagctatgaaggcaactaccctaccatgattggagtagccgggtggatatgctctaaaaattgcggattatctcattgggaatgctggaaatatatactgacataacagtgaaataatcttcactcactcggacctgaatcttcgcaaaagaaatggtttgaactcatcaaggattacgacgtgggaattcctatcattctggtaggcccacagggtcgctgacgctctaagatcaaaaagccattgcaacacttctaacgttccgtggttttcaccccaacttaaccaacagatggaagccctgaatctgaaccgtagggggcgtcgacttttggctgcgttggaagcccaggccacacttgctcgaccaaatccgcaagg

SEQ ID NO: 16493 - DNA, 9321 bp, Oryza sativa
  unsure (1)..(9321): unsure at all n locations
ccccaaaagcggagtgcggcacttccgaccataaagtgcttcgtaaggagccatctgtaaactagcttgataactgttgttgtatgaaaattctgcataaggtagattcttatcccaacttccaccgaaatttagagcacaagctctcaacatgtcttccaaaatttgattcaccccttcggtntgtccgtctgtctgcggatgataagcagtactaaagttcagcttagaacccatctcttcctaaagtttcttccaaaaatttgaagtaaactgactgcctcgatcagacactatcttcttagggacgccatgcaaacacacaatccttgccatatacaattccgctaagcgacttccggaataagttgtctttaccggaatgaaatgagccactttggtaagtctgtcaactattacccaaatagagtcatggcctgatgacgttctgggtaaaccagtaataaaatccataccaatttcttcccatttccattcaggaatcttcaaaggttgcaacaaaccggcgggtttctgatgttctgccttgactcgctgacaaacatcacatactgctacgtattctgcgatttcacgcttcatacttgcccaccaaaatctttccttgagatcctggtacatcttagtactaccagggtgaatggagtataaagtatcgtgagcttctttcagaattgcatcctttaaatctttgttgtcggggacacagattctctcacccaaccataccgttccgtgctcatcctccaagaaaccaatagcttttcctcttctcatattcttcttgatctcttgaatatcaggatcattattttgggcttctctaacttgatcaattagagtgggcttcgcttctaaagctgcaacgaaacctctaccgacaattcccaaatttaatctttcaaattccttgcataattccaatggcaactgtcgtccttctgtagcattgcaatagccttttctgctaagagcgtctgctacaacattagcctttcccggatgataatgaattcccatgtcataatccttaattaattccaaccatctccgttgtctcatgttcagatccggctgagtaaagatatactttaaactcttgtgatcggtgtacacttctgtacgagtaccgaaaagataatgacgccaaatcttcaatgcatgaacgactgcagctaactcaatatcatgagtagggtagttcttctcatgcggacgtaactgtcgagaggcataggcaaccaccttcccatcttgcatcaaaacacaacctaacccaagtttggatgcatcgcaatacacttgaaaacccttctttggatcaggcaaaatcaaaataggagctgatattaagcgacttttcaattcttgaaaactctgttcacattcttccgaccacttgtacttcacatctttctgaagcagtcgtgtcatgggcttagcaatcttggaaaaattctctataaacctccgataatatcctgcgaggcctaggaaactgcgaatctctgaaactgtctttggttgcttccaattggttacggattccacgttactaggatcgacggcaactcctccggctgagatgacgtgaccaaggaatttcacttcggacaaccaaaattcacacttgctaaacttagcatacagttgatgttctcgtagcttctccaatgcaaggcgaagatgttcctcatgctcttctttggttcgagagtagataagaatatcatcaataaagaccaccacgaacttgtctaagtattccataaacaccttattcatcaagttcatgaagaaagcaggggcattggtaagtccaaaagacataacagtacattcgaacaacccatacctagtggtaaaagctgtcttaggtatatcttcctctttgattctcaactgatgataccctgatcgaagatctatcttggagaaaacagtggcacctttaagctgatcaaacaaatcatcaatcctgggtagtggatacttattcttgatagtcacatcgtttagtgcacgatagtccacacacattctctgagtatggtctttcttttccacaaaaataaccggagctccccatggtgatgaactcggtctgatgtatcctttctgtagcaaatcatctacttgcctcttaacttctgccaactcattagctgccattcgataaggtctcttatggatcggagttgttccaggtaccaaatctattctgaactctatatcccttttaggcggcataccaggtaaatcatctgggaacacatcagaatactcccggactataggaatctcttccaaagttatctggttcagtcttgaccttaaagactcagatgacaatgcatgaacagttacaactcgaccatcatagctgttgagagttacttttctgttggcacagtctatcacacctttatgtctggctaaccagtccatccctaggatgacatcaaggtctttggattctaacaagataagattggccagaaatggtactcctttaatttctattctgaccgaggggctacgttgcaaagagagtgcttgattacttggggtactaaccatcaaaggacgtctaagatcttctacttccatcccatgatttcccgcaaaactcatagataagaatgaatgtgtagcaccagaatcgaaaagtactgttgcaggaactgagttaacaaggaacgtacccaaaattacatctggagcatcttgagcttctgcagcagcgacatgatttacacgagccttggatactggtacagcagagttactctgggcagggacaaccttcacgcgacggggcttcggacacttgtcagcataatgtcctgggtctccacagttgaaacacaccacgggcttgctgccttgctccctcttggcaggttgttgctgtactggagctgcaacaggacgtggagctttattacggatgttgttggcagcattgttgatgaaaaactgacgttgcggacgaacaacagacgaagaacctacctgtggcatagactggggtcctaaagtaagacgcggcttctgaatatttccctggtgtgtcttgaattgaccaatccgacgtttcttctgctccatgcgattatacttgtcctcctgacgaatagccttatccactaatttctggaaatcaggataatctccaaccatgagtgggtaagaaagctcatcattaagtcctcccaaaaacttctcctggcgctcttcatcattgcgcacatcttccggagcataacgagcaagacgattgaactcgtgcagatactccgtaacagagcgagatccctgagtaagcgacctgaactccttcttcttgagagacactactcccgatggtatatgcgtctttcggaaagcagcggtgaattcaagccaagtgataggttcagcagtagtcctgttaaggcggaagtgatcccaccattcagaggcagggccatgcaactgatgtgatgcaaaagataccttctcctgatcagtgcactgaagtaaatccaacttcttctctatggcatgcagccaatcactagcttcaacaggattagtggtactagagaaaacaggcggcctcacacgaagaaattctgctaacttgttctggggaggtgcatgattattcccttggttttgctgattctgaaattgctgcatcatcatgttcataagctgtgtttgttgagcaagaacttgagcaagagtgggattctctccattgttgttattggggttgttgggaccattcccattgctacgagtgttcaccatctggcatggacagggcacaagaagagaaaacggggaaaactacttaggacagagaattactttaacttttattgatcttaactgagtttcattattacaaactgaagactctcacaccactaaactcaccaacttcctaacactcaaaagcaaacaaacgcatgcacttacatcccaccactgatgtaaatcacatgcgagccacacacaagcaaactttaagcaagcaaactaacacaacgatctatgacaacgacttaacaagtcactctagttcttccaagcatcggaggtcgattgaaggctcgtcttcatcatcttgggttgctacccactcaatcttggaattgttgcgcttagattcttcttcttcatcactacttaagatgatgaccggaggatccgcttgagctggggcaacttctttctccaccacacgaacctttggcgccagttgatagcgagggacaaatagagctctcttccttgcggtaagacgaatcctggccttctgcggcggtgcttctcccttcaatgcggctaattccttctccaaacgatccaccttgtcttctaacttgcaaatcttaccatgattccggtcttcacgatcttgagctgctaacacagtctccgcacgactttcatccatagcccacaacatctcaaccaaatgtcttgtggtaacataattctcaattccttcagtctcaagataactgccacggtcacttccctggggttggcgaggatggtaacgatactcagtgtcggccaattgatcactgtagcgatcacggagctctcctatggcgatccttgccacctcctgacatgcatggatgtagtttcttcctccagcttcgaacatcactgagggaatatcttcactattgctgttcaaggtgactttgactcggcacttctcttcatgacgatcatgaggaatctgggtataaaaaggggcagtcccaaatccaatgacaaaggacatcgtacgcaactcctggacaaaaccctcaacaccaaacaggtactcaggcttgtaacgcggcatctaaagacaagtgaaaggagggagttaagacctttatccaattaatagcacaagtttttggattaatttgaataaagttagaaaatcaaagtaaaaagggaagtaaataaagtaaaccaagctttgcaaaataaattaaaacatttggaaacgaggtcacaaattttgtaattttgaataactggtttcaaaagagatgaaaggaaattataaaatcaacatactaaatttattttattgcagcaagattaaataaaacagtattgtaaaacttttgctgataaatgagccattagtacagtaatagatgtacagtactaataacactggaataaatttttaatgaaaaccattaaaaaaaaaattatgaagtgcatgtgccattagtttggttaattaaaagagaaagggaggagaacagttctacttttccaatatttttcagagggcttctttgggtaaccatttggtataacctagggtcaaaggggctctgataccaacttgtcacgcccggaatttctatccaaaattccaaacgctaacatgtgtgtgaaccctcgtccaggaatcagccgaggcacacaataacaaattgataatagagtacaaataatactctaattaataagcgaataaaatgtcattacagaggtagatagttcttctcaatcaataaagttctaagcagcggaaattaaataaacggcgcagacggctccactccacaggtagcttgaccaaggctacacctaatcctccacaccatcagcctcattgtagaactcttcttctgatgaatgattgcaaggtgagtatatgacatactcagcaagccacgcagcaaatatgcaagtgcacaggataacaaaggatggcataatatggttgtatttgcaaaagcagcatttagcaaacatttgagaatttgataaaacagttaagtaattaaacaatattaatccaacgctatacaacataccctgttgtataggcccaaccattctgaacaaccaccccggctgcacagttctatctccaaaccaggaatgtaccattccaaaccaggagctaatcaaattattaccagtttaagcatcttttacaatgatgagaggtgtgagactaatcacgaaagacattgttagacccgcccataaccgcgggcacggctattcgaatagttttactctggccagaggtgtaccactgtacccacaagacacaaccccacatcatgtcaccatgtgcctcaataccaccacggtatctcggaaaggagttgtgacaatacccctcgcataacacaatccactgcagcgcaccttcctggatcataatcacccccttataaacaaggcatggactccccagcgacccccgtgggcttatctccgccacttctcagtctggtgccccgcaatgaaccatgctatacaaaagataaagccgttgcccatgctggcttgtggttggcacgataaatgtttcacaaccgaaactcgtgaaccggtccttaattgtcatgagcacgaccatcaaaaccatgtgcccacaacccaccattatcaggttttagttggcacattaattaattaactaatcacgattgaccatcgtgaactatcaataagccatcatgaaataatagtgagtcattagttatcccataagtgtactaatgtttctaagcagggctaagcaattgtatctaatatctagttgaaccaatataaataaagctcaactagtcaaattgtaataacccaaggtatcaaggaataaggtaatcaatgtacaaaagggccataacaaagaataggtcaattccacccaatgacattcgaaaatagatgcaatagttgaatagaaacaatagctttaaataggatcaacatgctcaaagggttgtttgggatctgtgtgacttgccttgctggccttggaactcttcaaactcttcttccgcgaaaacggactctccggaaacgacggaatctaagcaaaaagaagcaaaatcaccaaaacagcacataaacaagcatgaacagtacatgtggatatttttaatgtgtagatctcaattttagaaaaaattagagaattgaaccaactaaatcggagctaagatgaattagttatgaatttttaaagattaaatcggattaaaacacttaaatcggtttaaattgaattatgacgcaataatgaattatttttgaaaaggaaaaggggatttattgcgtcagcgggctagggtttggtggaccgggcgcatgggcggcggttcacgcgaacggacggccgagattgatccgatccaaatcggacggccaagatcgatcggtccatgaccggctcacgggagaggatcccgatgacgtcaacgatgacatcaccgacgacggcggcggctcggcgaagaaaacggctcgggcggcggacactcgccggcgaacggcggcaccacggcaccaacggagggcaccagcacgtagaggacaacgcggcgaacacaccggtgaccaaaacggcggcggaaaaggaacggacgacgacggcgacgagaaggaagcggcggctaccttcgggttgacgacggcgacgatgctccggcggtctccgacggcagcgaaggggcggacgaggacggcggcgacttggcaagcacgacggcggtcttcccgagcgacggcgacggctgaaacgacggcggcgcacggctggagcggcggcggcgacggcaaagctagggcacacggcgctagagctcttccggcgacgagaggcgaaggcgagggctgcgacgggtagaggagacaccgggggtccttttaaaggggctcggaggcggcggcgaaggcccacggcgacggcaacggcgaaggaaaccttcggcttggagagagggaaaaccgatccgaaacgaactcgtctccgacgctttccaaagcgatttaaccaaagattccaaaggagaaaaggtagaggagatcccggagattgtttcccctctaacaaatcggccggagaaggaaaggaacggccggatttggaaagcggcggcgacggcagctcggcggcgcgaaactagggtttcggcccgaggaagacgacgactgacgggtgggccccacctgtcagcgacagcgcgctcgcgcgggcggctgcggactgggccggactgggctgaggagagagaagggattttgggccgactttcggcccaaagccaaaagagactttttaaaacctttttcaatttaaattatttcttaaatgcaattccatttattaaaaatactttcttagctcaaataaatcccagaaaaatctaggaattatagaattaagcaaagtatttaatgaaattttatctggcccaattttatattggaatttattaattaaaattagattttcttttcaagacttttaaaattatttctaaaaattccatttaaacaacaatttatatattttgaattttcagggtgtgacaaacctaccccccttaaacagaatctcgtcctcgagattcggaagaactggcgaacaggtgcggatgagctgacttcaattcatcttctcgttcccaagttgattcttcttccgagtgattactccacgggactttgcaaaaacggataactcgattcctggttcttctctcacttgtttccaggatacggattggtttctcaacataagtcaaatcctcttggacttctatctgctcaatattagcttcttcggtaggtacccttaaacactttttcaattgcgacacatggaacacattatgtactcctgccaaagattgaggtaactccaactgataagcaacctctcctgttctactgacaatcttataaggtcccacaaaacgcggtgccaattttgctttggtatgaaaacgatgaactcctcgaagaggcgtgacacgaagatacacataatctcccttttcaaaactcaaatctctgcggcgattgttggcataactcttatgacgagactgagccacacgcaatctttcttgaatgagctttacctttacttctgcttcccttacgatatgcggttcgaaaacctgacgtcttccgtatgatcccacaaaaggcgagtgctgcacttccgaccatacagtgctttcgtaggagcccatctgtaaactaacttgataactgctgttgaatgaaaattctgcatagggcagattcttatcccaacttccaccgaaaactagagcacatgctctcaacatgacttccaaaatttgattcaccctttcggcttgaccgactgtctgcggatgataaacatgactaatgttgatctaagaacccacctctttatagcgttctgacaaaaatttgaagaaaagtgagtgtctcgaacaaactactatctttttggggacgccatgcaaacacacaattttg

SEQ ID NO: 16494 - DNA, 1309 bp, Oryza sativa
  unsure (1)..(1309): unsure at all n locations
ccgagtgattgccagtgagtaatcacacttactataggcgcgcaattcgagactcggtgacccgcacagaccngctcttttggccttccggctttcgctcggtgcagtgcacctacaagcgaggtggtatgtgcttcactcctcggcgtatgtgagggccaccacccggcagtacaatcacagaccccggccatgcaaggtttttacgggggtccgccttctgcaaaccaacagtttccgatgtcacgaccaacattttagcagccagtgcagaccatgccgcccccttctatggcgggttttggcaatcaagcggcatatgcgactggggggcctcctacagggggcaccctccagagcttagtggaggacttccagtcgctctcggttagttctgcaccaggatcgcttgatcctggtgtcgacgtcaaaaggctgccaaggccattggatggtgacgaggaaccaactaagggtttggaggcatatccattgaactgccacccgaggtacttccggctgacaacccatgcaattccagcatcccagtcgttggtctcaaagtggcatctgcctcttggggctgtggtacatcctttcgcagaatcacctgatggggtaatgacttttaggcactctatttatcttttaccctcttgtcaaagaattgttctgacattcatgtttctcattacttaagaaggttcccggtattaactttgggtcagctggtgtcaatccgttgcccaagatgtagaacatatataaacccttacgcaacattcgcggatgcttgaaagaaatgccgctgcaaactttgaacgctgttaaatgatggaaatatttttgggccttaagctcaataattcatgtggacctgaaatttgaatttccgaagaaaaaacaatcgcacaacagatatttggttattttgctgaccatttttttagcttatgcaactatgttatccacattaaagaagaaattggagtttgtcaactaactttgggttggtggcgtgtcaaaaccaaaggttttcaatggtcaaaaaactttaataattctgaaagaaaatatttgcccttaataaaatattggaggggaaagcgggaagaaaaatattaagggtgggctttttaaaaggaaaaatggggtggaatcttttgttaccggcatcttaatgttgggatttttatggggcggacggcttttaaaaaggggaggacccttttttagagggggnggggaacacaattcaaataggtggaaacaaatcttttaaaaagggaatattagagatttcttgtaa

SEQ ID NO: 16495 - DNA, 747 bp, Oryza sativa
  unsure (1)..(747): unsure at all n locations
cggcgctcttaaaaatgacagtaagtatgnctgccntgcaacnnnagaggaccccagatggcagcaaatgaactggctgaatttaagaaacagttgtattagttgaaagaattttggaatataccttccaaaacttccttgtggggttcttgggtgatttttggggggaggaaagacattacaatgaggatgtgccttgactacagagctctcaatgaagacaccataaaaaacaagtaccctcttacccggatcgatgatctgttctatcagcttaaacgtgccactgtattctccaagattgatcttcgttccggatattaccaattacgtattcctgaataagatattgctaagaccgcattcaccacgccataccgactgtataaattcactgtgatgtgattccttttaaccaatgctcctgccttcttcatgaacttaatgaacaaagcgttcatggaatacttgtataagatgttgtggttatcattgatgacattctgctgtactcacaatcagaggaagaccatgagcaccatcttcgtttgatgttgtgaaagtatctgaaacatcaattgtatgctaaacttagctagtgtgaatactagttgtgcgaagtcaaattcttaatgcacgtgatatttgctaaaggagttgctgttgaccccaaaacagtgacccgcgtcaatgattggaaacaacccaatataatcacttaaattcgcagatttttaggcttggcag

SEQ ID NO: 16496 - DNA, 747 bp, Oryza sativa
  unsure (1)..(747): unsure at all n locations
atcgcctctaatcgctacccgtgacgtacnccttncaaanncgaggancgccaaatggggaggcaccacattaacattgaatttatcctcccgtgtttatttttatcataatctggaacggtacactctgaatatgcggttgccatttccattctatagcgggggtgccacactttgggcaacattccaattccgcatattctttacggaataatatacagcgattcttacaagcctgaatcttttctacaccaagacataaaggacatatgagtttcttcgtttgatacccgttcgatggtacaaagataggtttaggaaacaacatatgcaacaaactcatcagatcattaaaacttgttgtcgaccatccatgtttaacctttaatcttagaatgtcaagcactgaacgcaagactgtgaaatccttatcacatacgttcgattcatcgtaaagaagatccttcaatgccttctctaatgcctgccaattatacaattctcgtgacctggccgctagcacctcttgtttaacatggcgtagcatatcctctaaatcaaaactaccatcgaaatcatcactatcggtggaaacatccacaaccattctttcacgcgacatgtattcgattataaaattctctgtctcattcatctagaaacataactcttcatcgtcatctttcggattggctaattccctgttatacgttcaaaccttgtacgttggcggagaattcggactcc

SEQ ID NO: 16497 - DNA, 2729 bp, Oryza sativa
  unsure (1)..(2729): unsure at all n locations
cgctgcccttgaanatgaanancgatgacgnacnccgtctgaanannnganttaggaggaattgtgcaggatggtccaggaataagcttatgaagcaacacaacgcaacattactcatctttatcattaaaacttgtgtgcgaccatgcatgtgtatccttcaaccttagaggtgcgggcactggacacaagagtgtgaaacccttatcacataccttcgcttcatcgggaagaacgagcttgcgtgccttctctaatgcctggcaattctccaagcctcgtgacctggccggtagcacctctggtttaacatggcgtagcatatcctctaaatcaaaactaccatcgaaatcatcactatcggtggaaacatcgacaaccattctttcacgcgacatgtcttcgattataaaattctctgcctcattcatctcgaaacataactcttcatcgtcatctttcggattggcgaattccctgtgataggttcaaaccttgtagttggcggtgaatccgtactccattatgtgacccaatatttcaccaggatctaccaacaatttctgattcttgcaatgacggcacggacaaaagatctttgtcatattctccctcaaagcatgcgccttagcctgatcaataaatttagatgcttccttaataaatatcggctgcgttctccacatctcatacatccatgacgactgatccatctaattatataaaggcaaaaaagttacaaataaaaaaatagaccgcaggtatttcatacaaaagtttaaatgcatttgtctccaaaaaaaaatacaacaatacatgtaactagtatgtacaattgattacatgcaaaatttgcccatcaaaacatatattttgaagctagattttgcaaaaattagttagaacaaaccttgtcaaaatattaaaaaaactccactttccaccaacgaaatataacaaaaatggagccaaatgaaggaggatagagagttcttcacctttcgtatagagttcaagcaaaaatttcgagttgaaaacctcccccctaattggtgcttgctttaggagagagaaagcttcgttttcaaatggtcaagctcgggcctggaggagcatatatggccgatcatcgcatgcggtcccttaagccagccgcatgcgaagatccattatcgcatgcggctgcttaggacagccgcatgcgaagatcagccgcatgcgataatgggcctattttcgcatgcggccgtcttaaggagccgcatgccctaatatatgcggccacttaagacggccgcatgttcgcatgcggctaatcaacccgcccccggggggcggtttttgcaggcgccgccacaagcggcccgcatagaacctaccgaccccctcgtacagaaaaacgatttttgtagtagtggttgccgccgcaggtgcagaagaagccaccgccggatgccgccatcttcgaggggatgccgacgcgagtcgcggtggcgagacgcaggcgacccttacgcgttcgtgggcgcggcgggagaacggcggaggccggtgcgtcgtggccggcagagagggcgtggagcgcagcgatggatagtgcggtggcggggccgaggatggcgaggacacggccgttctcgtggctcgttttcttccttccgacggccaaccttccacggcggtctcgatctccgccgccgccgccgccgctccggccctcacccgcacgcctccgtcaccgctccagtgccgctcctgggtctccgtcgccattggcccccgtcccacactcgcggagagaaagagaggggaggatatgatttatatgagccccacgtgtcagtgggacccacccatacttttggtgaatgataaatgggtcccacatattttttatttctaataccacctaagtgccacgcaaacgccacgtggacaaaagaccgagtcaatactgccacgtaggtgccacgtcagcgaaatcgccctccgaaaccaccgagggagtcaaattgtatcggttttaagagttgggggtcgagatatccgattttgtggtttagggtcacggattagatttcgatcacttttgagggtcacgaagtgaacttattccttctgacgtcgcccaaccctaacgcgtggcgacccgagaagccgagagcccaagaggccaagagcgtcatcgtccgtctattcgtttgtgcactggtggagaaaccatctttcgtcggtcggccgatttccacaatagtcccggatgcaataaaaaccggggctaaagatgatctttagtcccggttcaaaagggtaacgggcatatttgatctttaatcccggtttgtgttaccaaccgggactaaagatcatctttagtcccggttcgaatgctgtcaggtcatgtcaggcccccccgggatctttagtcccgggtggctgatcgtaacgggccaagtgctatggccgctgctcatctctccaaaaggattcatgccatccgtactcaaaccaaaccgtatgtttcgtgcgtcctttccaaattctttaaattttctgtcgatgtttcgccactgcgaaccatcggcggngtggtttagcatcccgtnctgttgacgctcttcagcgtgccatcgaaacattctagcatttccctttgttcctgaacaaacgcctttagccgtggtattattaggaaataccacattacctttacaggaattcttttcttt

SEQ ID NO: 16498 - DNA, 3681 bp, Oryza sativa
caagtctaacgcgcaggcttttagggaaatatatgaaaaggttcttttgtctgtcccgtcatggcaagaatcaaaaattgttggtagatcctggtgaaaaattgggtaccataatggagttcggattccccgccaattccaaggtttgaacctttcacagggagttcgccaatccgaaagatgacgatgaaaagttatgttccgaaacacataaggcagaaaattttatagctggcacggtctgctgtaaaagaatgttggcatatgtttcgggggggaccttatgtcccggtgggaggcaccaaccgggactaaagatcccggtgatctttagccccggttggtgctaccaaccgggactaaagtcccacccctatatatatgtcttcttcctcctccagctgcccgagcaagcttcaaaatttcttcaaaaaagaggggaggtcatgccaaaatttctattgaatttattttggtgattacatacaaatcggaggtgcctaaaaggtttgcaacttcatcctccaatgttttttttttgtcatactacatttgcacctatgttttgcacactttttttgtctccaaaatttagttgtaagttgatgagagagaaaatgtgtgtggggaagaaagaatatatagaaatttagttcatttgctaaacaaggttttataaaatagttgagaaggaaaactctagtgaaagttaatcttaaataatagaaaagaaactaaaatgaaaattaaaagaagtaaaacacattaaaattagtttaaaactttacaaatagtttttaagaattatttggtgtaatattttatgatttttgtatgaataaagatatcttataattattgtatgactgtcattattgtaagaataattatttgtgtacggttttttttgactcatgtagatggatcggcaatggatgtacgctaaccggcggtccaaagagtttattgacggcgtgcactattttttgagagtggccgaagctaacaggcaaaggggttttatttgttgtccatgcaataagtgtaagaatcagaaggagtattctgcatccaggactattcatttccacttgtttgagtcggggttcatgccaagctataattgttggacatcccacggagagcaaggtgttgaaatggaagaagatgaagtggaagacgacaatattccggactttgctcagtatgttggatttgaaggaaatcaaacgggcgaggaggaaatagctgctgatggtaacgacgttgcggatgatcttggtcagatgttgcaggacgccagggaggactgcgaaagtgaaaaggaggcccataaattggacaagatgttggaggaccacagaacttcgttgtacccaggttgcgagcaggggcacaaaaagttggataccactctagagttgttgcaatggaaggcaaaaaatggggttagtgacaaggcatttggcgatttattgaaactcgtcaagaacattcttccgggggaaacaaattgcccgagacaacgtacgaggctaagaagatagtctgcccgttaggattggaagttcataagattcacgcatgtccgaacgattgtatcctatatcgcggtgaggagtatgagaacctagaagcatgccctgtttgcaaagcactacgatacaagattagacgggacgatccaggagaagttgacgggcagctaacaaagaagagaattcctgctaaggtgatgtggtatttccctataataccacggctaaggcgtttgttcaggaacaaggggaatgctagaatgttgcgatggcacgctgaagagcgtcaacaggacgggatgctgagacaccccgccgatggttcgcagtggcgaaacatcgacagaaaatttaaagaatttggaaaggacgcacgaaacatacggtttggtttgagtacggatggcatgaatccttttggagagatgagcagcggccatagcacttggcccgttacgatgtgtatctacaacctccccccctggctatgcatgaagaggaagtacataatgatgccgattattattcaaggccccaagcaacctggtaacgacatcgacgtgtacctaagaccactggtcgaagatcttaaacagttgtggaagaaggaaggtgtccccgtgtgggacgaggacaaacaggagaagtttaacctacgagcgctgctgttcgtaaccatcaacgattggcctgcacttagcaacctatccggacagtccaacaaggggtacaaggcttgcactcactgtatggatgaaacaaaaagtacgtatcttaagcactgtaggaaagttgtatacatgggtcatcgtcgattccttgcagcaaaccacccggtacggaagaaaggcaagcacttcgaacgtaaggccgaccaccgtacgaagcctaaacatcacagcgggaaaacagtgtttgctatggttaaagatcttaaagtagtgttcggaaaggggcctggaagccagcatatagagagcgaagatggtcacgcggcgatgtggaaaaagaactctatattttgggagttaccatattgggaattcttggacgtacgccacgcaatcgacgtgatgcacctcactaagaacctttgcgtaaaccttcttggcttcctaggtgtatacggaaagtcgaaagatacactggaagcacgtaatgatctgaagcatatggaacaacgcggcgaccttcacccggaaccaaaggagaaaggaagccattactcgagtccagccagctacactcttagcaaggcagagaaggaaagtatgtttgaatgcttggagagcataaaggtaccgtctggatactccacgaatatcaagcgaataataagcacgaaggagaagaagttcacaaacctaaagtctcatgactgtcacgtgttgatgacacaactgctaccagttgtaataaggggtatccttccagacaatgtccgggcaacaataacaaagctatgtgcattcatgaacgcaatttcgcagaaggtcatcgatccggatagattagaagcccttcagaatgaagtggtgcaatgtctcgtcagttttaagttgatatttccaccttcatttttcaatataatgacgcatctgctttgtcaccttgtgaaagagatccgtattctcgggcctatgtacctacacaacatgtttcctttcgagaggtacatgggcgttctgaagaagtatgttcgtaaccgtgcttgtccagaggcaagcatcgccaagggttatggaacagaggaggtcatcgaattttgcgtagaatttatcgaagaccttcgcccaatcggggtacctgaatcacgccatgaagggagactacgggaaaagggaactctcggaaggaaagcaataatgacagtagacaacaatttattccgtaaagcccatttcactgttctgaaacactcttcattggtagctccttacatcgaggagcacttggctttagttcgcgccaggaacatcggtaagtccgatgcatggattacacggcatcacattgatactttccccgcgtggctacgacaacatatcatgggtaacgagtcgatcaaccaacaacttgccttcctggcgaggggaccgtttgggtcgatcgcgacattccagggatatgagatcaatgggta

SEQ ID NO: 16499 - DNA, 1356 bp, Oryza sativa
  unsure (1)..(1356): unsure at all n locations
ctgaatgtcanttgtananccnncatcnngttaagnatcctcnttgtcgcatgccggcaggctcgactttagaggatcccccgatcgaacgaacgatagcgagaacgaacacgtcaacgtacgttgtccgagaacgtgttcgagaactataacgatcgaacgaacgagagcgagaacgaacacgtcaacgtacgttgccgcgaaaacgtgaacaagaacgagaacgatcgaacgaccgagagcgagaacgagaacgatcgaacgaagacaagcgagaacgagggaacgaacgtgaacgagaacaagcgaacgaacatgaacgagaacgagcgaacgaacgaggacgaacgttaacgtgaaatgcaatatatatatatatatatatatgttacttcgcatttatcctaatacatctttttgtatcttgtagaaaagacgtgttgtcggagtcgtccgtcaagcctgagtggaagagctagccctagaaggaattggagcaggcaagtgacgtaataatataaatgattgttatatttgtaatgcaattaattaagattattagacctgtaattagacttatcatataagattgtgtagtgttctaatattatttgagttttaatataaaattattttattgcaaattagacttagtatgacattattgactacggaattggtgcgactcctagcaattgactattgtagtcttaattagacttagcatatacgcacgaaacacttagcatacatgactattttagtcttagcatgtaatattatttgagttttaatataagattactttatttgtaattagacttagtatgtaattattgactacggaagtggtgcgacaagtagcaattgactattgtagtcttaattagacttagcatatacgcacgaaacacttagcatacatgactattttagtcttagcatgtaatattatttgatttttaatataagattactttatttgtaattagacttagtatgtaattattgactacggaattggtgcgacaagtagcaattgactattgtagtcttaaaacataaatgtctcgtgacttagcagatgtttgttgtatcaacagatggctgaccgcgatgaggaacagatattgtacgatataatcgcggagggaagcagccagtactggaatgaagaagaggggaacgaggatccaaaccagtacttgaacgaggaatggaacgttgagagggatgcggaggggaaccaacaggggcacgtggaaaggtatgtggaggggaacccatgacgaggaggctagtggtagtcaacacttcgtttgacagaagatggcacgccgcaacgaggtgcaacga

SEQ ID NO: 16500 - DNA, 1277 bp, Oryza sativa
  unsure (1)..(1277): unsure at all n locations
acgtttgatttganatcctctacnccatgcaaggagggcgactgtagaggatccccgaatcggtaacttatatcaattactcctaattgatggatggttgatggttgtgtattggaggatggatcatggctaggtgatgacaattagttgctctattcctcttcctattccatttgtaacctacatcaattactcataattgacggttggttgatggttgtctagtggaagatggttgatggctaattgatgagaattagttactctattactcttcctattccatgactcttactcttcatcttccatttctcatataaaatgagaatggatttgatcttccaaaagagaaagtgagacacactttcatccattttccaacgctgttgatgctacggtaatcccatcccgacgagtgtgtgcacacgcattgggagagtaggcctccaaaaccacgcgctgatgcgacgtttgcacggacgggcgggcgatcaggtttttgggagcgtaaggcgcgactactcactgttcgtcaacatctacttcaccttcaccaatatgtcgaacacttgagacaacggcaacactgcatacaagcagaagaaggctcccgtcaacatcaacggaggtaatgctgcctcaaactccagcggaggaccattcttggggtataaccttcttacattattcaattagaagttttactggtgatgttcatcgcaatgtcaacattgtgttattatgtgactgttgaggctaattctacatgaagcatgctcatgttgattacattcaccattatcgctggatcaaatcccattgtaaatatcatgttgattatcttgttattttgaattaaaatatgccgaattatgaccaaatttccaccagctatatggtccgcctgcgaaaatatagcatgcccgcctgcaaaattaaaaaatgcgcctgcgaagatagtacaaatatcgaaatttgtacaatattaatttctaataaatgtttttcattgattaactaatggtgcgtaatattattagaaaatacaagctttgttctgacaatctcactttattgcaaaagggaaaggttcgcaaaatattaaatttttaacatgccacttaattcgctttaattcattagggataaattgcccactccgagaatttgttattggcctgtatatggcaccttttgcacaaaatttttaacaaaaaactcccgcggagaatgtaaaatgcccctattttaagggggtgtggaaacgggccccccct

SEQ ID NO: 16501 - DNA, 1555 bp, Oryza sativa
  unsure (1)..(1555): unsure at all n locations
agggcgatgtgttatatacntnttattgagaaagagaaggcgccctccacaagatatttataaaaaaaganaccggtgtcgcgccccccatatcgtgttacgcagaaaagcacaaaaatataatatttctttagatcacgcgggggggtggggggcccaccccgcgtaaaatatatgtttcgcgcggaattaatatattatgtgcgcacttatagaaagaggcactttacaaatacccagtccgtcacccaacggggggtaatttcttttcccggtatatgggatattcttattaaacacggttaagggtaaaaacccgggctataaaattatggcccggccatatgattttcggctttacataggcgtttaaacaaatagaagttatggcgttaaccatattttaaaggccaaagatttaatgccagtttatttcgaagaataatttgttgtctgtaataaattaagtggataaatcgtaataagcaaatatatgacttataattaataaaaattccaatatatatatatacttagcatatatatgaatgatattattatattggtaaaaactctaattaagatatgtatgtacatactgcatgatttaaaattaataaaaattgtaatcatcatatatacttagcgtaggaattatattaaattaaatgctaaaaactctaattaacatatgtaaatgccacatgcatgatttaaaccttttaaaaattggaatagtcatatataagtagcatatgaaagatagtaaattaaattgtgaaaaactctaatatatgaatgataattttaaaaatatattaaatttaatacttttaaaaattctccagtcaattataattagcatatgaatgatagtaaattaaatgttaaaaactctaattaacatatgaaattgccacttgcgtgatttaaaacttttaaaaatcctctagtcaattataattagcatatgaatgctagtaaattaaatgttaaaaactctaattaacatacatatgaaattgccacctgtgtgatttaaaacttttaaaaattgtaagtatcacatataactagcatatacatgatttaaacttgttgaaacctctaataatcgtgcgtaattaacatatgccatacatcaattgatttatatggataatcaatacatccaaaatagtttacatcgtgtacacaataattacggcattacatcggcggtgacggttgaccgcacgtactttctcctcactattgttccctccttgtgatcgctgcgtgagtaaggggtgtcttcatttgataggaggatgctagggtcaatcgtcaccgtgaaagggggttgcccatccaactgatcgtaatcctcgtcagtcttgtcctcaactccgacgatttttcttttgcctgggagaaccacttgacgcttaggctcatcaggccctctgcccttctttcctttgctagacatgtctttcacgaaaaagacttgcgttacatcattggcaaggacaaaaggttcgtccgagtatccaaccttgttaaggtcaacagt

SEQ ID NO: 16502 - DNA, 2850 bp, Oryza sativa
agtttagaaaaatagcagaacactttctagaagagatatttcagtattttttcacatagtcaacagtagaaagaatgagatgcctacacgcattgtcttcaaagaaacatatattgtacccattggaaaattgatcagttactgaccagcgaattagaaactataaaatcatgctcaatcaccttgagctctctattggagaactatgtctctgcttcctcttctttttaaggattaactgaaagtaaatataaactttgggctgcgaagatgacaagaacctctattttctgtaatgctttagttttgccctgaacaatgaacaaattagcacaatggagtatattgttaatgaaactcgataaagaaaataatcagcttatcccttgtagcaaggttgggttcaccatcctgattgtgcagcagtaagtgtaatcagatcattaacaggcattgttaattcaaaatcaatatctacccttaaatcttgaaatgttcctgagccacaaaatcataattagcttcaatttggatagcatatcaacgcatcagtgctgaagggtacatagttttaccttaaaactggagagggaatgaagttcataactatctcctacaacacacatttttatttagtggtaattcatggttcttttagttcataagttgactagttgataattattaggatttactgattcatgaaatacgaacacatgaatccataaaaaacattcctaattactacccactttggtcagaaacttgtggaactttaagtatcaaaatctttttcaatatttagattggaaaataaaaaaaacatatatgtagaatactagagttttcttggtaagtttcaaccaaaatactgtatttctgcgggactctataaatattttaaaatagaatcagttgttaaggttctgtgtgggaactgtgtcaatgtccaagacaatgtttttgtctaaccatgtaatgtatttatgatcacaattttgttacatattccttataccaatcctttaatttatggctaaatatttcctgctctaacaggaacttggagggacaaccaccatgatggaaagagagaaggcttccgttcaagagttaatgactgttgtgaatgaaatgatgcgaaacacagaatttgctattaggtcatatatgatgctgagaccaagatttatccgtccaggtgctggagcaaatggtggtggctcaaatccttctggtcctgctggagctcagtccaatcagccagtagcattggcttcaaccattgatttctatagtggtatcccaaagcggccttcccattttatgcaacagactatcaacaggtttgagaaatatcttggagaatgctgcaagtggatcgcggagctagagcagcttgttcaaatggagaacaataaaaggcaatcagcctcattagaatctctaccgaaggttatgtcgaatgtgcatgattatttcatctatgttgcttctaaggtaaatctcctttttcatacacacactgcagttgaactgttaaaatgcatttattttgaggttctcccccatgatataaatcatttattatgtaatatagtcataaaaataaatgtaaatctgtaagtcaaccaaattttttttgtaacagctgtatctcgtgaaaaaaataagagagattgcttacttttaggcttgctgcactgccttggtgcgatacccagtattttctaatgtttgtattttttttaggtggaaaatcttcatcaatatgttgagtcattgaaaactgaatatctacatgagcagcggcgattgggtaatgccaatgatccatttttagaggcaaatagacgagaagcggctaaacaagaagcagctgccagaagggtacatccaacattgcatttgcctgctcctgtacagcccacaactcaaattgctggaacagtgacgagtcaaccacagcaatcattgattccttctggagcgacttcttcaagtgcttttccatcattcagcactccagcttccgctccatcttcttcaagtctcttttcaactccaacaactccaactctatccagcaacctttttggtacatctggatcagcccagctgtccacaccatttgggacagtctctactccaacgcttggatcaacgccggctccatctggatttgggaatacaactccatcttttgcttcaacgcccgctttaggtggaacctcactgttttctacgccgttcggaggtatacaaactctcaccatactatatttatatttcctaactgttagatagtcatatgcttatgataagtcagtagctatctgaaaacaatttggtacttttatgttgtgaaattctcattttagatgatctcgtcatggtatataaacatttctgaagtgttggcacatctacagtttgatttcatcatggcaattcatagctctaaatttgttgttatgtttttggtctgaactgaaatttgttattggcagcagagtacacttagttgtccattatttttccaagtgggttatatagctcaggcacacctgccgtgcatgcccttcactgtttctactcatctatggttaccgtccatattgaaattcaccagcaatattcttctttttatcctacttccaattgaacttacaaatatatcttttcctattctatacatgctatgatatcctgatttttggaaattgcatgacattctaacctgtgtctaccttaggtggagctacagcttcaggatccagctttggtggtacatctgtaagtataatctccatcaatttatgcagtattcttcccttttcagctatagca

SEQ ID NO: 16503 - DNA, 3707 bp, Oryza sativa
ttttttttggacggagaggatggattctttcagtcatatgaatacagatccctttattccaaatcatgttactgcaaggaagaaactcactcgctgttccatctgaaaattaataaactactggatttgctttccataccgagctatgaggtgtcctgcccaatcactgaaacccccaactccttcgaccgtgacagtggaagtttcagagaagcatccaagctaaccacatgtagaaataggtcagcattagccatattcttttaggtgcaggaggcgattatttcagtggcgttaagctgcttgtgctgtcgcaaaccacaggggatgaacggagacggttccacggcgtcgttcgatggcaacagcaggcagggacacagctcgtccattttgacttttttgattgctttggagtacggtcttgttttctcaatcgatagatcaaataaaatccctatcaggcaagcgccggtgtttttaacctaattgcattctgaagtcagtctctaggctccagtccaccgcagggtttacaatattgatgataactgcttagttgttgcggttatttcgagttatgaacgtataaccaaaaaattgatagtattaaaaatggtaaaatatcttaatatgtgtggtaaatatcagtttacagtactaatgatagccacgtgtttattgcggttattctgacctgttgaccgaaaacgtatgggtaaaaatttgatagtattcaatagaattattatgtaaagatatcttattgtcgttggtaaatatttattgtcccactctttacctttaagcgcaactcatttttaaataaaattttggtaaaaaggatgtagctatgcaccacactcttcggcttgcgtcaatattctacatttcacctaaatttattgtgcatactcaacgtctcccttctcatacgcccctcttaaccgtaaccccgttttcgtagggcattgatggtactccaatctatcatccaaattacttcatgacacatgaaactaacagaagcaccttatcgtattcacttcgtttttttacaagccaaccacagtgccatcaccactcaactaatttatctttattctgttttttttattttcaaaaattatccggtaaatccatttccaattttctcgaatatgtaaaagaactccaaaatcatttctccaaagttcaagggcctctggcctccacctcaccaaacgccgaaacggtgaggtgaacaaccacgcgtctataaaaaacacttgtctcctccgccttccaccttctctcttttgtactcgctttcgcagctcctcttccccggcttctccgttgaccgccaccggtgacctccccgccggggaggtctccctcgccggaaacccccccgcctcccaccttgtcttcgcggcggcgttctcccgtcatctgatcggccggcgcctttggtcttcgactgcttccgggggctactcgattcggttcctcttgatcccgctacggcttctcttgttgctcgccatggcgaaccgaatcacggtgtcctactccggctacgtggcgcaaagcctcgccgcgtcgctcggcctgcgctgctcctccgcctccacggcggcgggctaccgcttcttccaggacggcgggtggcgccccttatgcatgctcacctccttctcccccgggcacgccgagcaccaccggaacggcggtgggggcggcgaacaccgccgtgaagccggggaagggcgaccgcccgaaggccctgccgctttccgccgccgcagggggccactcgctgttcctctcgccggcgtacgcttcgtccagggcgcagccgccttcgctgcccgtgggtttgctgtcggtgctcgcgcagggggcgacggggtcgaagggtgggatctacggcgccgcgtctctgtcgggctcgtcgtcgtcgatctctctcgggttcaaccctgcctccttcctccctttcctgcagacctagaagtggctcccctgcagcgaccttgccacctcctcgtctgcgccgccgtcttctccttctccttctcctcctcctcccgcaccggcgccttcgattcgtcccaagaaggcgttggtgagtagtgcttccagctccccggcgattgcgaggagcagtggtggtagtggtgccgcgatgagcaggagcaactggttgtcgaggtggatgagctcctgctccgacgacaccaagacggccttcgcagcggtgactgtgcctctgctctacagctcgtcgctggccgagccgaggtccatcccgtccaagtccatgtacccgaccttcgatgttggtgaccggattctcgccgagaaggtagagcttgttgaaattggtgtttagtttggtaatcttgtcttgctgtgctatgttttgtgagtgtctaattctatgatgatcttcaggtctcgtacatattccgggagccggaaatcttggacattgtgatcttccgtgcaccaccagctcttcaggtataatttctgatttctataacatgttttttcacatacttcataatgatcttgatgtaaatgtgatgattgaattggaatgctactgcaggattggggctacagctcgggtgatgttttcatcaagagagttgtggccaaggcaggcgactatgtcgaagtaagcatttacctcaatggtagtggcgtctgtttgtctgtgttactaacttgctatgctgcaaaatgtttgtattggttgggttataattgctgctctctttgttctttgataggttcgtgatggcaagttgattgtcaacggagtagtccaggatgaggaatttgtgttggagcctcacaattacgagatggaacccatggtatgtgtcttcttcctatgctaaattgtgtgcatctttccatgattatactcatttcgatcttgcatagtagtactctagattgagcagattcttattgaaatgtttgatttttatcactggagtaaactaatgtgaaatttgacaatcaaaatgtagaattttagattgcacacttgagtaatcaaagtatcaatttagctgcatttccagagtgactgatctcctggaccagtgttgagttcacatattagtataccataatatccaatcgagtattatatatttcttaggtttattaattagcatttgtaattcgtttggcatattggttcatcaaatgcagttttagcaatataatccttctgttttcagttgattaatagctcattattgttcctgcagcttgttccagaaggttatgtgtttgtgctgggagacaaccgtaacaacagcttcgattcccataactggtatggtcaaaactaaactcaaatctgcatcagaagctttcatctcatagaatatgctagatctgattcgaatcaaatctgacatttcagggggcctcttcctgtgaggaacattattggaagatctgtgtttcggtactggcctccatcaagaataacagatacaatatacgagcctcgcgctgaatattctgtggctgggttgtcgtgaggtgtatccagaccttctggccatgctggatagccgatgtgtcatactcttttgtggagctccacttatgagccgagctccagttcacagctctcactggtggttatagaggggttggaaattcactttggctgaccaatttggtttttcaac

SEQ ID NO: 16504 - DNA, 4148 bp, Oryza sativa
gatctatgattgtttcttgtgggtctcattttactggaattatttcatatgcttgtcgaaatagccgcttcctttaagctgtactgttgcttagttgctgctgttgctgtaatctgtccggcccgaaaggctttctgaaaccatgaacctttaacatcaatatatattgaaaatgatactatgtttgctttgtattgaaaatggtactgtgtttttgtattgaaaatgttactgggtttttctataaagtgaatcaaacttaaataattttaaccttataaaaaggtaaagctttctataatatgaaatatactaaagtgcatagatttaagacgggtagaccaaaaccgaaagaagtcaagaatcatgattgatccaatcccggaagaactgattgcaatctcgacggatccaaaacagggatgagcttgcaaaatttacgaccgcgagcaatggtagcgacccacagtttcaccttccctccatcccaaatcttattccagccccatcttttcgcttgtgcttatgcttattagccaactttaaattttcaatattaaaattagagtttgaccttaaagttttctcatctaagtttattatgtagcctttacttttagatacttaagaacacgtatataaaaattttactcacaaagtatttttccgttacaaatataccgctggtttattcagccaaacaatgagtccgaaggcggcggaactcgccggtggtggtgccgcttcgcgccgccgcggcacgacgtgtcgacgtcgccttcgccctccttctccactcacccgacagaccacaccgcaccaccaccactcgtcaaccccgatccactcgatctctctcaccatcctgtggcccaagagaagaaaaagcaccggcgaacattggacggcatgaggcagatcgagctttcgatgccaacaaaacaaacaccaaacttttttcgagctgaaaacacaaagggggagaaaggccaacaaagttgtgacctgatgaaaagagtggagggctctcgtctcagttcggcaaaaggaaaggctggagactgaaaaagatggcgggaattgacatggagccaactgggaatccacgaaggcacgaacggaatggatgccagtagcgccactaagagcaggtacaatagcagaagccagttgcaaatatattttaaggaggataatgaggagagagaagagcagtgggctataaatttgtagctagatgtagcacggactccaagacgcagtgtatatatgacaagtgagactaggtattaataatgtagtatgtaactattgtataaataagctattagtagattggctataaatgaattggagttagtagttgactatactattaaacttgctttaaatataccaccagccgcaaaagttggtgaatgtagtattctgagcctgtgttcagtagcaacagaattggctatctttatgactcctttgttgcaccttatagtttagtgtgttaactttacagatttagcacataccaggatcttttctcctgtcgttacattttgcttaatccagtcatccagataatcacaccctcctaaaacgctactcctagctacaactttgtttatttctgggagtgctaagtttcgttcacgtttcattgcaatctgaaacagtaatacgcaaggaatacctggatcatacgatacgaatatctagagacaaaacatgatttgagtgattgatgatcgagaaagaagctcaaaaggtcttgaaaagtcgaaacgtccatcactgaaattcggtttcatgccctcagatcccattgctgagtaggacgcagattttcttccttcctaccatttcctttctcttgcttcctttttggtcatttgagatagctttatccatcctttagcaaaaaggaaaccaatagctagcaatacttgccatcatatatacctgggcaatggccggccaagcaaactcagttctctacattgaacacttcaggtttgagtagacatggcctctcggtgtcttgttaccacaggttttgaggatgagtgcagagagatccatgatgcgtgcaaccagccacgccgtttgagcgttctcttggctcatcggagcccatcggagaggcagaaaatcaaggcgacttaccgtacagtgttcggcgaagatctcgccggagaagtgcagaaaatcctcatggtcaaccaggaagatgaggtaagtgccctctcggttttgcactccttgcttcagactgattttcaagttcttacctctccatgatctttcccttcccagctctgcaagctgctctacctgtgggtgctcgacccgtcggagcgcgacgcgatcatggctcgggacgccgtcgagaatggcggcgccacggattaccgggtcctggtggagatcttcacacgccggaagcagaaccagctcttcttcaccaatcaggcataccttgccaggttcaagaagaacctggagcaggacatggtcacagagccgtctcatccttaccagagggtagcccttgcttgttgcttaccattctacctcagtttccaattgtgttctttaccttttagccagctgagctcaactcctcccctgctttctggtgacaattcaagcagctattggtagcacttgcaacctcccacaagtcgcaccacgatgaacttagtcggcacattgcaaaatgtgacgccaggaggctctatgatgcgaagaacagcggcatgggatcggtcgacgaggctgtcattcttgagatgttcagcaagaggagcatcccacagctcaggctagcattctgcagttacaagcacatatatgggcatgactacaccaaggtaagcaaactcaataacctgatggcattcacttcgcatacaacattactgaaatgactgccttcggacgttatcttgaaacaatctgccaaactactgaaatgatgactgttttctgagcttatcgttgcaacaatgcgtatgcaggcactgaagaaaaatggcttcggtgagtttgaacaatctttgagggttgttgtgaagtgcatctacaatccttccatgtatttctccaaggtgatggcagctgaaaatttgcagtttgtagttggtacttcatatcatgtctctgacccatccttctatttctttgtctcgtcagctgctgcatagaagtctgcaatgctcagcgaccaataaaaggttggttacaagggctattttgggcagtgacgatgtcgatatggacaagatcaagtcagtgttcaaaagtagttatggaaggaccttgaggatttcatccttgaaagcttgcctgagaatgattacagagactttcttttaggtgcggccaaggggtcaagggcctcatgaagtctgtggagagagatccttgaattatctagggaaagtaaagggtgcatatactgctttgcatgtaagagcaaattgaccatcaaaaacagcagttttatgttatctgagaataggatttaggtgagaacatcatgctcattttgtttattttgggtgaaaaaagttatcagttcaactaaacaattgttttgacatttgtgatggcaaaatagccaagccttatcttcaatagataaaacatagaagtagggtacgcatgttttggtggactacgttacagatataatttcagatgagcttcttctttcggaagtactgttgtagatgccaaagttgcaaaactgagactataatgcaaacaatgagtgatatgatgctcaaccatgtagccctagcattcgtcttctcactggtatctctcatatttgcttctctgcattgagaacaaccttttaagactatttatgcccttagttatcgatcaaattaaaatccatggatagctctttgagctacaaaaggaagtgtacttacttggatctcagcaagagcaggttttcatgtattgcttggacagaggtttcaagcttgactaattctagttcaactccctgttcaggaatgttgttgttaaggaggaataacaccaaaatgcagaacataagcataatatcctaatttcatgaacattacctcgagcttttcctttttagcaacagaatcccaatcttttgttgcaatgcc

SEQ ID NO: 16505 - DNA, 745 bp, Oryza sativa
acaaatgcatcagactactacagtcctcctcaagcaaaccttggcaggggtaccgaatctggagcttatgggtatagctcttcgttccaggtggatatggttgcaacggacctcctcaagcaaaccttggcaggggctagccatttcggggtcgcaaaaggaaaggaacttcgttgcagcctctaccgtctgtcaattaagagacggacaaactatcctcttctgggaagatagctggttgcaagagggttgcattcggtcctttgctccgaacatttatgataaaattccaccacacgtgcgccggcgtcggacggtggctgaggcactaacaggtcgccaatggatcaaagacatccgaggagcacttgggatccaacctattctagaatatctaaagctttggtcgcttgtccaaatggtggatcttgatcctactactcctgattcaatcatctggaaatgggagagttcgggccaatacagctcaaaatctgcctataaggccttgttttttggtcgtgtcgcctttctttccaccccaatttggaagtcactcgctccgcctcgatgccgcttcttcttgtggttggtcgcaatgaacagatgctggaccgctgaccgtctgcgcagtcgagggttgtcacacccggatcgctgtgttctttgcgatcagcaggaggaaagcattgatcacatcttggtagcatgccctgaatcgagacaattatggtggtggacgctt

SEQ ID NO: 16506 - DNA, 2048 bp, Oryza sativa
ttgagactaatttggatagcgttttctgttcagatatctagataagtccattgccactctacaaatggagctggcaggtaagcgcagcacactcgagctacttggcaatggaaatggtataagccagcaaaggaagaaagcttttgtagtgattgggatcaacactgcattcagtagcaggaagcgtcgggattctgttcggcagacctggatgcctcaaggttcatacttttcaatgcaacacatagtactgcaatgagacatggctatttgcatgctttactaactttactggatttcttattcatagttagaagccatgcagaagatttgtgcatttgatcaaagtagaacgatcgtgcacctaacctgctttcagaaaatgatcatgcagctaacaaggaaatatagaaaatgatcatgcagatatctagtcaaataggaatatttatcatcatataagccttctaatataaaacaaatgcagttgtacctttgtcacctgcacaatttcttttaaatttgagcctttccgatgaatgaatcattttgttaggcgacaattgtttgtattttgctgtgctcctgtactcattgcttgtaagactaatttcatatctcccactcctattttcaggtgaggaactcaagaaattggaagaggagaagggaatcatcattcggtttatgataggacataggtaacatcatctgcagtttgtttcattattcgtaatacaaacaaagattttctagacatctctgtagtaacctttccgttttaggggcgaaaaaaaaagtactggacttgtgattcccagattagactgtagttagtcattttgctcaaactcgaaaagacagatttttcattgagtagctttgagctctagtaacttcataaacaaacagtgaactaatggctggatttgaaatttcacagggaccattaaaaacttatattgtttattaggaaatgcaaaatgtgcatacaacagctcatactgcacataattgatttcaaaattcttgctagaggttcatgggattttactacttatttctcagcataatgaatacgaatgcatcaactaatactaactactttttatgtattacagtgctacgtcaaacaatgtgcttgataaagaaatagacgcagaggatgccgctcatcatgattttcttaggctggtatggtgacatccaccaaaagtagaagcacatcattctttacctatttctgttaaaccaaaatctgttttactgtgattggggctgtagtccatactaatgtttattctgctgcaaccacacatgtatgtaggaccatgttgaagggtatcacgagctatctgcaaagaccaagatattcttttccactgctgtggcattatgggatgctgatttctatgtcaaggtggatgatgatgttcatgtcaaccttggtaagctttattatttagcctttgaccttgatgagagatttgttattcagtaattaactgatgggagtgatgcaggaatgctgatcacaacccttggtcggcataaattgaaaccccgggtttatattgggtgcatgaaatcaggaccagttcttgctgacaagtaaatattctggaaacaacataaaactacttctggaagctccatcgtatgaaatctctagatgctaatattcatttttccctgcatctttttatcagaaatgtgaaataccacgagcctgagttctggaagtttggcgaagacgggaacaagtatttccgccatgccactgggcagatatatgccatctcaaaggaccttgccacatacatctcgatcaaccggtaagcctagagaatggctgcacatgattcttcagacaaaatattcattttactgaattgttactgatactcttgtgtcccaccatataacccaggcctatattgcacaaatatgcaaacgaagacgtttcacttggcgcatggtttatcggtttagacgtggagcacattgacgacagagacatgtgctgtggaacaccaccaggtcagttt

SEQ ID NO: 16507 - DNA, 1804 bp, Oryza sativa
gaattatttggcccccaccaataataatctcccacatgtttcccgtaatcatttgggagagatagatagatatagatcatgttaataatcaccgttggtcccgtcccgactgatgagtcccgaccgaacagacatcccattctgccaggcagcagccagtcacgtcccgtagattaactattccgccgcgttcatcaggtgttgcgcgcgcgaaaacggcgaattcaccgcgcccgcgtcccactctaacacctgttcaccgctcgatcgggcgattcggcgttgcccgcaccggcaaaaactacgtgggggctacgtacgcgcgccgcccggtgaatagcctcccgcgcgcgcccgtgagatcgccactggcgccacacgttgcaatgccgacgtacgccacgcagcggcggctcagatcagtgtcgccgtcccaccacgtgcgcgcggggcgccgtacgtctccggccccctcgacgcggagaattctatggcaaaggaatggaggaggaactagcggacgcagcccagcgcgcgcgcgcgagcggcgaaccacccaaccaatctcgggggggcggattgcctgctcccgttcgattcgacggatcgcatggtcccgcgtctcgatgatttgaggcccaagggggtaggagtacagcttttttgactcgtcatcagcttcgatgatccgtcacgcgccgcgcgccgcgcggtgcagatctggcgagcgagagataagaggaagaacattccgcttacttttctgtagtgacatgtagtaccgtcgtactggtagtgtagtacggctgttaaatgaacgcacgaacaaatgtcggttttacacaccaaataggagtagtatcagtgcttcttccatccatataacgagatatttaactatttataactcttaaaagattactggaccatatgtcatacatatataaggattcacatattatagacttaaaagtggcaaaaagttaaacgccccttatataataaatcgtttaaatatttttctagttaaaatattttaagtttaattaaatttatagcaaaagatagtaacattatctccacaaaccaaacatattagcgtaatatattcaatactaaattaatgaaactaatatggtgttttagatattgctaagttttttataaatttgttcacacttaataaagtttaacttatagacaaatcaaaacaatttataatattgaacgaagggactagtagcaaatatgcatacttgtacgatgtactactacataggctaacaaaatggtagaggttgtagctcttacagtgatgtctgccgtgggggaaaaacaatggtcataggccgcgcacattgtgctggctttgatggacgatgatcctctcggagatggatcctaatcactccatggatatccaccagtttattatgttaactaaataactataaaaaaattgaaacaaatagattgttgtgcagtatattgtcagggttcctagttatgcacgatcgtgatcgaacctactattcggaatatcacaatcggatattgccatgggattgttgtgcacgatcgtggtcgaacccactattcggaatatcaagatcgcgcgagttctgatcgatggcggcagctcgattaaccttctcttcaccagcaccttggacgcgatggggatcccacgaagcgagttgacacccaccgatcaacccttccatggaatcactcctcagtcatcatccaaaccattgagcaaaattacgttgtttgtgactttcggccaaacaaataacttccg

SEQ ID NO: 16508 - DNA, 2670 bp, Oryza sativa
cccaaactgagctttacagcaaaatatattcttctataacttcatataatttgcataacaaatattctaaaaaaattacagcaaaacactatggtacaaggtataaactattagtgctttcactccatcatcagtacatactacatagtcatcaatcatcacataacagcaacacatatcagtccatcaatattcagtacttagagcgtacacagtaacaaagagtgatagaggtggagccgtggaggttgaggaacacctgctgctgctgggctaatggctgctgaaaggcgaggcatcgtgcatcggtggtggtgaggctgtccgcggtgtggccagtggccggcgtcatcggtgtcgtccgcgtcggcggcgtcggcatcgtcgcctcgtcggtggtggtggtggctgcgaaaatggtgggggcgaggaccgagcgagagagaggaaaggcggcgagacggcgggggcgaggtcgcgaggagcccactagccgaggacggcagccaggcggccggcggtggcgtgctcgaccccctggaggctggatgcgccgcctctctcgatctgtctctctcctctctagcctctgtagggttagccagttagggacctagggacttgggttgggcgggaacttgaggaggaattatggactatttggatgggcttttttttacttcggaaattccgacaaactttccggaatttttccgaccgattccgagttccgacggaaactgctattatcatattcgattccgtttccgagaaatttcgaccggctgattccgttttcgaaaacaggtccggaatccggaaaaaatctgaaccgttttcacccctacgcccagcccacctaccacagctgagtcacccaagaaagggagaaagacaaacaagacgccgaaactggacttcgcaatcaagaacgttccactctttagtgccaaccccgacaagaacggcaagatcggggcatcactaggcgagaaataggaactcgtgctcatcaccttcctccgggacaatgttgacgtgttcgcttggcagccgtctgacatgccaggggtactcagggaggtgattgagcacaaactcatggtgcgacccgacgccaagccagtaaagcaaaaactgtggagatttgcaccaacaagccatacgagaagagctcgacaagcttctcaaagctggtttcatcagagaggtactccatccaaagtggctagccaacccagtcatggtgcggaaggccaccgggaaatggagaatgtgtgtcgatttcaccgacctcaacaaggtgtgtcccaaggatcacttccctcttcttcgaatagaccaaccggtggactcaacagccggttgtgagttgttgagcttcctcgacgcttactccggctaccaccaaatcagcatggcgaaagaggacgaggagaagacaacattcatcacgcctttcggggtattatgctacgttaagatgccgttcggactaataaccgcaggaaacactttccagcgcacggttcagggcgcacttagcgaccaactcggaaacaatgtcgaggcctacgtcgatgacattgttgtcaagaccaagacaagcgactcattgattgccgatcgacgggaaacgtttgacaacctctgacgatatcgccttatgctcaatccaaaaaagtgcacgttcggggtaccatcgggcaagctgctcggtttcctcgtctctggcagaggaatagaagaaaatcccgagaagatcaaggcaatcgagaacataaagttgcctacaagactcaaggaagtacagaagctaaccggatgcatggctgcactaagcaggttcgtcgctaggatgggagagcgaggacaacctttcttcgctctactgaagaagcaagacaaatttgtatggacacaggaagccgaagaggcatttattgcactcaagcgctacctatcaaatccccctgtacttgttgccccctaacctaatgaagaattatttctctatatcgccgccacgccatattccgttagcactgtcattgttgtcgagagagagaaggtgcaacaactagtctactacgtcagcgaagctctccacgacgcaaagacaagatatccacatatccaaaaactactctacgcggtaatcatgacatcaagaaagctacgccactacttccaagcccacagggtcacagttgtatcctccttccccctcggtgaagtcgtgagaaacaaagacgttgttggccgcattgcaaaatgggtagtcgagctaagccaatttgatgtccactttgtgccacgaacagccatcaagtcccaggtactcgtcgacttcgtagccgattggaccatgcctgataacaggtcagacaaccaaatcgacaacgaaacgtggacaatggcattcgacggcgcactcaacagccaaggagcaggggcaggattcatcttgacatcaccttcgggagatcaattcaagcatgcaattcacctcaacttcggggcgaacaataacacagccgagtacgaaggactactcgccaagataagagctgtagctgcactcggagttaggcgactggtcgtgaaaggggatttcgaactagtcgcgaaccaggtgcataaagattacaagtgctctagccccgagtt

SEQ ID NO: 16509 - DNA, 657 bp, Oryza sativa
acattactcggaaaaactttttgacaagggtttttctgcccaaccaccctcaaaaatgcctgcgacatggttcaccggtgtgaagcctgtcaattccacagtaaacacacaaagctaccagcgcaagcactccagactatccctctacttgccgttctcgtgctgggggctagacatactcgggccattcccacgaggacagggcggctacaggttcctattcgtggcgatcgacaaattcactaagtggattgaagcgacacccacgggggaaatcaaggccgacaacgccatcaaattcatcaaagggatattttgcagattcggattgcctcaccgtatcataacggacaacggctcccagttcattagtgccgattttcaggattactacatcaggctgggagtcaagatctgctttgcctcggtttctcacccttagagcaatggacaggtcgagagggcaaacggcatagtactacaaggaatcaagaccagcatctacgacaggctcatgtcacacgacaagaagtgggtcgaggaacttccatcagtactatgggccgtgcgtaccacaccgacaacgtccaacaaggagacacccttcttcctcgtatacggctcagaggccatgctccccaccgagctacgacatca

SEQ ID NO: 16510 - DNA, 1090 bp, Oryza sativa
aaaacagctactagctgtttccgattaccagtttactttttttagaaaaacaaaggagaaacaaatttaaaggcaaaacattttcctttgcagcaatcaaaggcacatgtacatagttcatacaaattcaattttctgagttgccacaaaacaaccacgcgagcacaggacaactctgaccttctaacatcaaaggatcagggaaacacttttaattagttatatgaacatccgttcatttgttgtatgttaactaaattatttttatttttttaaaaaaattgacaagataaattcacatgtgaataatgtgatatgccactctataaacataaacatgtaagttcaaattcgacttctatcaattacaacaaaaataacaaatcaaactctaattagtacacatatatttacagttaaatttgatatttttattataacttatagaagttgaatttaaatttatatgtttgtgaagtgatatatgtcgacggggatatccgtagaccggatatagagggtattggtgtacgctggtacgaggatctacgtaatacgacatcaagcaggcagaaaacaaagattatactggttcaggccccttgataggtaatagccctaatccagttgatatggaattatatgatggaaaccacatattacaaagggaaaagcggaactcgatgataccgacgaggtcgtaatcgaacaggttcgattagatctcccggcgacttggctcctgtgggcttcaactccgtaggctgtcgtggatgtgttggctatgagattcgatgccttagatcctcccgggggtcccttttataccgcaggtcaactggtctccaagtaggactcggagacatcggacccggcacgatacaatgacgacccagttctgtccgagtaggactccttccatctgtgaactccatgatgaatttccttaacgtacgccgaaaacgtccgtatacgcgcaagtataccatatcgatatgtgacgtatatcgaaggtagagggtataccttacccgtaaccctgacagtagcccccgacttctgcttaaatgaactcatgtaactgatcgtg

SEQ ID NO: 16511 - DNA, 3357 bp, Oryza sativa
tgctcccgcaatggacctcgacaagtctacctccaccagcgcgtcgctgaagaaactacaggaggatggcgcccttcccggtcgcgggaccatggagagagaagcaggaggtattgaaccccagcctgtcctgggtcgcatggttgcgatcgaggactatattctctgtggttttcttcctccgccttctgaatttcttctcttggtcttgaatttctacggcctttctttgctccatttgaaccccaattccatggccttctcagtattttttcgcatctttgtgagacctacattggggtagagctgtttcttgacctctttcgtttctactacgagttgcgttagatggaatcaaacagggtatccggatgcgtcggtttccgactccgggatggcctgaagtcgtgctatatccctttccagtgcccttcctctcgtagcaaatggcgggcgaggtggttctatcttcagatagaaaattcggatccagtcttcgttgttcctgaggaacaaccagacaagatttcgtcttggaccgcaaaacccgccttaaccccttctcttcagcccttcatcgatgccatcgatgacctccgaatacgaggtttgtcagggtatgaagtcgctgccgacttcattggtaggcggatccagccgctccgggctcgagcccacccatcctttgactattttgggccggaggacgcgacccgggtttcttctcggggtatttttcttgtatttaaattgacttccttatgtgcgtgttcctcctgacttatcgaattctggttctcaatctgcaggtttgaacagcgaaaccatggagcgccgtgtcggccaattgatgatcagcggcgcgacaacggcgagcaaagtccccgtccccctttgtgagaagggggcagctgaacgcgaagctgccatcaatgtaagtgtactcagcagcccttttgcacttttcttccgagatcgcattgtgacttcataaagcgtaggctctccctctgactgatatcatcgggctgctcgtggattatcaggcggcggcgtcgctgaaggaggacgtcgccaaggaggcgtccgatgttgctgccgctgctgccacaacaagtggcggcaacgtttcgaaaagggggaggaaattctcctccgtgatcagaaatcgtcggaaggcgcccactccctcggtaagctttcctggtcctttatcgcgtagtcggaaaacttccacctcacatcatacccgttatactccaggcctcggatgcgtctcctccgcctccgtgacggcagtggcttgtgacgcttggcgagaagtaagtggatgaatttgaggttttgtcacttcgtcaaactcttgcagcctgtctcaactgcagccttccacaaggcggcgtgggcgaaggcggcgcaagacagatctggagggacctccagcgcgtctcctgctgtggcctcgacagatgtcgtggtcgtgcccaggagccgcgaggcgacgcctagtggcccagccagcgatcttgcggctggtcggggctcgccggctgtcgtcctcacctaggaggagctccaggtcgagatggggctcctccttgaggctggtgctcgcagcattagccgcgagatcgcggaggcgagggcggcggcggcgtcgtcggtgaatgagcgtgccgaccggctgacgcgtgattttgcggaggttcgcgaggacctccagaagatgacggagctggtggccggcaatgagcgacaacgacaagaactcgagcatcgtatgtcggagcttgagaacaacttgtcggaaacccgtggctcgttgcgggtcacctatactggtctgcaccagctcgccggggagtgtggcgtcaaaactaccatcccggcgaatcccgacgagttctcgctgacgtcttcgcttgcagaactggcgacagcgatggaggcgatccccctccaagcacgcggccaggatcggagaggagacgtccaacttgatctataccggggcatgccatgtcctcgcgtgtatgaggctggcacaccctgaactctatttgcggaagatcttggatcagggggcggctagcgacgcgcgcaaggacatgatggaggaagtcggcgatctgggggagtccgttctcccgctttttgaagagtaggatctttagtcatgatttgtaaaactctcattggttccaaccgcctttgtgtgtgcagtcaacaccttagttttctttagcatgttgatctcgagtactttgttgtcatttgtagagatgttgatgtcgaggatgtccagcagcgtgggcagcctgagttgccagtgatcgttccggcacttgcgttcaagccatatgtgccgcagggcgatgtagatcaaaatatgcctgtggaaacgggcatggcgacgacttccttaggttggttttttttttcatctcctttactcttccgtctggatcgacttgctttgttgtgttcttgggagagaagagcagtttgccttagtcatttacatgctgagcagacctcaagagtgcgcttgctgaccaagatcgccgcatccagtattggaggacgaaatttgaggtcgcggaactcgagaggattatgctggaagtgaagaaggatcaggccgtggaaacactccgaggtcgcgaggtgtggttcagctcgtatctgaagagttgttgcacatccatgacaagggtctgtagagagctccgagtaccccgtggggatcctgaggaatcggcggccggatacatctcgtggctaaatggggtttgcgcccagctcgaaggcatcggccagcgtatcgacgaggccctgaagcaggagtgccgtcgatcgagccgatatgccgggggcatgtattggcttgcatacgatatcattgtccgcagctgcacctcgagttcctccatgaagggttttctcgttctcggagaactcctacggagatagatggcctggcgaagtcgatggcgctgctggcggagaaggtcttccagtccatggactggcgttggccttcctggtagtcttcgtgtcctgtgacaaatgtcttagggaaaagtgtaatataattttggatttttacggaattgtaagaagtacttgtaaaataaaaaagaaatctatctaactaagctttcttactctggacatagtgtgtaagagtgtcttcttacttcgcaacttcgatcagtcgtttgagttatatactctccctagcccccaaccttgtcatcggagaattcttcttggaagataaggctcttggacctttgacctacctcggttgaacaagaactgatcctagcccccagccgtgaagttggaaagtta

SEQ ID NO: 16512 - DNA, 1295 bp, Oryza sativa
gctgatgaaagatttagattaggtccgaattagatccccggacatcactcttcagagcgtctagctagcttcagaatatatttggccttgcagcaggaatcccagcattgctcttttcaccgggaggcctaaaattttgcaggattcgcctcagaattcggcggtcacatcaagaatttctagccgcgatcgctgtggcctcgccggtgagttacaggtcgccaacacggcgatgccccaagagcattggtgcgaaagactgccgtgcagaaaaggaattttataaagcctcatggccccttttcctttcgccgttgctttcgtgcacagctttcgcccccgatgcgttcgcgacggaacggtgcaagaatatttcgaagccttttgtcaatgacaaaatcgtagaatctcttttggttctatctatctatatatataggtcactcggttgcacgagctgattaacggggcgttttggttaggagataattagacatgcggggggtttcggtggtgctcgtgctgatagcttgttggctgtgtggctgtccggtggccggcgaggcaaccttcgccggcgacatccgtgtcgacctgacgcatgtcgacgccgggaaggagctgccgaagcgcgagctgatccggcgagccatgcagcggagcaaggcgagggcggcggcgctgtccgtggtgaggaacggcggcgggttctacggcagcatcgcgcaagcgagggagcgggagcgggagcctggcatggcggtgcgcgcgtcgggcgacctcgagtacgtgctcgacctcgccgtcggcacgccgccgcagcccatcacggcgctgctggacaccaactgcgaccttatctggacgcagtgcgacacgtgcacggcctgccttcggcagcccgacccgctcttctccccccggatgtcgtcgtcgtacgagcccatgcggtgcgccggccagctctgcggcgacatcctgcaccacagctgggtgaggcccgacacctgcacctaccggtacagctacggggacggcacgacgacgctggggtactatgccaccgagcggttcaccttcgcgtcgtcgtccggcgagacacagtccgtgccgctcgggttcggctgcggcacgatgaacgtcggcagcctgaacaacgcctccgggatcgtcggcttcggccgcgacccgctgtcgctcgtgtcgcagctctccatccggcgattcttctactgcctcacgccgtacgccagcagcaggaagagcaccctccagttcgggtccctcgccgacgt

SEQ ID NO: 16513 - DNA, 1485 bp, Oryza sativa
tgaggctgccgttcgccaacgggagcagccccgacgacggggtgtgcttcccggcgcccgccgtgggggggggccgcgggaggatggcgcggcaagtggcggtgcccaggatggtgttccacttccagggcgccgacctcgacctgccgcgggagaactacgtcctggaggatcaccggagggggcacctgtgcgtcctcctcggcgactccggcgacgacggcgcgacgatcggcaacttcgtgcagcaggacatgcgcgtggtgtacgacctggagcgggagacgttgtcgttcgccccggtggagtgctgagagggcaccacgtgtcaactgaaaatcactgtagttatttttttttctttctactcctagttgactctttttcctgggccgtacgatatgcagaccgaatcgtggagcggtactggtgtcctatacgaacgacgagcgagcacacaacaataaaggtagccccttgaaaacacgtttaatacaggggttaatcataaaattttaaaccccaaaaatttgaattcaaatcatggttactgggtgaaccatccgtttcatatactcggcaattttaactttgatctagtttgatcacttctattttataaataaactggaaatatttaaaaatatattatattattggagtatgatatatgataaatataaaaatataccctacaccttgttaattataatcaaatgatttaaatataacattgctcaaactagagcaaacgcaagttaaaattatcaaatattatgaaacgaagagagagtacttgcttgctcgaataatagctattgtgattactcaatttaattttctttggggtttcacatcatttgcccacgaccttttattgcccaacgctgaagaagaatatgagtttagtttttaaaaattttaacgggtttttaaatctaggcctttcatttctttttgccaataaactacaatgataatatcaactcaaactcgtagtagaaccaagggataattatttctcctagtgatagaatttatatcgctagtaaaattactagaccttcgtaagatacaactaatccatagttaaatatatgccactattgattttatttttttttcaattctgaacactatttttctcctagaatatataatatactaataaaaatatatttgaaaaatatttataaagaaaaatctatccatttgatttttaagttttcaaactaaatattttgagctattaatggtcaagtttttgaccaaataaaattacctgcaacacatttaaatatgaagagattatgattttgatgtatgattagtcaggcggctcaggtctcaggcgaagaacttggaactctgatggagacatgaagcccaaggcttaaaaaaaaaacatacaactgaccagaacggtgttaggacatcactcaagtttgtattgcaaaaatcatagtatgattgtagcatatattt

SEQ ID NO: 16514 - DNA, 1878 bp, Oryza sativa
tcacataagcccaaaagaatttagctgggcagtaaataaaattttataccaaaactttattcatagagatttgtccaaaatccagtaacagaaacttgaaagcaaaatctcataagcatctctccatgaagagacaaagtaactaataagaaggtataaaagctgcaaggcggtcgattgaactgatccacgacggagctttccagtggttcacttcgaaagcttggacataaacctcttctttgcccttatctgaaaaatcagacgaagaaaagaaacatcagatgtgtgcaacacaactggagcacagtaaagcatagcatcgcaagagcgtactgatcaagccaatcacaactattccaacacacagtgagaagtgccgatatatgacttgataagataaagtcatcaacagcagatcaaaacaaagaacatgaacaatggcaagtggcaacctagcaaatgaaggtttacctcattgctgtggccacacttcttcttgcggcagttggtggacctgaggggaaggcgtgcatagcacctgcaggagaagacagtgcgtcggattcagcacacaaggatcaatcttatgaaagcattcgattcaagcgtaaatgcacatgaatcgatcggtcgagtgcgcgcgacgcgaagcaaatgtacctgcggcaaaccagcttgttctcgttgtacttctgcgcgagctcgcggaggttgggctcgatccccttggggtagccgcccctgctgccaccgcggaggcggagcaccaggtgaagcgtcgactccttctgaatgttgtagtcggccagggtgcggccatcctcgagctgcttccccgcgaagatgagacgctgctggtccggcgggatacctaacaggcagatttggtgttatgagaattttaaatttagacaaaatgcgatcatgaaatcgaagcgtaatacaattataatcctagaaactagaactgtcaaaagtacaaaaaactctccagatacagtttagatgtgcagaaaagcattggtttcttccgttacaagaccgatctgctgatctgcaccgtttcaaataaatagtagcgactaagggcctgattagttggcaaaaaaaatttttttgcccgtgcatatcacatcgaatatacagacacacatttaaagtattaaacgtagtataataataaatcaaattacagattccgccaggaaactgcgagacgaatttattaagcctaattaatctgtcattagtaaatgtttactgtagcaccacattgtcaaatcatggcgcagttagacttaaaagattcatcttgcaatttcctggcgaactgtgtaattgatttttttacatgtaatactgcatgcatgtgtccaaacattcgatgtagcagcgtgaaaaattttgtttgggaactaaacctgccctaaataaggcaacagggaacacgcaacgaagacgactaaccagaatgctatataatattgcttaattttctcagtaacaaacacaccgctacatgaacagatcgatctatcacttactactcacgtgcgatatatatacttgggcactgcacgaaacaaaatgagaaaaccttacagtttacacgctaccagggcaaaggacatgatttctagcactatatgttgcctaaacgcgatatatgcacctgcacggtgtgtgaacgtacggatcaacggagcaatcagcaataacatggcaacaacaagaagaacaacagttgaacggatggagaaatggcgaccaatgcgcataccttccttgtcctggatcttggccttgacgttgtcgatggtgtcgctgctctccacctccagcgtgatcgtcttcccggtgagcgtcttcacgaag

SEQ ID NO: 16515 - DNA, 1185 bp, Oryza sativa
actttgtgctgataatactccctacatcaaaaccacatatcgaaactgctgttcttttatttcccggcgaaaaaactgcctttttttttgtagctgaccaaaagcttccatctgcatatcactcactatatctttctgatttgctcgaggcatcaaacttggcctaattgatccggcgccttgtagacagagtgggacccagctgccggcggcacgaggccatggtctgcagccaggttgctggaccggccacgcagcaacgggtgaagtgaacggcaagctgatctggaaccatccgtaccgtgttgtctcgatcaaagcagcgcttaatccgtgacgttttggtcgttgataagctagtgaagttttacacgatgccgttccgttaaaacagatatccgcatgtgtcgctcttccgtgacattttcggtccctgattaagcttcgtcgctttcgctgaacggttgattttgactggaacatcacgttgttttttttaggagcgccatccattaattcgttcatttgagcttattataaactaacaactgtcgcttgctaacccccaaaagaatcaatgaatcatggtgcaggagacaccttgtgtgggcatgtggccggccgactagggttcagtggttcactacttcactcccaacagccgcggcatgtaggaggattcctaatgaatatattttgtataactacagaattttttttcagaactaattaaagttaaagatttaacatcgaatttaccatgaaactatatgcccaacacaaattaccataaactatagatttagtaatataattgtcacaaaactattacttcctccgtttcccactatatgatgttttgataagttactactccatccgttttacaatgtaagtcatttctagcattttccacattcatagcgatgttgatgaatctagacatatatatttatctagattcattaacatcaatatgaatatgggaaatgctagaatgacttacattgtgaaacggaggaagtataaaacatagcaacatttgtaatacaaaacaaacatattattaaaatatatttaatgctaaatttaataaaattaattcattgttgtaaatgttgctatacttttaatgaactcaaaaaagtttgatttaaaaaaaataaacgtcttataatatgaaac

SEQ ID NO: 16516 - DNA, 1475 bp, Oryza sativa
cctcctccgtctacggcggcctcaccaccccggactggatcagcgactccaacggcatcctcggcgccaagcccgacgccgccgtcgacgccgggacgactctgttcgtgccgctgcactgcgcctgcttcggcggcgtcgacaacggcctccccgcggtgtacctcacgtacgtcgccgggaagggggacaccgtcgccgcagtcgcgcagaggtaccggaccacggccaccgacctcatgagcgtcaacgacatggccacccccgagctcgccgccggtgacatcatcgtcgtcccgtgccaggtgagcccttttctagcttcaattcatagcttcttcttggatctggtagtttttggttttgttgctttgtgctaccgagatgtattgcgtggttcgttggtaattagatccatggccatgggtggttaaccgacaaatttggttggtaattttactccatactcagtaagaagtagcagtaggagtactatactgacagcgatgtgattagtctagtgtgtccttggtaatttagtgcaatgcagtaaccgcactggccacaagccttgctactgggagcatgagatttactccgaattctggatacgggcatgtgcagatttgtagtactagaatgcgtctaatccgatcctaagttgctatattttgggacggagggagtatctagctttgatatcagaaaggccatgtttagttcctatgcaaaaactttttatcctgtcatatcgaatatttagacatatacatggagaattaaatatagataaaaaaactaattacacagattgcgtgtaattgtgagatgaatcttttaagcctaattgcgctatgatttgataatgtggtgctacagtaaatatgtgctaatgatgaattaattaggcttaataaatttgtctcgcagtttacaggcggaatctataatttatttttttattagattacgtttaatactttaagtctatgtccatatatccgatgtaacacgccaaaacttttcatcctgtaactaaacagggccaaaatgcttcaagattcgtgaggtgaaacatgagtgccagcaatgcagcgcatcactgcttgtctgctcaaattgtttactagtgccagttcggatgctctgtttgtgtatctgcacgtactggcgctctcagctttaaaataaaagggtccatgcatgaaactttacctttccactgctccttttgatcatttgctgtcaattaagctgacacccaagaaaaggagatgaaaaaaaaggtgtagcatgcagcacgattgcacgacataaatttgacaattaagaatgttcaacacaaacttagagagactttaatttcactattgtgagaaagaaagtgttgtgtcgttttctctgttgtgaatagctgaaaggtcttctagagttcttaagtgcgatccatgtgtgatgcattgaaaaaattaacg

SEQ ID NO: 16517 - DNA, 1681 bp, Oryza sativa
ctgttatccctataccgttttctgcttcatttatcttacatgcaattaatcatgacggggtaccattttttttctctcgaacatgcagcgtgcacatcatcattcccggcgttcacggcggactacggcctggcggtggcgaacgggacctacgcagttactgccaaccggtgtgtccagtgcagctgtggcccaagcaacttggagtaggcaccgatcgatttcaccctcccatcttcaatctgctccagatcttacgcgaaccgagagatttctctcctgtttctgacgctgccgttgcccgttgctttgcttgcttttgctctgctgttgcagcctgttctgcgtgccggcgccgctcgccgactcgacgtgctccagcatgcagtgcgccaacagcagcatgatgctcggcaacttcactctcctcatgaccagctccggctgcagcgtcacgtcctgcagctacggcggattcgtgaacggcacaattctcaccacgtaattgatcagcttttttttttttgtgtgtgtgtgtgtcccaaatccatctcgcattttgctattcagaaaccgttgtctcaccgtagcgatacattttgtgcatctttcaggttaaccacagcactcaagcctcaatgcccaggtataaaattcgtgctcaattatgtctcagttcaccatttctgccttgaaaaaccgagactttatgcagctcttgcttttcgtgcaggtccgcatcagtatcctccgctgattccgccgccgacgtcgtccttcttcgagacgtacctcggcccttcgccgacgccgatggcatccgaagaaggcgtcatgtccggcatggcgccgacgagcaccccggcggcgagctccggccctccttcggccggccggcacgtcgtcgccgacgttcttggggcgttcgctctctgcctcgtcggcaacctgctgtggtaacagagcggctctcgccgttgatgctacataattttgtacagaagctgtggccggctgtgtttttgtcgggcagcgtcgggttgtgcccaatttttgttgcgttcattcgatttgtctgccactcactcctgtggaatggcaaacacaattacagaagcgcagatctctccagcgcggctgtaatggtcctgaattcctgatgctattgagaatgtgagtaccgagtagtgtgctttttatcgacgctttttactgtaccttctactactgatatgctttttagggcacccacaatggttatttataaactctctacaggagattcatatcagcatatttttctacttggaagatattaaataaagagagagagcaaaactgtttactaacttagagatagtctatagagaaaaacgaggcaatacatgagagagctatagatacccatgtagacatactattgaggtgatttactattaatctagtctattgctgagatgtacatgttttatagagagcaccttactttactattacgggtgctcttatatgcgtttccccaacgctaatcatcaatcaataactctcctaaccccactgtttttctcatttttttaaattctttttaggctatcttatattgttttacacgtcgctgctaatccctcttgctccttgcgcgtaagggggcaaccgcccataagcggtgcgctggttgatc

SEQ ID NO: 16518 - DNA, 687 bp, Oryza sativa
ccgttttggtattggttgatatttcacaaaggttgcaggcctcttgctattgacaggtgaaaactaggatctcgactctaagaaattgttagaaactagaaacttaaatgcctcattcaggtttttctgtgataaatacttttctattggtgcagatgagtgagcaaacatggatggtgatggtattctgacatctcaatgtgaaccagtcaaccaggtcggtattctattgcatcctttttccccttacattgtctactcgatatattggcatggttgacgatttttgatactttagattgctgattttcagtacagagttgatcgctaatccatgtcatggactctaaaagcaaatggtaagcttggtgtgatgcttgctttggtagatggagctgagttcttcagtaatagatgtgttcatggccttcaggtgaagtatttctagaactaattgcactgctgcatgttaatattaccctaaatttctgaactacaactctctgtcatttgaggaaccaaaattcaggcattgctatatattacatgtgattaaccgagtcattttttctgccatatatgatatattcatatcaagaattttatagccttaaattttctcttacccacgcaatatagattcggtttagcccatgtatgactatgatttgaagactgcaaatcgag

SEQ ID NO: 16519 - DNA, 1216 bp, Oryza sativa
actgaagatctatatctgtggtctactacagctcaactgttgtaaacaatacctgtgatgcatcgttcttccaaagtttcatagatggcctttgcattaaatagtatatccatatctttttttagtgaatagtacttgcaattttgagtgtgtgctttccatctcataaggtttccatgtttcataatgtcctcttgagtttaatttgagttttcaactattggaggaactataaatagcactagctaaatatgttgcacacgtgattcatgtattcagctcctttactaccatatataagtttttggcacattggatctatgattttgccacagcagggttaaaatcaaattgctctgagagaattggaccttggatttggatatccatccagccaggtcaatagtatgtgactcttaggctccaaaaaataattggcggtgatagaacttagattatgtcaaaaaatgacgaacttgtacatttttaatttttcactgtaagtagttgaaggtgttttctattttttttcttcgcttcatcattcaaaaggtgtaatttcttcagtattaccatgttttttttagggttcgctattaccatgttgacatgagtactttgtaacatggcaagttgagagttgaatttcacaattgagagttgcttacatttgtaatagttttagtaattttggaatgaacgtgcagcttggaatgtataatgttttttggtttgaaatgccaaatatatatgtatattggtttattaaaaaaacttcaattccatttgcacactctagatatttgcgacgcttcagttatgtataattttagccttgcgcgaatctttttgatagattgctggagctaaagcacaagctttaccctttttttcgaataagctagaaatagcgtaaaaaggttagtgttagaggtttacatatgttttgacttgttattcttgtagaattgatagtcttctaccataatgcaaattcttgtagttgcgtgtcttttttcatgatttaacctgctacacgaacgtatcaatgaaaaactcacatcttctgatgccactggcgcggcgcgcaaagcgcgcgttcacctctagttttcttttagaatataagtatatttggtatcttttcctctggattgaatcgcctccctcaactgctgactcaaacgagtcaaccgccgaacattgtctgcagaaa

SEQ ID NO: 16520 - DNA, 1408 bp, Oryza sativa
tgaggttattgtttgattaggacctaattgattgaattgcgtataggctagtgaagtctgaatattcgaattgaaacctttagatgttattttgcggagtgaacagcgtagtgtcatggtcacgttatctgcaatgtactatttaagaaagaaatgttatggtgagttgattgtttctgagataacaagttgtttgtggatgaatggagacattaaacttcatgctgagcagatatgcatttaggcaaatgcccaccgacatctccaattccctatgatgtagttcagctaggatgattccaatctacccttcattttgtttattctagttttcttgcttttggattttaactgccatgtataaaccatattagatcgagttccatcttcctgaattgactaaaatgttgattaatctgaagagtttaaatcatccagaaaagccataacaatgctttcttttggtggacattgcttttgaatgtttccatgaagttatagacacttgttctactgaactcattgattacactaactttcctgagtttaaattgtcttaattttggactaatatatcatctttggactttgtttctatgatccactacatagtgaatgcatgactgacatccatgttaggatgctacattatattttgcatggttaattagaatcctgtgtgcaatgggagacagaaggggaatttaagttgcctcaaaatattccctgcatagtgtaccagattgtaaccgtactacaaaccatgtttctcaagaagacaagttcagtgcttgagctagataaaattgcttcaagaaatattaacaaagctaagaaagttttgaacaaagtgaatctcagtatctaggcatagactaggttcacccaagccctttgtgctaagaaaatgtaccacaaggctgaagactttctcatctatgttcaatatggagcttagggttttagtattgtggatcatttatttgtgcagaatcttgaacttatgaagtatactctaaactaaaataactctttagttgataagtgctaacgttgtactttgtgcctttgtggtagcatttaattttccctcagcaagtcaccacaaaagcaatttgtatctccaaatcaagcacattttatagacattttctgccacaatattttaagcctctttgcttcgtttagagacccaacagcccaatcaaatacacttgcaaatggaatttgcaacgaagagatattttctcctgatgctgtactgtgtctttacaatggttcttaatttgcagggtgaagctttggctttttgtggcgtatgttgtctctttcgtctgcctagctggatcagtgggtatgttggtgcaaaatgccttgacagacaaaggcccttctgtgtggactggtg

SEQ ID NO: 16521 - DNA, 1974 bp, Oryza sativa
aaaaacgaagccgagcggatttctaggcgcagcagactttacattattcacgaagctgaactgtacaagaaaagtccatcaggaatactgcagcgctgtgtatctttggagaaagggagacaattgttgaaggatatacattctggtatttgtggtaatcatgctgctgcacggaccatcgtcggcaaagcttaccggcatgatgcggacaagattgtgcggacatgcgaaggttgtcaattttttgccagacaaactcatttgccagcccaagagttgcaaaccatcccgttgtcctggccatttgcggtctgggggcttgacatggtcggcccatttaaaagggcagtcggcggttacacggggatccttgtgggctatcgacaaattcttcaagtggattgaggctaaaccggtcatcatgatcatagcagataaagcttgagattttttcatcaacattgtgcatcggtttggggtacctaatcggatcatcactgataatggcactcaattcactggcggagcatttaaagacttttgtgaagacttcggcattaaaatttattatgcctccatggcacaccctatgagtaacggacaagttgagcgcgctaacggcatgatactgcaagggatcaaagcacgagttttcgaccgactacgcccctatgctggcaagtgggtagatcagctgtcgtccgtactttggtctttacgtactactcctagacgggctaccggccagtcgccgttctttttggtttatggcgcaaaaacaatgttgccgagtgaagtggaatttgaatcactacgatttcggaacttcaacgaggagggctatgaagagggccgagtagacgacatcaaccgactagaagaagcccgagaagcagctttaattcaatcgactcgatatttgcaagggttacgtcgttatcataatcggaatgttcgatcgcgagcctttttagtcggtgacctggttctgaggaaaattcaaacaacataggatcggcataaattatctcccttatgggaaggaccgttcataattgctgaagtcactcggccgggttcttatcgactcaagcgcgaagatggtactatcatcaacaattcttggaatattgaacaccttcgtcgattttacgcttagacatttcgtttgtatctttcctctttgactgctaacttcaagtttttcctcgaagttttcagtcagggggctactataataataatggagtgtgatttttatcaatttaatttgcttacttgatgtatcattgccctgtttgatttcttggcttagtcaatgaggactgaaagttttttaacaacttttgcggattttaggctcaacaaggtttgacaaaaacttttaagaaatcaggagctaagttaagatatcaagcacaacataaattcatcagtattgtacaaattgtgcctccatcatcattaatcatcaaaattatcggtacattaatcagtatcagtcttttcatcatcagaattatcaggaccagtcggtcgaagatcggtgtcctgaaatctctcaactacatcagcagcaattttgtcagccgatttctgcgcatcactgatgaggtcaagagcagcttcttcgctcgtcccgtctgcaaagccatcaatggcgtcaatatcaactcttggataaagggatttagtcatcgccaacgccagacttgctcccatacttccagcttctttgatgttcttgaaatatgtattcggagcgactctcagcttgtcgaaaatttcagaagcatcaagtgcactcgggccgttgttattgaagaacatcgcttgaacaattggggtagcagcgttagcaacctcatcccgggctccttcaagttttttgatcttgccaaccaggatgtcgaattgagcttgagatttgatcttgcggtctgcatcaacagattcacattaatgattcagcat

SEQ ID NO: 16522 - DNA, 3630 bp, Oryza sativa
cttagttcgaaattggactcctagagctcagcaatccgatcccttagatcgtgttcgttcttcttggcaagttctctggcctcgtgtagttgactcctggtggcttcgagagttccgagatgagggactaacttctctaaggttgccgttttggcttcgttcctgagatgaatcctctgcaagacagtttaattagcgcatgaattaaatggcaaacaagatggttgagatcaagtaccagagaacttacatttacaatgcgagtcgcttggttgagtgcctttttcggtaggcagacctcttcgtcttctttttgccggtttattacaattccttgaggctgcaagttatcatcccaccacttgaccagaatgggagggcacgaatcttcggctgcttgtatacgggggatttcttcttcatcaccaatcattggtcctaatgtattcgctgacaaaggttagacaattgatcagagtttatttgggtcaacatggtttcagacaaaagtgttttcccgtaatgatttctgaatgagaacgagtggattcggatgcccttaaaggagatccagatctctggttattgctggcgttttgtccacgagggttgtctgcttgggtttcgacttctggaatctcttggtttggccttgcgtccgactggtttccagtcgggggctcctgattaactccggcttcggcttcggccaactgggtttcagttggaggtggatcaccggattctacatgatcggttgccggctgattgtcactcgggtgatccccaacagttggcccggtttctttggaagaacttgtgtccatgttagtcgggtcagagtctttcccagacgggtctatatcagatggtttcctacaaatttgattatcagtattattgccgcaatgggtgtgcatcaatacaagagggatcgttatatgagttgcacctggaagacttcctgatctttggcgcagggcgactggatgttttcttccttggagtagcctgttttggtagtttcttggtcgtctctcggtcttcaggcctcctggtggtatcatcggcttcgtcgtcgcttagaaccagcttcctctttcgagaatctgactggccgactggatcagaagcacttggttgagtttcagaccgaattcttggtcctccgctcccttgcccagtttggtggcggggagatcggcgttgagcgattgggggatccgacttcatcaaagcaaattcctgggtgtaatatccttcattgttaactgattcaacaagaaagcaagattatattttgagaaaggtcgaagtgtatgaatgcgtaccggtggaggggggttgaatgcattgaacggtacaactggcagcaagtgtgagtagctgacaacgatggcatttgaaaagatcttatacatcctttccttcatgaccttgaagtcaagagaatctgggtcttcacggtttgggtcatgcttgccgtcaaattcgaaggctgtacgagatctttctttgattggagctaaccgacacttgataaagtgccgggtgatctattctccttgaaggccctgttctttcagctttatcatcctctccatcagttctactgcttgtgcggcttcatctcccattggcagtgagttccaagtatcccgataaactggaggaagacaggagtactcgggaaggacaggctcggggttttgaacataaaaccagtttgcgtgccagcctttgtttgaggtcttgaagggcatggagaaatacttttggcttagcgttcctctgagttggaaaccagcgcccccaacaacgcatggtttgctcttgttcggctggggcttgagaaagaaaatgcggcggaacaaagcaaaatgaggcctaatgccctgaaaagctttgcatacatgaataaagttggcgatgtgaactatgtagtctgggttcagatgatgcaggctgattccatagaaattcagaattccccgaaaaaatcttgaggttggaagggagaaaccgccatagaagaagtgagcaaataccacgatttcatgcgtatcgggagtcgggaatgcttcgccgaataccggtcgccacccaatgatctccttcgctggaagaacgccgtgcgccaccatctccttcagattatcttccgtcacatcggagggcgcccactgactctcgaagctttctctttcttccgccatgaatgtgaactggatggtttgatttggttcgagataaggctggaaagagatgggggaatcggtgcggtggacgcgcggagaagtttcgtgggatttttgagaatggattggggcggattggtgaaccctagctccgtcggcgcagtcttgtactgtagcgaggaatggggaaatggcgagagtctcggcggggaagacgaagcgtcgcttagacttcggtgttttgttagagtatcgggagtgctaatgggcctgggcctgtacagtacttcagcccaattttatttccagcgtggcccgttgtgatccttagggacttaggcactttttgctttggcaatttgtgctcacaatgttgtggcccaatgctgattaaatcatttttaatgcggcttgctaattctttagaattaacacgatgcaaacaaaaggtgtctgacagaaaggtgttataccgtttttgtaagctttattaggctgcaaaagctgtttgggttgatttgagatgactggtttattcatagtcattcttttagcatgttatatgcttattttagttatggtaagggtcacagcctaggctattagactcattaattaccatgattttttatcatgtttggtgaatcattttaagagtttcttactcggattcctatcaaatatgtctatttttggaccttttgagtgttcatcactcagcccttcttgtattttctgtccttgatatgttcaagttgagaagtagtcggctgggtatcttactaagtaccatgcgtgcttcgctgtaaaaccactcggttcttgactatatgtttagtttttcaactaatcacatagtcgggggctacacttaattaggtgcatctactcgatacaccatgttttattttcgcccttcacagtcttttagcactcggcaagccggagcaagttgaattgaagcactcggattattattttttgtttcgagaagactgttttggtcgactgcgaaggtctcgggggctactgtggagattatggttaccccatatctacatggcagttatattccagctggatatacagtaccaaatatagatagaatatctttatgaggactcgggttagattctaaacttgtatatcaagaaagtacctgggatcctagtcggttacgattgtattttatctgtaatcccatattccgttaggatatggatattacggattccttcccctatataaggagggtccgtgtgcctcttggggcacgattcttttttttcccaatcatcaatcaataacccactcggcggaatcatccccggacaggagtagggtattacttcttgaataagaaggcctgaacgtgtataaaattccttgtctccaaacccatccactttcctagctcgatagccaccccttt

SEQ ID NO: 16523 - DNA, 2467 bp, Oryza sativa
tgaacaaggaaattatctgaagtagagtcggctaatggatacaaatgtattgaccccctccggaccaacttcagatcaatatacagttagataagccccttttgtttttttaattctgtgatgtggacagtatgaaattatgtaattatcttttgacggactcaaaatcttatattctgaatgtatgcatcttgcagctattaccaagatgactaaaagtataaggggcaagaaatgttcatctcgtcagctcagatcacataatcggaggctcttcagccaatgcaatttcaagagagttgctaacaaggaattggcagcaacagagaaatgtgcgtggaaagattcaatctgtccagtttgcttggaatgcccacataatgctgtccttctactttgttcgtctcatgataaaggttgtcgtccatatatatgtgcaaccaattaccaccattcaaactgtcttgatcaactcatagattcgcggagaagctcaaaagattgtgaggacctagactccatagagcttacatgccccctttgccgtggtgaggttaagggatatacattggttgaacctgctcgggaacagttgaaccaaaacaagaggagctgtatgcaagatggttgctcatacatgggtagttatggagagctctgcaagcatgtaagaaagaagcatccttcagtgaagcctcattctgtggaccctgtacatacttacagatggaggcgacttttattccggagttcactgcaagatatgatctgtgcaacgagttcaccaatggtgcggagggttttgtatgttatgttgcagtttgaggagttgatggcatctgtttggcacgaaggtcctcatggagctatgcaaatcaatgaaatgaacttggctgatccatgatctcaacctcactgaaatgtgagaatatcttatgctgttctcgcaatggggtcagtgatttgagccatgctgatccatcatgtgtgacctgacacagaaagatatagcttttttagttttctgttcttgagggaatatttgtcaccatcttcagaagaaacagatcctatcctatgctgccatgaattcaagaaacctggtcaaattgtgggtggaatgtggaatggcgttgaaggcttttgttgatactatctcattgtagtcccccctttgtgtcgtgtgatgaattgatcctgtgcatcccttttgcactgtattgacattacattctattcggaaatgcagagttcacttgctcctgtatgttttattgttcctacctcctcagaaggtacccatatatgtttgttgtttatgtcgcgtgacagattggtgtatactgaagatgaaatttgcttaaaggcctcaccgccaagctacgcgtggcaaataattattcgggacagataattattgtactggtctctccgatcggtttgtcgagatggtttagattagcacgaagaatatgctttctgatctgaaatagttccatcagatggtcgctgtgcagttctacaggcagtcaagcaacacttgcacttcgaatttcgacgcaccagttcacgtaaatggcaaggcctttagagtttagaggaactttggaggaaatgaatcgtttcatacgaaaatcctgtaaaactcctgcgttccaagaggagacctaaacttcgttgatcctcccaacgttcggatcactatcagaatcgtcctgtcgctgtgcagtgtggcgccaatggcaattgcaagcttggagttataagtcaggactaacataacttccagtcaatatgatgaaagttcaggggatcaaaccgtaagacgagtgaaatgacggttcaactaatcaaaggagtgaaactaagctaaagaatatgagctcgagcaaaaacgcaaacactagtcatgcactcagacacgtcatgatctgaagaatatttagcgcaaacgaagttccgcgtgcaaaggagggattttaaaagaaacatacggttcaaaatcaattcagatattcactggtacgcacatgcaacaccaatgatatagccttgtagcattaaggatgatccagctaggttcatatatatcataatatcaatacctgcacatctgcataagcatgtcaacggctgccggccgcatgtcatactctcactggaaccaaatgggacaacttgacaatcatcagtccacgaaactattggtctgcaccaagtgacaaagtttacagcataaatatcaaaccaaggtttctctccaaggttaacttaaaaatgatagttaaactcagggaggtatatatgctcttcacacaaatcataagtttagatgatgatagagacatcacatttggtaaatcatatctccccctcaaaaccatgtctgaatcatggtagccctataatgtgttgataaagcatacaccaattttttgttatcaagtaaagatagaggatgtaattc

SEQ ID NO: 16524 - DNA, 1173 bp, Oryza sativa
caaaattgtgagatggaagaagaaaggtatgtcaaacaacttcatgcttatctttgcaatttttttcagtcatcttgtgtatgcgctttgcaaattcttttcactatgtgtgtacacaagtcatatacttgatgatgatgtttttctatatagagagaggctactgccatgtatggtcccccatgttggtatggaattcaaatgttcagatgaggctgggatgttttggcatagatatggaggtcaaaaaggctttgaggttagaaaaaggtacacaaagaaaatcagatggtgaagtaacatcatataggtttgtttgtggaaatgagggtcatcgaggaaatgacaaaagggatcatctaacaaagtgtcctcgagctgaaaccaaaactaattgtcaagttcgtatgagtgtagcaatggacaaaaagaagggaaactataaagtgtctgagttggttcttgaacacaatcaccccttgcacttgcatgaaaccttgcacttgatggcctcgtaaaggaaaatttcagatttacaagcttttgaaattgaaacagcaaacgattctggaattgggccaaagacggcatatgagttggctagtcgacaagttggtggatcacataatctaagctacaacattcgtgatcacaagaactatttgcggagcaagcgccaaagggagatggcatatggtcaagaaggtagaactatttgagaactcaaggatggatgcttgctttcgctataaattcctctcccacaaatttctcaacttggcacaacaagctgctagctatccagagtgcaccttgttagtaaacaatgcccttgacaaccttagcaagcaaattgaagagcaactcagtggatgtgctagtatctcggatccaagtataactcacacggaggttacgcccccaaacaatttgttgagtaatgcacacctaaagaaaaaggatcggaggttcgtgttagaagttcaaagcgaacaagaaattggcttgataaaaagcgtaggactaggaccagacaacaagggaaagggaaaaagggaaaaagttcgaggtatgttatacaaaaagttccaacactatgttactattcagtactatgttttatggatcctctgatactcttttctttgaaggaacaaaataatgggggagatg

SEQ ID NO: 16525 - DNA, 1395 bp, Oryza sativa
cagaatggctttctcaagaaacggaagagatttcaaggcattaactaagtgaatggatttgtctgaggaaacttctcaacatagaactcagtcacatggcagatttgcatatataatatataaaatctccattatgtttagagcttatagtatacacgccttggcatataacattatcgaactaagtcatttaattcttttaaggtgtttcaaatatatgaaggttactatcaatctttttgtcaatcaatattcaatagcaaaaggaaattaatgtatcaatttaactgtggatttttttatctcaaaagacataacaagacaaggaatgataggtagaatggtataaagtccacaacaagtttagttgaatcttgcctgtatggactctttttaaatttctcagcaacagataatagcagctcaaggtacttgtttcttccttcggcctttgaatccaagatatctggaaggaaagatacaaagcaaatggcagcagaagcacatttctcttccatggcgtcctacagaagccaaaccacctcgtcaaaacatcaatcccagaccattgtctccacaaaaggataactttgttaatatcacgaaaacttactgggccagtcaactcagaaacttcaggtggagcagcattggcttccaactgctccaatgcaaaggactcgatagcagaggcaactctagccccctggtaagggaatgggctctccttatcggcaccaaataccaaaatagtaggaaagccttctaccttgtacttgctcatcaaagactgcaaaattcaagtcacacgttatgttacataagtggtacttgaaaactaggttgtatagtttgacaaatgttgtacagaacgcacatgaatgctttaaaaaggtcaaacattaactgggttttataaatatactgatacactgcctgaattttctgcctaagttcatttaaactcactcggtaacttttatcaactgaccaaacacttgaattagtattctagaaaaaaaaacataaaacttcaatcatagtacatcatgttaaactgttaaagagacaacctaaaacagcacaaaataagatcccaacaaatgccttagataaagttaggccattgctttccttgatacagcattttgtactttcctatgcatatcctgattgtgtccctataaactagagtgctaaccctcagtttaattttattttacaatacctttatcaaagtcctttgaattgatgaaatatccaatgcattgtcaaatttcagtttataattttgtataaattatttgcaaacaagaaatgcacatacaacaaaaacttatgaccaaatagaaaaagggcaagaacctttttagcatcacaatccacatgacctag

SEQ ID NO: 16526 - DNA, 3718 bp, Oryza sativa
aaagatataacgtagctaaaaaatgcctcttggtcaataagcatgatactgtaaaattactgtaaaaaaaaatatatgtctaaatatgacagagactcaaaatcaccgcactgcaggtacaatggcaaaggtacataactatctttcactcttgcttgccttctctcaggatagatgcctttatttcatttgatgagtgactaaattttcagttagagaatctgggatacataacctaattttctgattcaccaataaacaatgttgcatcagatattgtaaagttgcacaacccattggcttccacggtttcgtccttcataaaagtatgcatttcccacatctaaagtcacatatacacttttattggcaataaactaaccaaggccgctctcaccttcggatcaaaagaaaaacagataaaaccctaattaacaccaattaaaatgcttaattcgttcaatataattcaaaatccaggttattttttttaaaaaaaagagaacagcatccaatcaccatgctgaaaaagtgaaaaaataaataaatttactgtatgaaatcaacaatgcaccacattccatcaatattaatcccagctacagcattttaatatgcattaattcggtattgtataactcatatccgatgttaatgccctcctttaaaaaataaaaacgacgcccctttttgatcagtacgtgtagacaccaaacattgatcttcccatatttcctccaccaaacaaatgtggcattgtactctctgatactgagagctacacaaaaaacccataacaggtgtaacttttttttttatggagtcgagtttgcacattgcatatacgcagttatgtcctagctcgatcaaattacgttgacgcaacaactgatgcagagatcagatcacaccaggaaaaggtagatcagccaatcccaatgaaccgagatgccaaacaggacgtttgctcacctgcgcgagctccttgtgcgcgtcggcgtcgagcgcggcgaccgtggcgacgcccttgaggacgcccgcggccttctcccaaatcggcgtcagctgctggcagtgcccgcaccacggcgcgaagaactccaccagcaccaccccattcgagttcagcacctgcacccccaaccgaaattcgaactcagcgagagcccccaagtaagggaagccgatccggagacggaagggaagagtgtgaggggggagtcgatcgagagaccttggatttgaagttgttggggttgaactggaggacgggagagccggcggagtaaagggcggaaaccggcgaggccgcgacggcggcggcgacgaggaggaggccggcggcgaccgcggggcgcatggcggggtcgagaaggttctaaaaggagtggagaggggaggaggtggaccttgcgatcggcgccggggtgcgactgcgattttaagttcgctcgcgaggaagacggacggacgcgtgtgcggaccaatggagagcctccacgtcggattcaccgccacgtcggagcagtttggctcgcttggcgtgaggggattggccagagagcgtggagtttgtggactcggagcaccgtgatacatcggatataactgggcccacacacgcttggaggtggtcccaaagttcagtgagcctaggctacactcagttgtttggaaacacgatgtggccattgtggccggtgtgatggaatgttcacgaatacaaattctcatacggccttgctagctcggaaagtccgttgactctccctcaactatactgagcctgattgtcatccctcaaccgtgaaagtgaaacagatgtatggtcttcctcatacatcaaaaccgacttattttacatgattttatcgacgggctgaacccacctatgagatatttgtaaagtataggaattgttggtaccaaggtatacgcgaaacttgagcaaaagagacagtagacatggatttttatacaagttcaagccccttaattgacatatctaaccctacttctggtgactgaaccagtgctgcctttatatatatcaatatcacatgagtacaatatttgagatgatctaatctattatctatcaacctaatgacgtggtgctctcacatgtgatcgacggttagcgtagtctggttcctcgaatatgaactcgatgagattggagatagctctagctagatcccttttgtcggcctatgtggctccatattggcttttttaaggcttgcctttggtatattttggtttgtcttggattggctagatccgtcttggcttgtcttcgcctctctcgatggtcttgtatttatacccccggatgtccccttatttaagtagaactagagaactaacggggtcatcgtttaacttatttagggaataagctaaacggtgtgtttgcaaacaaaaataatttgttaataaaaactgttatatacgtgttcttagcgatctaaaagtaaaggctagaaaataaaccacgatttaaaaaaccccccaaagtgaactccaaatttaaggttaaaaattcaaattttggcttataagcatatgcacaagcgaaaagataaggttgtaagtgtagatataatccgagtggtccttatcgtgccgaagcgggactatgtttctcttttcttatccaaaacatctaatgtatatgaggcttgattgcttataaaacttagtatgtggtaggcttcactgagcttaacacaagaattattaggtatgatttatccataacattgacatatttgaacagtggttttgtcttacatggcgcctacatggcatgttgacctaacttcgaacaacgtgggacccacatgtcagtaaccaaacatcttcttttctactacacacaccctccttactctcgtccctatgcaacagtagaagtagctggcaacaaggtagtgcttgagctcccggaaggtggtagtcgagtgctctctctctcctatccggtcatagagctcgaggatagcgatgggcggagtagtagcaacaggctagcttggctccttggcggcacaacatcagctactgtcaacatttcctcttcgccattatcaatccgccacctcgatctaggtactgcccaaggctctatgcctagatctaacatcgtcgtcgccgccaccgtcttctaggagagcttgagctcaagcttcgctaacgctgtctcctcctccctaagaagttgatagaagctggcgagcatgagctggaaaagctggcaaacctcctcattgagccattgtctctccttgcctcttccgccctaaggggaggcgatgaggcataggaggtaggcaagataggttcccgccgacacgagctcttccgctaagtcggcaacgaagaagggggggattggtgatgccgccattgccttgttgttgatgccaccaaagatgcaacaaggcatcagaaaaaaggggaggaaaaagagaaaacatcttacattaacacgtggagcccattgccttttttgttttttcccttgctaaatttgtcataatagtggagaaagctccaaatcacatttgacacatgcatacatgcaaggctgcgtctgtgtctgtagcatgcacgtagtgaggagaaaggctggcgcatgcatgcaagcaggagcaagcaagctagctgccaaaatggcatgacaaatcaatactttctctctcttttaatcaaa

SEQ ID NO: 16527 - DNA, 2371 bp, Oryza sativa
ctggtaattgggcaacatatccaatgcacacaggccctcacgtgtacatacgtgcacaccaactaaaaaatgtaccaaaaaatctagaaaaaatcatacacatactttcaattgtattacacctagggttaaaatcttaacgtcaaattcattatattttagccgtaacaaaaaaacaaaaaatctgacagttttaaggttgcaattttgtcagaattttatcttttttgttattctgtatgtagaatgaatttgaagatgcgactttgcacataaatgtaatactattgaaagtacatgtataaattttcctagaattttttgtgataatttttagttggtgtacacggtgtgtacacgcgagggactgtgtgtataggatacgctccctggtaattgatggttagtacatcccaattgaatgctaatggctgaaaagtctgctgcttgtgccaagtcttctaattagaaatctaatcttcttgctttgcttgaaaaatcattacatcggttgattttactgcggagaaatcaagcaacctttccatggtttttgctcccgcagcccgggccactgcccgcccaaaccgggcggtgaatccgccgctgcgcgtctccatctcctgactctgatggaagtatggaactgatcccggtgacggccgtttcgttggctgctgcacatggcctcgccttgcttacaaaccctcccgttgtttcaatcaacgttcatttcgaactttgtcgacctactgctattggtacttctgctggctgaaccgctgaacttgtgtactaccttcctccctaaatgtttgatgttggttagttcgattttgagccttctttaaacaacttaaaactcatctagacctcgaggagaatgtgacatttttttcaccttatgatatattagagtataaacttataggatgtaaatctttgggttattaaccttcttgcgtttgttcggtcgaattatgacttctgaactgagatccttttgtatctgttcctttggttcagatttcagagtagtatgacttgtaggatcgctactggatataattttttttagataaatatgacaagaacttcgataggcgaaataagcacacgctcgcgacacagatctctaaatctcctaccctagcttgcgttgattggaagggacggagagtttgaataatattgcatcattgcaagctcccctcgtttccatacccaaattctctgctccatggccaaaccaccataatttagtacatgagatgatgagaatgaggtgtatacaccccattaatccagcagttcgctcaagcacaagcaaagccctcatgtcttcagggtcagtgtcgagtcctacactcgtgcatggacacggtataaaacacaaacccaagaagccttgtatctcactacattctacatcccgttcaaggtagtagggtagtagtagcatttgctgccgtgatacgctctctgctgctccagagaatggcaagcatggcggtgttcttgctcgtcttgctggcagcgcttgtttccgtggatgtcgccgcggcgcattccggtggcggcttcggcttcaaggcgacgcttacccacgtcgacgcgaacgccgggtacacgaaggcgcagctgctgtcccgcgccttcgcccggagcagagcccgcgtggcggcgctgcagtcgctggcgacggcggcgaacgcgatcaccgcggcacgcatcctgctgcggttcagcgagggggagtacctgatggacgtgggcatcggctcgccgccgcggtacttctcggccatgatcgacaccggcagcgacctcatctggacgcagtgcgcgccgtgcctgctctgcgtggagcagccgacgccctacttcgagccggcgaagtcgacgtcgtacgcgtcgctgccgtgctcgtccgcgatgtgcaacgcgctctactccccgctctgcttccagaacgcgtgcgtctaccaggcgttctacggcgacagcgcgtcgtccgcgggcgtcctcgccaacgagacgttcacgttcggcaccaactcaacgcgtgtcgccgtgccgagggtctcgttcggctgcggcaacatgaacgccggcacgctcttcaacggctccggcatggtcggctttggccggggcgcgctgtcgctggtgagccagctcgggtcgcccaggttctcctactgcctcacctccttcatgtcgccggcgacgagccggctctacttcggcgcgtacgccacgctcaacagcaccaacacgagcagcagcgggccggtgcagtccacgccgttcatcgtcaacccagcgctgccgaccatgtacttcctgaacatgaccggcatcagcgtcg

SEQ ID NO: 16528 - DNA, 2260 bp, Oryza sativa
tgagattgatttataagttttacacccaagaacttataaatcaatggtcgagatcactttcaaagcgaggatagtaaaatagtgtcagtagagagcaccatctcgaaagaactatcaagactgaatttataatgccttgaaacattttctaaaacaactctactccactgcagctcgattatctatatattaccttgtcgtcttctcctgcaccagatcagcagcaactgatcagctgatcggtttatggaactcaaaaaactaatacagttgattgtggactgtaaaaagccatggcaatgcacagtttgactgatggcttagctttgggaacatctgatgttcagagattcttaccttgaacacctcgacaaaaaaaagtgaatgactttttatcacattagagttcagtttttgcaagcattgagatttgacagcactttctcaaatcgagaaatatgcatttgtaatgcaaatgcaaaccgtgtttatattttcaaaccggctcaccactcaaaagattttcaaaccggcccaccactcaaaaaaggcttaaactgtcaccaaaacaaatttggaacaaggcagatataattaaagcccaaaatgtggaaaggaataaaacaatggcaattcctctactctttattgcatggttacttcatctgcctgcccattaacagcctaaggtgtgtgttcttcagtaatgtgatccatttatatacatggttatataactccacaaagtaaggtggcaacatggatctgctggatgcttactacttttacataacataccccctatatgcactgacaagcaggttggatcattaaaacaacaatctggaattccagtaccccatggataaaaaactccttggagtggttgaatgcttgatccatctgcgtaagtgaatgaaagaatgtgtctcactctcgcttgccaggggcagcagggctcaaagacatttcgatttcctcaagagaacgtcctttcgtctcgacaatgaaattgtaggcgaaaagtgctgacaagaaggatactccaccaaaacctgcatagacggctccaacgcctaactttttcacaagctccaggaaatacagtcccaccagaaaattgcatatctgatgaacaacccaatccataagtattgaattagacaggactaataaactgcatatcttgacttgaagcggcaatgtagagtacatacaaactacacactacacaaggagagttacaaggcgattttatacagttggaaagtgcatacccaatgtacagtgaagctgaagcccataactttcgagcgtgtccgagcaccactcagctctggtatgatgattcctgtaactggtccggctccaatggcgaatgtaaatatgtacctggaaatgtaaagatgaataaataagtgagataaaaaaaatcggttagtattaactgttccataaacacaaaatgtgtgagacctgatcagttgccagatcatgaagtagagtataaatatgctagaaaaggatccttaaaattgtccatcagcaatgcaaaggtgaatggcttaaattatccatcagcaatgcaaggtaaatggcaaactcagaaattaaacacgtgaattttccatattccaagcaaggattttgattcacagcaatcataaatagacctcaaagcaaaggttccaaaaaagggacaccctttgtagtaacctctgtaaaaaaacagctatcatgttcaacaagtaaaattctttcaaatactaattacaagtactttaccagggaacattgtatcatagcaagtggaatgaagaatatgaaaaagaaagtaatgcagaagtacatacaacagagttccagtaattgacaggccatggctaactccttcatcaagggggaagctaatagcatatactattaggaacattgcaagtgcctgcaaaaagtagaaaagttgcatcaggttttgtttaaggactacagcagatcacaacaatatttccagaacagtaatcatgctataaaaaattatatactcatcatagcttacacttgccataactcctccgaaacaagaaaaacaatgcagaatttactcaactataaaatattatattaaaacttcctgaaaagcatcggtagaagcaatatataccattccaagatagcttcctgtcaagagtttctttcgaccttgcttattcatcaaaattgaagcaacaattgcccctgaaatttggtccatgagcttatg

SEQ ID NO: 16529 - DNA, 1194 bp, Oryza sativa
  unsure (1)..(1194): unsure at all n locations
aagagggtagantctctnctactgcaagcagttcatcaccctccttgtcctggatcttggccttcacattatcaatggtgtcggagctctcaacctccaaagtgatggtcttcccagtcaaggtcttcacgaagatctgcataccaccacggagacgaagcaccaggtggagggtagactccttctggatgttgtagtcggcgagggtgcggccatcctcgagctgcttgccggcgaagatgagacgctgctggtctggggggatgccctccttgtcctggatcttggccttgacgttgtcgatggtgtccgagctctcaacctccagggtgatggtcttgcctgtgagggtcttgacaaagatctgcataccaccacgaaggcggagcacaaggtggagggtggactccttctggatgttgtagtcagcaagggtcctgccatcctccagctgcttgccagcaaagatgaggcgctgctggtccgggggaatgccctccttgtcctggatcttggccttgacattgtcgatggtatcagaagactccacctcgagggtgatggtcttgccggtcagagtcttcacgaagatttgcatgcctcccctgagacggaggacaaggtgaagcgttgactccttctggatgttgtagtcagcaagggtcctgccgtcctcaagctgcttgccggcaaagatgagacgctgctggtccgggggaatgccctccttgtcctggatcttggccttgacgttgtcgatggtgtcagaagattccacctcgagggtgatggtcttgccggtcagtgtcttgacaaagatctgcatgccaccacggaggcggaggacaaggtggagggtggactccttctggatgttgtagtcagcaagggtcctgccatcctccagctgcttgccggcgaagatgagacgctgctggtctggggggatgccctctttgtcctggatcttggccttgacgttgtcgatggtgtcagaagactccaccctaagggtgatagtcttgccggtcagagtcttgacaaagatctgcatgccaccacggaggcggaggacaaggtgaagggtcgactccttctggatgttgtaagcagcaagggtcctggcatacttcanctgcttgccagcgaagatgagacgcttcttggtccggggggatgcccttcttaatcttg

SEQ ID NO: 16530 - DNA, 961 bp, Oryza sativa
cgcgtgaacgtcgactcacgcagtggcaatagcggatgatagtgcttgccgggcagagtcctgacaaagatctgcatgccaccacggaggcggaggacaaggtgaagggtcgactccttctggatgttgtagtcagcaagggtcctgccatcctccagctgcttgccagcgaagatgagacgctgctggtccggggggatgccctccttatcttggatcttagccttgacattatcgatggtgtcagaggactccacctcgagggtgatagtcttgccggtcaatgtcttcacaaagatctgcatctgcaagaaataatcaccaaacagatagggtaagaactagcacaagattaaggacacaacaacggatcaaacagcaaacatattccaacagaacatacatgtattcaaaaagatagtaacaggcacatcacacatgtattcagataggtagtaacagcacacgtatcctgaacttcagaaataagtagaatgaactagtggcaataatcttcacacagatagtaaaaagaaattaccacaatagattatatagatgaactacagattgtaacatgatattactacagattgtaacatgatattctaatatagttcttagcataaattactggcagatagtaacatgagatcattatgacagatatagcgacaagacttcctatttaccattgacaattaattaaaagagttcatcattatctaatctgtgaacatatgaaatcaaatcgaaacgcacaagctacataattgaaccatgtgtaagaagaactaccctacagatctacatcaaacacaaaacagatgtaacatattaaagcctgtgtttgcaccaacccatggcaccaataactcaatcaagagcggaacagtagatctgaacatgctcgcaacatggcctacaagatggaacacgctacaaatcgcaccaatactca

SEQ ID NO: 16531 - DNA, 2359 bp, Oryza sativa
  unsure (1)..(2359): unsure at all n locations
cgcgcggtganctttgatgtgcgtccgtctgcaagtagctcatattccttaaacacatcagctctagtatacgggcgatctcctctatatatggttcatatgtttgctgaaaggaagttagacatgacgaaaagttgttcatggtagtccaaaccacaacccggcccaaattgaaaagataggtttaagggtgatccaaattgagacttaggtaataaaaggtggatcaaagtgcaatttactttttttttactgtaatttcttctggctggtttgttggtcgccgttaggaccgggtgacgccgtcaaccccgcgcctccgtatttgctgacgtggggtggcgcgctggcttccgccttgacccgaatttgttttccttccgttaaaaaaatggttttccttttcttaaaaaggaaatagtttgttttttaagtctgtgtattaggattattacacttgaattttggtatatgtgtaggataatttactgcatgtttataatagagttgtactatagatgaaataacccaatttttggtataattcgtgtttggttggaggtcaaaataacaggttattttgtgaagaaaaaactccgtagtatagtaccatatccatcatgaatacacatactgcctagacgagtgattaggatgaatccatgttatattcctcaaaataatataaaccacttgatcttatgatcttatccaatctgttcatataaactggagatataagatggtgcatttcccttttgatttcttttgttgacggccatgagataggtttgcatccactgcatttatatttcggaccaatacaatgcacctattgatacatggggacagctcaactaaccatgatgcaaattgctggttggtgaccagttcttggcattatgataatgataggattaaaaaaaacagtgcaatgtctcggaaagaaaccatgacaaagggtacatgttgcattccagtttctaatgataaaattatgtgccagcaattcaaaaatcatgcgtgttccctacgcaccattctttgcaataaacaagtgcatgcacaatatgattgtgctaagggtcaagaacttgttgcagtggctaagttttggataagaccaatgaacaaacagtactagtagtttgttttatgaaatttgcatttctgcagctgttttctaacaatttcatacggcagcctatgctgattcacttggacattgccccctccataattctaatctttggttccaaataaaatcatgtgtaaccaaactgttgtagtatgaattatggattggtgtccttttttttccctccggactcctattggcaatgtaagactatatgaagtatcagatgccactcggttggagatttaactgaatttgacatgaataggcaagatcacacaaactaaagtgctccagaacaaaaacatgcagattaggctaccaacaccagcctgaaactgttcatggacttgctgcatacaaacaacacagtatataccatgagccctacaaggctatatgaatactgctgagaaagggagaaaaaggtgaggtaagaatgtagaaattaatagatactgtaaacaaactgatattccaatactaccatcatcttgacaacagcttgcttaaatcagaaatccacagttaccaacagtaatataacaagagttaacttcaacagtatttatttgtgcaacttaaaagacaccataggaagccttgaagctatcacccctatgctgaagtactgaaatgagaggaaaccatgtcgttcactcctttttcccgactccatgagacatgttgtacaccccacggccctgtttataaaacaagaaacatgtcactgtctgaacgtaaacaagaccagagaaaacaagccacgcaggaatcaattaaaagaaccccagactcactatcataaacaagctggaggcggcaagagcgaggggaatggcaacggaggtgaccacatcataacgccctttcagatacgtgtgcttggtcaagttctgaaaatactgctgctgcttaaagagcctctcgcgcggcaaaaacggtgattctgtcattctgcatcacaacagaaggaaccaagacaaatctatatcaatatggaaagaaatttatctttcttatggacatttttgcatataaagaaaaacatacagaattagtataattactgtatttgactttgagaactaatgacactagaaatcatcactgttttccttaaactgcttacttagaggagtactaactaactgctatgcagccatatataagttgtgatgaactacttgcaatcgagcacgattgcacngtgcacggcgg

SEQ ID NO: 16532 - DNA, 46797 bp, Oryza sativa
  unsure (1)..(46797): unsure at all n locations
aaagggtagggtttccgtcctccgatctacctcacctgccccaaaatactcatccgcagctcggatccacaccagagttcggcttcttgcatgtcgggctcgctgnttttctttctttctttctttctttctttgggtggggtggggtggggtggggttcatcatctcctaatttcatggctgaacatggctcatgaccaggattttatagagttaacagttagtcactcacaatcttcaaatcacaaaacctaaaaaaggaggtctgaagtatcaagtatgcaacaaagcatgcatatgttactaagcaacattgtatcccaacagtcttacacctattcaaaattacatgacctcaaacatacatgacaaattatacacctagagcctaccacttcattcctacaagcataatacaagaagttgacttgggcccaaaacagaaacaggttcgtcatttgtcaagcaagattgggccacaccaatacacaagaatattttattatgtgagcatagctgaacaatttctgcggggttctgaaaatcatattggcatcagagtcaaccaaagacaaacagatgctaaacacatactggtacagatcccctagatgtagccacgtcaccttcttctcccctttatggtgaacaccccttcctccatgcacgatagctgaacacctctccctctatatggtgttgcataatttttcattcacgcaatacatctatcacattttatcggtgaggcaatgagttatatattcgtaactaataagacaatgaataattttaagttacggcataatgctattttgtaattttcactgttgatcagctaatgaaatactccctcccttttatataagagaaaggctcttttgtatctaagaaaaaggagatagtactaaaattaattcaattgcagtaaacattagtgtccaaagtttctgagaaacaagtatataactactaatatgttgctgtttccagtgtgatatgttttcacacaagatgttccttctccaatcaaggattggttgtcaactattgatagagccccagaagctaataagatacagattacagagtggcatgtcaaaaggcagtataggtcccggatgcatcatgcatatagattgatgtgttgcagcggagtaagaatatcaggatcgaaatgatgtgtgacccgctagaaatcaaccaatggcttagatcagctgaaatccaccagattgatttggaggcaactccagggcatctgcacccaaactgatacagcgagatacacatacaaaaacacgcgagaaattccatccacgcatcaccaaaaaaaaaaaaaaagggcctcagattaataacgctccacgaatcgcgcaggtcgcaccaacatcaatcgcgtcaggaactcaagaaacacgaacagatctgctccgccattaaaacccctcctctctcaactcccaagcctcccaaccatcacatcgaacatcgaaacaacgaggcggaaatacaggaggagggaaacaccgcaccttgagacggaggcggaggaggagtacgacaacggattgattggacgatccttgcagcggcttgggggattttggatggatcgcggcgagaggtgaaacgaaatggggggaggaggaggcaacgacgaagaagcaggaacggcgaccgagtcggggaggagacgtcttgggaggaaaatgggccggattacttctggcccaacaccaaattttgggccaataataaggcctagtagtactatcaacagctgagggcgtgtttggttagctgcatttaagactatggctaataggtggacgattagctggtatagacgtggaagaggaaaatcagatgtgagagaaagaagctggctcctttacaatcgtccgcttggcatgagcgtctaggtgctttgacaacctagatccacgtcaagagatgggagatagagtgtacactaaacccacataatattaaaacaaaatattaatactagaacaagtgtgtagagcctgctataatataagatttagagccgatggtgggctcctatattattcttgatctaagggtggctcacacctatgtgtgacagttatttggttgtcagtatgaccgtcggggtctagttccagcattccattcatgcgaaacaaacacctgatccaaaatcgctagaaacacgaggaggtgagcttcgttcctcatgtaggttatgctcgtgcaggcaccaggtcggtgtaggaggtgagatagggtcacacattgagtcatctctctttctccaaatgctagtttgtgcctcccaatttgttgtcgcctccatcgtgccccctcaccagtggatccccttccccctcctctttggctatttgtagtatacggtgaaccacaacctcacaaccactagatctgatggtcgtaagttcagtactattggatctggtagtcccgacctcagtttggataaaacatatgagccaagctaaaggcattcgggtaaccaaacatactcttaaaatgtcatgaattttcatgtggggaataaattgattcatgtgaaatttgtattaagggatggttaggttctctattctataaagattcagcggcaccgttaccttttccctttaaggttgcgttcgtttgtgtcggttgggagtctatccctccggcacgaaaaacggaacagcttattatcgcataattaattaagtattagctaaaagtagctttaaaaatagattaatgtgattttataagcaattttcctatataattttttttcaaagaacacatcatttagtagtttgaaaagcgtgcacacgaaaaacgagggagagggattgaaaacctgcaatgccgaacacaacctaagaagggcttgatttctattagtagagaaaatgtggccaacatttgagcccgattttattagcattatcaaaaattgtgtttgactaaattttgatgaggtgtttagtttggtattaccaaactggatcaagaaccagaaaattgctcatgccatctctactagacgtctttttattgtgatgcttctaattaaactgatggatcctaaacctcttaaaccaaccgtgtcatgtgactaagtgacaactaacaaagatctctaaccagctaagttccacaaaaaaaaaaggtgatttttttatttgaaacgatacgcaaaaacaagaataagccttcagaaaaagaaagaaaaaatggagccgatttgcctgccaacagctgatccaagcctatcagagctgatcacacatgatgatcatgccacgattgacttgcaaatttaacggttatggattggtaggtgcgaggcatgaccggatcctgtctcattggcgtccatcatttcccaaaatcttatccagccaaatgtttctctcctctcctcttcatatcactgtatcaaaatgcatatatgattctaaatttctaatctctgtacctatcctaatccgacaggaaacagcttaattatcctacacttacatgcctgcaacaccacagaaaaaaaataggccaaaatgtattgaggggaagggcttagctggcctcttttctgtgccaagaaacaatgcatctctatctatagcttgcatatatcaacatatatattatttttatatggatcataatggaggtttctttttgtgttaaaaagttcagaaatgaggtgttcattgctgtgatggtttaagggtagattagtactagtggatacatcagtaagcaaatcagagaaggctgaccaagtttagacagattacagatggtagacacctgttatttctgcgtgatgaaatggcaacttgaattttttttattaaaaaatgaaatgaagagatacttcagaaaagttttgatgaagagcaccaggttaattctgatatattctgataacagaacgatagtgatgcctaattttccttgcgttgtgtttttaattagcttgcaagtgatgttattatctgatacacctccagccacaaatggatatttaatatcaaatggtaacacaagcaacctctagtgattggttgcagcttggtggaaaatttcatggtgtgtatagaccctagaagataaacaaaacttgttcataatacaaaattaagtcatcaggatcaggaagagatatccagagaaaaattcaaacacatagtgaattaagtggaatgggacagatcatcatccaccaagtgtaggaaatacgtttctttgagccatagaagataaggcactgaagaaagaggtcatactagttccatttgaaatgtctgcatgtgttgtgttatattgttttcttaactaacaagcttaggcaaaaacaatgagcaagcaatgacaaaaaaatccactggttttcttctttatccaatataaagatatgcagccctcctgaaagttctagacaaaaatgtgatgtaaaacttcatctgttaaagataaaattggatattttttaaataagaagatgatttgctgccatgtcagtaccacctaaaaagagccattctatgcaatgatccttaaaagtactaggactatactatacatctgatatgtaccatatcatctattacagagttaaccagcctattggcctgaaatctttcaataatatacctacccatttgagctgcaaagtttgtgttttacttgtttgcatgacaagtcaggtgtaagacggaaaaacttgaagcctgacagttaatatttatatgaaatcaccagtcattttcagggaaaaattatgcagacaccagcctcttaggaaaattatgcaggaaaattataatattttcgatgttagttcccgttgtatggaaaacaagatctaagtacagctagaacagtgcaactgcgcaagttgttttttttttcagcaaggcttgaatggctctcaagagaactaaaatataaaattggaagagggggaagaaggtgcagccaactaactaacttgtgatcatatttaagcacttgtcatgctaccctcacagaagatttagttcctcctctgcctcttctccatctacagaaaactacttgtgctaatcaagttttatcttgtttcttccccatctctttcttcttgttgttcttcagactgaacttagtctgaagattcagaaataaagtgtgattttcaaagctttgctagttgcaaacgagacactagctttggagtttggaggtaagctgctgtgctttccttttgccatatgcgattcaaaatatatgagtctgtagcacccaagctaatttttttcttcacattggtaatgaacattgtcattcatgatgtagggagatcttgcttgtggagaaactcacaaatggcgataaagatgaagggaatattcaaaggcctgaagataatctctcaaatgttcggtaatactcctatctttctttgtttccctatatctctgcctgcttacattacttaagcttgcattttgttgattctggtttataaatccagattcagattcaagaaaatgtagtaaaagcacaataagatagtactgtgtgtataaccgtgagaaatcacagaaagtgatcaatgtacaacaataagtttataacacatggtttctttttcttttgcagtgcataaggagcatgagatggaaattgggtaccctacagatgtaaagcatgtggctcacataggtttgggcaccagtgacacatctccaagctgggtaaacataccaatacttgacagccttttcatcagatgatcaactactgcattatgatttatgaatgttttctgtttatgagttttgcttcatattctagtatttctaattattggaaatgtacatttctcactttcagatgaacgaattcacgggaacagaagatttatcaaccggttctctgagcacaactgcaccatcaaggcagacttcttgggcctctttaggtatttaatgtcctctcatctttctatgtttatccttcaaaaataaagtcaatacaacatatataaaggttaatcaaacaaaagattctaaaatatgaagttccattggtgcttttgaatatgccacttgagccatgcctgatataaaacgtcacaatcatccatagtagtctaattggtcctgaatcttcagaactaatcatttattactatataaacgttggaaatcttcttgatctattttctaaggacaagtacttcagtagtggcacaccacttacaccattttctttttaggttgcttgcatgtttacaaggtgcaatgaacagatatacagaaaaatcatcaaacatggtatccaaacattcatgatgaccaaataatattttttatgcagattttgaacagccaagaagcatgctgccaattgagatcttgccggagaaatctggccaggaggcaccctcctgccctgacatcccaagaggcccaaggaaggtgagaaggaagaagaccagaacatcatcacctacctcatctgcaagatcatcgtcctcgaggtcaagaacctcgttcgcaaccgcatacgacgcattcaacgaatcgcaaagagggtttcgggttgcctgaaatttacagattgtgtttgaaactaccatgaattgtacattgtatgtcggtataggaagagaattgattgtgaattgtttgattctttctttttctttcttttcttttacagtcaagacatagttggaaatgcaaaggaaaatggattaacttaatgtttgaagttgtgtgcatctcaaattttatacttctgactaattcttcagattcttttaatgattggatggcagtcggcagatgttagacttcagtagtataatattttttccccacttcagattgtggattaaaaaaaaagttttctaacatttttcaataacatatcaatataagtaagcttgattcacatcatttttttctgaaacacatacagctgtgagggggctaataatgccattgatcacgacatgcaaggaccaagaacaattcgactaactttttttctacgccaagttgccaattgccaagacaaacgtgcaattgacatgatgcaacgtttcatcatgcctcagcactttgttcaaggactgtaataatgtgatacacagctgatctaatcatataaaaaaaacacttggaaatatcatcaatctttatatctcgtgattatgcactgcactctgctttccttgcatttgggcaaagcataacctgagcatcaagggcaagaaccttttgctacctatgcaaccttacaaaaaaaaagaaactttttgggagtaaattaatcccatttttaccctgacataactattcaggtcttttgcgttgatcaacttaacctgaccgtgagtgcaatgctaagagcaaagtcatggccctgcgttgaccgacgtatcacgctgtgccacgtgtactaactaaccacatgagagtgatttgacccaaacaatcactacattggaaaatgacttttttttttccatgtaccatggactgactcacaagccatgaatattccagtgtcacctggctagtcttgagctctgctgtgaatgtcaggtaggcaaccatggcattgcaacaagcacaagagacagacaagaacacaagatggaagtaaaggtgaggtgtcatatgctttggaagctaatctcaaggtgtccatggaaagcaaagtacaccacagcttgtaaagctcccagccattgaggcctacaaatacccggctacctagcttggcctcttctcatccaccacaagaagtgaaaagcttcactgagcttgatcaattactactagttaattacctatagctaagtagtaaaaaaaaaactagctggttttggtttttgttgcagtgatcaatggtgaaaggtactagtggttacagctatggccttgggcttgcctgctttgctcttgtggttgccatggctggagctactcagctcaaggtcggcggcggcaatggctggagcgtcccggccgccaatgcggagtcgtacaacgattgggccgagaagatgaggttccagatcggagacaccctaggtaatcaattgattaaattcgagttctttgcgacaaatattattccatgcatttgtgatgaagcttttgaggtactagctctgtttaatgttacgagtcgttttgactttttttttaaaaaaattacaacctctttagcttcatcaagtttacagaaaaatatattaatattttcaacatataacaaataaaaactattaaacatattcaatggtagagttaataagactaatttagtgttataaatctatattttttctataaatttaattaaactttcaataaactggactttagaaaaatcaaagcgacttataataaaggaaagtagcgcatgatcatgccggatcatcatctatggacaatggttgcagtgttcgtgtacccgaaggacaaggactcggtgttggtggtgaagccgcccgactacaacgcgtgcaacacgtcgtcgttcgaccaaaagttcgccgacgcaacacggtcttcacgctcgaccgcgccggcgccttcttcttcatcagcggcgtcgacgccaactgccgcgccggcgagaagctcatcgtcatggtcctcgccagccgcaacggcaccgccaccgccaccgcgccgtctccgcccccggcttcgtcgaccgcgccgccgcagacgtcgcctgcacccgccagcccgccgccgtcgtccccgtcacctccgcccgcttcaccgccgtctcccagctcgtcgggcgcggttgttcggagaacgccccggccgggttgttggcttccttccattcgaaggcaaggttggcttgcccaatcgggttggtccccgcgggcccggcaatggccaaacgccccaagcgcccaggggccaagaaacccaagcgcaagttgttcccgccggcccccgggaaagggcccggcgcacccccggttgcgggcatgggccttcccccccggcatcattggttacgccatgctcgcactctgaagtctgaccatgcaatcagtgcaaaagtgaagctgttgtaataacttgaattaatttggagggagatgatttgtgtactatacgtgtgtgtgtatgtacatcgtgtgtttgtattaattcgttttccaaaggatgaataagaacaaaatgatatcgagcatttgtgccaaaatttgatgtgttcaaatccaaatattaacccttgtttttttatttgaaattcgtcgccggctgaagtgcaggcaacacggcgcgtttcagccgacgggggcgggtacggggattcaatctccgatcccggataaatcgttgggctgggccggcccagttgtactttccagcccgtttgtgaaccgttagatggtcgaatccatgacctcatgcctaacaacaaactcttccagtttatgaaccgtcgttagatggtcgaacccatgacctcatgcctaacgacaaactcttttcagtttaaatgtcaaaaaacaaactcctttcagtttatgaaccgttagatcatgtggagattcgtgcaggagtctgcatatggctggggtcgacccacgacattatgcctaaagacaagctgcattaaccagtgagcctcgtgcggatttttctgttgattttatagcagttacatataggttagttatagtaacaatatactccctccgtttcgagaaatatttgacaccgttgactttttagcacatatttgaccattcgtcttattcaaaaaatttaagtaattattaattcttttcttatcatttgattcattgttaaatatatttttatgtaggcatataattttacatatttcacaaaagtttttgaataagacgaacggtcaaacatgtgctaaaaaatcagcggtgtcaaacattttgaaatggagggagtagttaaaacggacatacactccaattatactacagctacatttaactttgcatttgaaagttcttcataaaaaaattgttgaatgttgtacaggtactcccaattaaaaaatcatcaagaggtcctttgaaaagagtgatttaggttgtgttagagaggaggggttgggaacgccgaacaccacctctccagtatgcaaaacgaagcacacattagcatataattaactataagtattaattaaaaaacttaaaaatgaattaatatgattttttaaagaaacttttctatacatttttaacagtttgaaaagtttatgcgcgaaaaatgagagaggtgaagttgggaacattaacttaagaacataacttttctttttggggaatacagttaagaacacaacttatatgggaaataaatcagctcatgtaaaaatagtttcaaatttctatcctttcatccgaaaatataagcatttatatagtttttcacgtgggttaacgagaggagtgaaattaaacgagaatggccggttgagatggaaaagttggtagagaaattcaataactgatgactgtgaatgattgatacgatgtagtaggtgaagatcttataatctaggataaattttaaatgctacaaaccattgtatcttggaactgatgcaacgcaattgcacgccaactaacgagctgattttctaataaacaagtaaatcatccatcatcgttcacccgcatttcatctacttcaatctacattgttccacccaaattcaaacgtaacttatgatctctcaaatcaaacaggtattatagtttctggtgtttctctgctaataaatcaggatcagactaaaatgatctcacatctttaaaaaataaaataaaaaagagaggcctcctcctgctctctcccgacaaatgacattggctgtcaggcagcctgtgcccaaatcaagaatcatattccggtaaaattatccagcttagccccgagtattattctgtccaactttccaagctcgatcggcaaagcatcgattcgaaaggcgacgcagttgacgcgatcgacgggataaacacagcatgaaaagcgatcgagagcccccagcacatgcccctgcatgcctgcacgcccgagcaaaacgttagcttcagcaaggcaccgtgtggcctacagcttgtaaagcctctccccgatcgatacgcctacaaatacacgcgagaaacctgcaacctgacgaaaccatcaccaaaattcaggcatctatcgacagaagcaagatcaggttagtttgttcgttgtgcatggcagcaatggcgagcagctgcagtgtgcttgttgtggcctgcagcttcgctgtgcttcacgtcgtcgccatcgccggcgcgacgcagtacaaggtcggcggcgacggcggatggggcgtgcccggcgccggcgacgagccgtacaacacctgggccgagaagaccagcttccaggtcggcgaccagctttgtaagtatatttacagttagctgctttaagattcagccgttattatttttcgagtgcacggcagatacatactatatacacatagtgaggtgagaatcatcaactataatgtcatcatcattacagtcactagtatataggttctactcttttattgtcccacatgtcggtgtctataataataatgtcattatgatagagaatatgaactcataaggacagacccagccctcggcccctaggtcatggcccggaggcctatggctgaacacccatgtaccttttttttttttgcaccatgatgataaaaaattcagtacacgtgcaacattacagtcacacttttgagtctatagcatatgcgcactgacacataccacaacacacgtaacatcacacttacacaccatgaatgtaccgatcttattgcgacatgttaataagcattttttttaatgtgtatgctagtgttcgtgtacccgaaggacaaggactcggtgttggtggtggagccggcggactacaacgcgtgcaacacggcgtcgtacgacagcaagttcgccgacggcaacacggcggtcacgctcgaccgcgccggcgccttcttcttcatcagcggcgtcgacgccaactgccgcgccggcgagaagctcatcgtcatggtcgccaacgccaccgggagcagcgcttcgccgccgtcctcctcgtcgtcgccgtcgtctccctccggtggtggtggtggcggtggcgctccagccgggcaggcgccgccgggtgctccggccacgccggcggggacgaacagctcgccggctaacggcggggcggccggcggcggcgcgaagagtggcgctgggctcacggtggcggcgagcggcctcgccggctctctgatcgccgccattgcctgcgtcgcgattgctatctgaatatctgacactttgcaagagaagatgccgtttattcgtttattcagaaagtgaattcttctgttcgtttgatgtaaaggcaatgtaccttttagtttgtactacttgttattttcccttgtattgtatctttgttttttcagacaaaccattataaactgaagacatgcaattctaacatgggaggacctaaaaaaactgccacaagtttttggaataaaaaactttcggatataattaaagtgtaattacgttgtaagtacattataactacactataacttatataaaacttgcatttgcatttgcctatggtttggttagttagcattgagatatcttacacatgacacttgtgaaaatttccaatatctttgtccttggatagcggcagatgtaaaagaactaaacttctataagaagttaaataatgagaaactttacagaacattttcacagcatatatggtcatcgagcgcctattctagccccagaacaaaggtaggatgcacgagttttaggtagcttaggtaggatgacaaacacggctagcttaggtaggatgcacgagttttaggacctcagagagaatgaatcacctcctaatgctagcttaggaatgactagttctagtacttcatataaaatgaaaaggaaatgctattcttctgttgacagaaaatgcagtgccaaatggatcaaaattcaactttgcagtatatcgccagaggccacacccacatcgtaacatgtagaaagcatgcgcagatagcataagacaatccaaccatattataaggaaccacgaaggtacacatattgggtttgttaagcatgaaaactggaaatttccttgaaccaaaacatagcagccgaattaacttgacagtcaacaattcaggacactgagcaaaactaaatctctcttcaggaacattgggagctatgagactatccaaagaagagatgctccatggcgacaagttggctgacaatacatctacagcctccttcctctcctacctccctttctgcgggtgctgtccgtgggaaccggggtcacatcctctgcaaaaaggatcagacatacaatcatcacaatgtctaaggaggattgaagcataatgagcctgctacaaacactatccacagcatagatgaaacaaataactatctctatatccttaggttgtatgagtgaaactctgaatttaccaatgcgaccaatcttcatgccagagcgagcaagagccctaagagcagattgagcaccaggaccaggtgtctttgtcttgttgcctccagtggcacgaagcttgatgtgcagagcagtaataccaagctcctggaaatgttcaacagaattttaaaaatacttttaaaaagtcactcaagaactgtccatctgtccaattgagagataatgtttccatacaaaccttgcaacgctgtgcaacatcttgagaagcaagcatagctgcatatggtgatgactcatcacggtcagctttgaccttcatgccacctgcaagaattcagggaatggtcaatttacctcatcagtaattgcagctagagaaccaaatgaaataaataaacacaaatcataccagtaatgcgaacaagagtttcccttccagacaagtcagtgacatgctgcagaggaaaacattggtaagaaactgaataggtggttagactagattgaaggatatatataactggaaaaagaagtacttacaatgaaagtgtcattgaaggatgcgaagatgtgggcaactccgaacacatactctccttcacggacagtgggtccaagagtgacgttctcctccttgggctccctggtcttcctcttcgactggaggacgagtaacagttaagctatggaatgagaaggaaccagctacagctacataacaattacatttctacatgccaagttgtgacaaaactaatttatgccataacctgccatacaagtaggtgtgcacagtacactaagaaattttcatgcctctcatcaagtaaacacagagaccttcctacatcatccaaatgttcactacaaaacatacttggagtatctatcaaaaacagtgaaacacccttgcaacaattacatttctaaacatcatcaacacaaaccagaccttgttcaacacaaaactgcgaatcaaacgccacaccaatcatgtgctagggtcatacacgacccaaaattagaacagcaaatcagtgaaacacccttgcaacaactaaacaaccatttggccatcacatcccagaattgatacaaaccctgtaataataatctccctaacatgccagatgctctagtactaagttacagctctacaaagccaactcgcagaccgtgcgtgctacacaaacctagcatcaaagctgcaaatccgggcaggaatttgacccgagatggggaacagggggggactttggccttaccatggtgggacgaggcggcggagatcgaggcgagcgccggtttcctcctggtcgttgagatcacgagctcgccgccgccggagacacgagagaagagggaagggtggagcagcgagtgagctttatatatgggcgcggcggcgcgggggctagggtttgctgcggaagcagcggtgtccaactctcccgctgcaagtgggaccaggagtgttatgggctgggccaagatgttgtggacggcaattgacggcccaggttagcccatgctgtaggggcggatgggccaaacaagcagagaataattgggccggtcaatgtgtgcgctattttttgaacaaaaatttcatagagccacatctttacaccgataccaaaatttgaatctgaaacataattttgacgttgattttaaggtttttcatagtttttttaaccttgatgtttaagtcattaaaaataaatatgtaaatgtttaaccataatttttttatcagtaatgtaccgttgatgtatttactagcaattggccaaccatgcaacgatagcctcacgaatgattttagctgaatatgttatttacattctcagcaatcactataagatatacatatgtttaaccgtttgttttatttttttttctaaaaaagaacacgtagctatcattttgtctcattgcgagttgatttattattaaatatacttaaaacatgacctacattttttttcatatttacccaactatcgacgtacgtccaaaaggcaataatatcatctataaaaatcacttgtctcgctgttaaatagtcaccgtatatgtctgtgtcgtgtcgttgtcactgtgtggtgaatatatggtgatggatggaaaccaaaatgctctttcctcgtgtacgacggtgtacacgagtacgtcgccttcgtgcatgtgtgcccggcagttcacggcatcgcgtcgcaatcgcagccgtttgctccacaccacacaacacacattgtacggcgttgctccgtgcgtagcttaggtaacctaccctgggcggccggagcccgcctccaccgggcgccggacacgtcgccccggccggcgccgtcgccgtcgcggcgctcattaaaccgaaaaggcgccgccgcgcgccgcccactagctcgctggggagacgccgacgtgcgcgcgcgtgtcgcgcgctcacgcggcgcgggcgcgcgggcggcattaactccgccgttgaacgctagcgcgtcgcgtcgcggcatggcgcgccaacggacgccagccatgtgtgtgtcttgtccgcgtacgtgcgcgccgctggtgtcgcacagttgtgtgatccctatctcaccgtagcgtatgaactgtatgtacagtagctacctgctactagctctgtataaatacatgtactgcctcaagctgggcactgtaaaaccgtgcacacttaagcccacaaaaatcacaagctctcgcagtgtcactagccactagtgtgaggttacaaaccaaagtttttttttagttgtgtcatggcgaaggcgcaggcggcggcgaggatcatgacggaggtggcgccgccgcagctggtgtcggtgatgcggcggaggaagcaggtggcgaggagcctcgacacgatcgccgaggacgacagggagctgatgcaccaggtgccctacgccggcgacggccaccaccacggcgtcaagaagcaggctgcagcgaccagctcggcgagcaccttcgccacgccgacgttggccttcgagcggcagccaccgccggcgccggcgccggcgccggcgagcgggttcatgagggggctcagcaagtggttctccaacaacggcgtccacggccaggaggggtggccggagatcggccgcgaaggtcaccggcgagccatctattcacagcaggcgcacatacgtgggcgcgccacgggattgaattcaagttcattaactagctagtcgagtttagtacgtttatcaagatgagatgtacccaagtacccatatgcttagttatgatgaattacggcttaaaacaattttgtctccttgacaataataatatttgcaagacatagttgtcctctgaaacaaggtatgaactgttacgtaccaacaagtcagcatggtagagatgtgtactgtcaatctgtcacagcctagtatgtctctgtagtggtcaagggaacataaccaagggagatgcgtgccttttattttactatcacttggaacatgagcttccatgtacaatgttcagttcttaattacactgcactagcatctaatacgcacctatcgcgaaagaattttgctcacccagccgacctagtaacaacaccggagagacattatgttacactcaaatgccctaacgtgagcaactagcggtcgagcaccaatgcaaaactatgatgcatcggaagcgtctatgaagtgaggatattcgtatttaagttttttgtcctgaatcaaatgaaaaacatattgtaccactagtttgcatcatataattgtggattatcatcagctctcactcctgtttgaatctatctcctccatatgatatgtatgtacaggtatacaagagtaacaaactgttctctcttacatttactgctgataacctgcatagttcaaaatagaacaatcagtattatagtaaaaaatcatggcaaagtacagttaccacatacaatttgtttggcaatagaaggaaaaggatgcatacaccagtgatatgagggcttctgtagtatactaatgaacattgccgaatgggcaaatgccagagaaaccaagcttatgacttgaacaaatatcctctcatgctttctccaagcactggattgaagggctgtcaaagagtaaaccaagtcagaggccaaaataagttaaacattccattatccaaatgcattaaacgaaaacctgaagcaccagggaaaaaaaaaaggaaactacaggccaactgcagccgaatatgaaagatgctctcccataaaagctgcaaaaggtttattgcctgtagggatatttggaacttggaagcaaagaaatgggaaggtttttgagaatattactcctgaagaggaaggttggttcagaagtattaaacaggatattctcctgcatttgtgtaggatgaatgagtctcttagcccttcgattctttcctggttacagcagttgtagttttgttttgctttctttgttggtttgtaaatatttcctctactaggcaaggcctggtagtattttcctttaaaaaaaagctgtaaaagtaagagaaggcaccatctagctacagggagaacaacatgtagaacagactaatgaagagcaggaagctgcaattaaatctaaaagctaatgatgcagtttagacatcctggaaatttgggatgaaaacaaaaagaatggtagaaaacatttgacatgatagtggtaagattttcttaagcccctgccattaccctatagctgttgacttgttgtatacaaaattataaaacaaatgaagggctgaccttttgttgctcaaaacatgtagcagcaagctcttgttgatgtttctagctacaccactaaccacccacagaagattttatcttgttccgctgaacagtgccttttcgaattaaagggttttctattgaaaatacaatcaaactgccatccttggttcctgccaagaagcactcctctggagtcacaactagtgaagttatagtcttcccagctccctcatacctccatacaacatcaagagaatgcatagagcgaagaacaatttgtccatgatcaccagcacataccacaaactcaccacaacaacttagttccatgcaattgagacggccattggcttccgaagaagcaatatgttttccatttatggaatacatatgcaaggataggtcactgtcggagtaaaatactagtctgccatgctgcgatgctaccagtttcgacaagccagctcctgatggatgtcgaatggatcgaacatattttccctcacgcaatgtatgaaatatacatgttccatcttttgatccactgataacgatatctagttccgtactaacaaataagcatgtgataatatcatcatggccacataaaatatgataagggctttcgataataacatgatccttagtagacagatcataatttgcatttcttgattttttatcagctgattttcctcggaatgcatgccagatcataacagttgtgtcataacttccggttgcaattacacttccatctgatgaaactgcacagaagtgtgttgacagatgtcaagataaaagcgaaagaaatatcagagatacaaggtttcctgaccaaaataatatatcaaaaatgacaacatatacaattaataaacatcaaattaataattactagctgataacagtaaatatacatgatgctgccagttactaataaaatattatttagcaagctctgctatcatacttaggctgcgtttggttgcaggggttcccaacccctctccctcgtttttcgcgcgcacgcttttcaaactgctaacggtgcattttttgcgaaaagtttttgtacgaaagttgtttaaaaaaatcatattgatccatttttgaaaaaaaattagctaaaacttaattaatcacgcgctaaacgctgcttcattttgcgtgccgggccaaccctcactcctgaacacagccttaatttgctaacagaagttcactaaatagtgagaactacacaaagcaaaagaatggaggtgcaattgctagcacttactgtttagttactaatagtggtttaaggttggagcatgaagagtagatttaatataatatactggattataaatatttacctacctgccacacagctgacaacatctttatgctgccggacgctctgcacaattcttccatcaccaagggaaatgatctgaaaactattctcccaattaccacacagaattaaataattatcaccatgaatttgaactgctgttaggcattgccttccaaaatcaacgttttcggccagggaagtgctaattttacggggagaaattacatcagagccaattccaaagaaaggttcctacaagaatgctaccaattaatcaataagaggtcgatgacatctaagaagttctgccatcanatcttnggggggggggtgtcggcgctgacaataaaaaaagatttccttttacctcaacagcaggcttgccgcgctgtttataaccaaatatgaggtcaatccagtgatggagattagagcttacatattcactttcaagagcttcgcggttgatatgaatgaattcttctggacaaccctacacaaaagtattgcatactgatatattaccatatgagttataacttttcagctacagatcttagacaatgtattattgaacattttaactgaattgcattagtaaatactacattataaaatatttcttaggactatacttctattacttttacagatacatcaggttaaaatccttgtgctcgaagtttccacttgaatacaatgaaaggtattccccgcaacacacacacacaaagagagagagagagtacaacgagagttaaaaaccagctgatgtaattacgttatgaattgtgataagcataaaatctaccatgatacaatgttatttgaagcaaatggaacacgtttctgaccaaaatttttataactgaagtacaaaaaatttcaaaactatatgaagaccacaggatgcaactcaacagggacataaaccattcttatggatcaaccgtatgctagcagattatgaataaaaactataccggtgctcaatacaggatttttttctgttcctcacccaagaaaaactaataaatatcatgatttaatacatgagcatggatgcttagtacaatcatatgtggaaacagttcgttacctttgcccatggagggagaccaacattgcctaaaggttcaccatcctgctttacaccaaggtgataggaatttgaattttcaagaaactcgggcatataaaagaactcaggtataagctctttgacatcacttgtatttgataagcagttcctatatgtactttcaatgctctgaaaaagacgatctgcgtgatcaaactttccaccctgtacaaacatgtaaaacaacttttaagataacataattttcaagcttgtagaaagacttagaacaaagtaaaaacagtgcaatgtgccaatatatagtgctgagatcgggccagcaaataaagtaaagaaaaacctgcagattgcggtgcagagcagtaaaaggctcaagcctaagaaggtaataaagaacgattcccatgctagagtagtgagatccataataaaaactgcagaaagaaaagagacataagtttgttataaagaaggacgcaagaaaatgtacagtgtatgtttgatcaaagatcaaaccttggtatatcaggatcacagaaattaagatatctttcttcaaaaacctgcatattgaacatcatttattgaacactatcagagggaatgacaataggaagtcacagcaacccatagctcctcatcataccttaaagcgtttggcatccaaggcaccaacgggttttgacaggtcacggaaactggatgacttgttgaaatcaattttctctgacgaatagtcagacaatatccaagggaatataggatattgagttaagtcattgtaagatcgtccagcaagagtgttgagaatcattagatactcaaaattgctcatttctcttcttctccaactttccctagcactctcagccatttcaagggcaacctttctgtcaacaaaagaaataacactgtttttgtctttagtacttcctttggggaacaaagcatcatttctcagggacactaagagagacccaatgtttttagcatcattttgggaggaaaaattaagaaacacaagtgcattggcatcatcaaagaatatctccgttgcagtatattgtagtaggtaccgtgtccaatgaactgcttttatctggcaaacaaggacaaccgggaattaaatttggagtgacacatatcatgtgcttgtggatggttgtgctggtgcatgtgagagtaaatgatagaggacgtaccctgcttattttccaccttctatggtgtttgatgttgtttgatgtatttttcatcagagcatcaccagattcagttgcattgcctcgtcctccgtcaagactacccttcagtttttctgcaccccccaggtcgttcttggggtcagaatctttttcttgatatctgttgaaaacagatgttcctccagtgccctcaaccaaaaattcaaaagaaaaatgcagggctttttgtgtaatagtcaattgtccagcgagttttctctttggggttacaagaacacattgaactgatgacagaatctgggaaaatgagaaaataaggatcccagggaagaagctattaaaaacggtatgtcaattttgcatatacaaaattacagataaagcctacttactgcagcatagtcgtcatctccaccagtagacactggttctttcctattttgaacactagtagaataacctgaagaatctgcagcatcacttgagccctgggtctcagacagggtattctgggaaggctcactcatgtcattgttatcctcgcaaggttcagaactaacatcccctgtaattccacgaactcctttcagaagtaagtgcttcattttttctggaattttggcactaacagaggggttgacagacgaggcattgctttcattactaaatttggatggtggctgacaaaggcgttcatcaaacttatagttacgcttgagtttcagtcgtcgccgccatttatcttctgtcttgtcaagtttccagtacgtcacagtactatttggaaatgggttagcagaccatggtcctctttcctcactcaaagcacgaaaaatatgtatccatttgtcctgatatgcaacataggtcacttcagatgcactgaaaatatatatgtttggtaaaaaaaactctaacagcttactgcaattatttgctgatcctcatcaaatgcaagctggagagctgcttttctactgtcgtccacagaaatggcagcagacttagcaaactgtatgtcatcctcaaagctttgcagttgttctatatcttcaattaagctctcatcaattttggaatgaagttcctggagctgcctcaggcgatcagcctttgcatccttcatgtatttgacctcatcagcagcctgaaaagcaccaaacatattgttcagccgtagtgtcttttgtgcactgttcacaaaacagacccaaaaaataatagccttcagggttcagtagcaaaattttactcctggtaaaataaagaaaagaaatgtggggcacattcaagaatctgtgatatagtaacaatataagaaccatattgtaaacgttttcgaatttttgggaaagcacaaaaggtttgtaatgaaaaacattgacagatacaaaccgcagcaagaacccggtccttctgaacaaaattaagaacataaccagaatccttaagaacataaccagaatccttattgctatttacttcagtggaatcatctcttgccaacatattagtggcaagcagagacttcccttgtacgagaatttcaaaaatcaatggcgacataatatgagaacgggcaccatcatcaagccccccatactgggatctccccctaagtaaagacctgcagaaagaaaagaaaattactaaaacagccaattcacaaacaatgagcaaagtttgcataagtatagccataccaaattaataaatgcagtctatttttgcactgatcatcttctgaaataagattaggaagcaccaatgtgaattgcttaacatacttggataagttttccaagccagctttgcacagatacaaaattataagatggaagatgattcttgggaatctctcgcctcttaacatcatagctttgtcagcattcttgttcgcctttccacttagtgcagaaccaattcctccagttaccactacagcagccatctccgcggccgggatattcagtgattctaccagcccacgtgcccgttgtccaatagatgggacagcagcatttgaaccctttggagtcaatctattttgtcctctgccattcaaattgcaaataagagtccatatcttgtcgtaaaagctccaccaatcatcactcagtttatctccatcagtatatgtactattactccaaggaaagctgcaaaagtgcatatttacatatttgttgatggtaaatacaaattgctcagtaagttataatcttgcatataaccaaaggcaagcaggaaaatataagaaaatagaggctatcatggatgaagacaagctgcttaaactaatactaacatatctgactccaaacggaaacaaaaccaaacaaacttgagaaaagaagttggtgtcaaataatcggtattgaattatctaactaccaacaatatctttccatcagaaagaatactagaatacttaataatgtcaagtgaattagaacacattcctctctcacgcgtattctctctgagcctgggctttctttatgtgcccgtgttacagttggtatgtggcaatatttactgcaggagttactactatattaaccaactcaattacaaaataaaggagctatgacaacagataagacattgttggtatcgcgattaagtttcacacacaattagcatagtacctatgcatcataatggatgacaacaaaccttacctaaaataaaattagtaagttcctaaaatctaaaaattgtacacatggtcacataagatcaattaaccacctaagtatgcacatgtgaagacaatgccattgtccttaaaagaaaatctagcagacaacacacaaatgtctatgtccataaaatcaagaaggtcctaggtgtggtggggtgggtgtatagaactttactagaagtataggcaattctagcacctttaaatattcagaagagttcagtcatgagatgtattaccttgtaagttggccgctaccctcagcatttagtatttcaacaacagaggtgttaatgtcctctattagagagtcatcagatgaagattgtgcagataagccaggtgaaggaaactgttacaaaagagcagaatgagtgaaggcatacataaataaaccatatcttttcttgcttggcacattattcagatcattagcataccaatagtttaattccgatttgatcaacaaacaattcatggataagcttcagaagatacaatatattatcacggcaaggttgcaaaaaaagattttcttcagaagatgtctcaagcaagcttcccacaatgtcttcaaagatgtctcgtatcagacaggaattcggcaactgaccctgtattttggacaatctccataatcacactagggtgggaaaagggcactaaattattaacttgttacagcataaacaaggagattagctttctgacctgctcgattttcaagagaaggaaatttgttgtatcttccagctgatgccagccacctttcatagagcacaagcagtaggtgaggaccaatgaatacatgttcctcacaaggattaactcattggtttcataagtattatcctcagcttctgaacttgatttgtagtccctaaatacatcaagtttcacagatgtctcaagccaagagctccaaccgtactcctgacaaaatcattttattatgaatagataactagtttgtgtagacataagaaaaacggtaactagtaaataccacaagggcttcaacattagaagggtttgaatccagcaaatcaagaagatcactcaagatcttagtccgtgctaacgtgtcttgacaagattgcatatatttaaatatacagaccaaaatctgaggaacagcaaatggagacaagctcgctgaagagatggcactatcttttgacacttcagattgggaacgtttctgtaagacctgaatagaaaatatgatgcaagcatcagatgatccattaatcagttttggttagtatcaagaagcctgatataagaggataaatataagagtactaaatttataaacatgaagttcagcaagttacctgcttaggactggccccaccaagaaggacatcaaagagagtagcacgtaaatgatccgaaagtggaaatttgaaaagtctttcagatattgaatagaagaacagttgaggtgctgctgtcatgcctttccttagattttcagaaatagatctaggccgtcctacaggaaggccaaaaaattttggtccttttttctcagaaggaactccaaccagaagttctccaagaaactgaagtcccaagaggcgaattggctcgaactccctgaaaagcaagtgatttcatacataaatatttttacaaatctaataagaacagaaatactccactctgcatttcagaccgcgactaatatgcacaaacgaagaatgtgagcaaatgaaaacaaaatatggtccagtagacataactcaaatctttcgaaacaattagtcagcgaaattgggacaggtttctatttcaaacagaaaagtgcaaaatgcataacaatggtattacgtgtgataccttactgataagaacaaatagaggacaaaggcaaacatccatagagcagtacaggtgcaatttgatataagaaagtaactatacagtttacaccgtacgtagtataactcaggaaaatactcaaataggaacatggggtcatcttgacctgacccataggcccatgttcatttccatacaatagtctcaaatggaacatcaatttatacccatttcttctttataaaacaaaatatatttgtaacatgcattaaagcccgatggcagcagtgacaacctgacgtgtaaataactgaaagtgcattacctcttaagaagattaatgaagatgtaacagccaccaaggggattcactttctccaagaaagatgataggagtgaattatgtgatagagcacgaataatcatgtgaagtacatcttcaatacatgcaacatcttgacttctctcgaaaaaggacacaagtgtcgttatatcatgttgagaaacctttagcctgcaatagatgattgttgcattacaattaaacaagaaaaagatgagtaaaattgatagcatatgaaacacaagcaaaatactccttgaaaatgaaagcatctatgaatcaacagttggaagtgcttactttatactcatttctgccagactcaataggagcagacggatcttgcgaatttcttctatgtttggcctctctgcaatcacttttttggtaacaggatgcagagaagtcttagaagaccttaaatcagtcttttctgaataaaactggagtacaatgtcaatgatccttgggagcccacacaacattggcaaacatttcccatcgcattcaaaatattgtattagaagcaaataaagttctctctgcacttcatagcttgcatacgcccaaatatgtgggttcagataaatttgtgaaagagcatctttcaatagaacgtctgacatacctgaaaaggcagaaagttagtaatctatactttctaaacatgcagaaagacagatagaaagacagatagctcaccacagttcttcaaaacattaagcatgtacttcaacgacgaaagagtcttaaaatttagcagctgtggtgaaacagattgaaacaagaaccctaatatagagaatccagaaagaagatgcatttgttgctgatttgctacatttccatccaaaacagatgcaacaagctcaacaacttgacctgccaattcatcaccaatggcaggttctctactatgaattacagcatcgtcaaagtggatcagaagagggaaaaatacagagacaccaccaacacaataaattatttcctgcagcaagcgccgggagcataactttgtcccacccatgatagttgcctcaaacttactcttgtcaagaccatcaagtgcagcagatacattgaacaaagttctattgttactagcctggacagaaaaggacaagatattcatttatcttgttcaagaaactaactgaaaaaaaaaacaacactatgcttagagaccaatgtaaacctgtgcattcaagccaaaaatcatcttggatgaaatgccatcctttccatccagaatacccttgtacagagtgtcaacgttcataagcaagttttgatcaccaaggaaagagtacatgtaacttggtcctagattatatatgccttttatttgttccgaagaaagagcatcagaaaatgcatagactgggcccatttgaccaacaaaggcagaagtgctctcaaaaccaagggaagtaggttcttcaccaatgggcatcaaatctgtgccaatactgcagcgagtcattacttcattaacttttgcccacctaaaagcagaaaacgattcaacaaactgtaatcaggaaatcatagagaaaaactaaaacacatggaattaaatcctaatcaaaatatgagttcataagatacccagcgtgcttttttgcaattaagtcatgtttacagataagattcatttgttaggaaaagagaaatgatatttcttgttggagttggtcggtcagagatttgttaggagtcactggctgagatcctacaggtagtctacaatgttactaagttgtagactatcaagttgagtcttgaagacctaatcaggccatgattaattgatttccaagtacaactactcttatatggatggactctcaactttggatgggccaccgtcactaaactctaatggttcatatgctttatgtcccgctccttgtttcattctgtataagatgtatgtgtttggttttgtttgaaattgaaaacattgcatggcatgttcaaacactttttagtcatggttggttgaaacttgagagaagtcgacagatctgttaatttggcaactcaacattatgactcaatcacaatggtgatatatggctttttctttgaaggcaaacaaggaatgggatcaattccctcatccctctcttctctgaatctctcatccttagtcctccaatatctcttaggaatggagcctaagctgcatggggaaaaactggcaaaatgaagtgcaggctcctctcggctattacttcatccataggccgtaactttttttttttgacgattaaacagcaggagaggctcctactgcgctatattaaaaaaaaaagggggaaagtatgtacaaggagagcatatacaaaggaaagagagcaagaaaaagaaacaaaataaaattccaaatcctccaaattagataaggctttcagaaaactgaacaaggaattgaatagtatcggaaatcctgtagcatgattaaaagtttgaaatagaaaattctgacgaatcacatccggtataccaaacaaatgaagaatctactcacctgcatttttgattagatatctggccaccatcaacatagcatctcagctggcttccagtagagaatgctctccctactgaatgagtaacagaaaggaatatccattgctttgttgggaggcttagaggcgacaaaacacactgatgtttttgactgatagactgcatagggtaaggatagggaggtcaaattaacatatattacttccgtcccaaaataagttcatttttcacccgccacacacataccaatacaaaagcaaaaggatagaatacccctactttataaaatcccaatacaactatccatcactttacccaatacaattattccctacttttacaaacttcgatgcaatgattactctaaaaatgaacttagtttgggacaaatggaagaagctaaaaatgaacttaatatgggacggaggaagtagaaaccaaaatcgaacaaaaaaaatgataaatgaaatcaagtgctgcatccagttcatggcatgtaagcatagctgtgtaaaacgggaacttattaaaaaaagactacaaaattctaattgtctttctattgtccactaaataatgattatcgacagcacatcacctaataataagagcagagcacctaacagtaagggcaaacaggaacgcatggccataatctaataagtttaagaatggtttaacttcaagcattagctgcaagacattgtaagatattaatcagtgaaacttgggacatttcatcaaattgtttgcaattcttaacaaaatttcacatggaaatgtaagtcagtcagtatgttgcattcccaaaattatgttgctagcttcgctagtgccaaataaccatcttgacaaattaatcttttaatcatttgtgctataattttctcattcggttaggtagtacatactccctctgtcccgaaaaaaacgaatctaggattggatgtgacatattctaggataacgaatctggacagagatatgtccagattcgtagtactaggatgtgtcacatccagtactaggttggttttttatgagacggagagagtagtagtcaatgaaaaagaatatttaatgacttgtaagtgttcttttttctgaaaattactaaaatgagctgatggctccaaccaccattacctcaaatattagagcatctttcccaagcatagccaaacatccttttccactttccgtgaaaaaggagaaaagccccatcatgctattctcaaggaaactttccacccttaaccagcagcaaaaggataagcccttattgtaaggccattgaacaggtgattttatttcaatgccctggtaaatggaaaaacaagtaggatatcagataatcaccagataaacatttcctaatggaggaaacaatagaggtacttgtcctgcagagtctatttgagacaatgagaacgactagtgtaaccttgttcctaaaaaaacttgcaacaaaatggaaaatagagaaatgaaatgaaaaacagatcatttaaagagttacaaactcaaaaattatgcccagtcaaaaaaaaatgaaaatagtactaaacatgaaaataaaaactcacagagtcatgaccactaaattcaaagaaagcttcaggtcccttttccttgagcatgtgactaagacttgtcaaaagcaatgaattacgcttctgcttgacaccaatcttctcatcacgcaggagggcaaacatttttcgtatatctttcccgcaaatactgtgcccaccaataatctgaatcaactcggcaatttttatgacagtatcatcagtttcctctactgaaaaccaatcaagaagaaaactaagaaatcctgctttgaaacaagaacttctatttgtaatggatcccttgagcaactgttgtaggaccacaagcccataatgctggagtgcagtgctgctctgccaattagaaatcgccaatgttgcgtatcaccaaaacatggatgtccaaccacaaatatgtgcacacatcacagggagtgcgaccaagagagagacgtaccttttgtaaaacatttaaaaatagtatgatcacatcttcattctgagagaaaaaaaagaaaggttacatcagataacagaaccaaatagaaatgtgggtacaatagagtgaatcacttgattaagcaagaatagcattgcttcaaagatcatgaagattacttgcctttattgtggtttcttcgtttttatcaaatgtcccatcaacaagcatgccaagtatggcatccaagagtttctgactaggtaaccatttacagaagtccaacagcaagctttgcagtgtttgataacccacgccaaccagcattctaaaggaagcctggataagaaaagacagagttttagatgcacataaaaaaaagatgatcagaggagaaacgaatataaagtccaaataatgcttgccagaaatccaggtgacagacaggacggcaaatccagaaacaaatgatactttggttctatattttcgcaatgaaaagagcatacaactactggaaaacaattctgatatttaacttgctagatgctctggtttcacaagaatatgcaggttccacaacaaatgtgaccttggagattgagttgaaaaccctaaacgggagtgaacaaagaaacagcagtactaatggttacatctcgaaatgactcaaaaccaatactggcagcagtctaatggttccaaaaaaattttctcagacacggaggagagctgcctatcattatattaagaagaagaaaggagagggtaataacccttacaacacacacataaaccttacatgagacaaaaagaccaaaacacacacataaaccttaatggttccaaaatagtacaaaatgtaaaagtgtagagaaatatttgattacctttgacacatcattttcagcaagtaatacagtcaacgtctgaaggacattaaggactaattgttcaccaactgcttcatcaaaagtcccattcagtaaggatacaatatgcaggaagcactccccattgcggaacagattttgataatactagaaaaaggtatgagtgaaaagatgcatttgtcagggatgatgtgatattaatgaaaaggacaaaagaacattatttaatgggaataatcccatcttacaaaaagaataccatgcgatctatcataatgatctctctcatgttaactaatagatcaatagacaattctgcgaagtcctccttttcttttgcacgagtgaaagcctccaaatattttgaacatagctgcaactttgctgtatgatcttgtgctgatgctgaaggtaactgattgtgagaaaaggagatagttttagttccaaagaaatcatatcacaagcaacagaaggagagacaaggagcacggcaataccctaaataagtcaagaacttgctccaatacattttttcggaggttttcttcttggaataaatcaaataaacactcaatacaattggcattatgtaaaactagaatctttccaagctcagatattgtggtgtattccttgaaaagattgaaagccaattccacacatgcaatagtacttttaatcttctcatctgaagaagacatctgaacattttctgattgaaaaacatttccacttaagccatctccgggatgggaaagcttccttagatgttgtgcttgaagacatgcaaccttcaggactctggtaagcgcgtccaatgatttaaaggaggatatagtctgttcagtggcaagttgcaggataacatgaaaactcttaagaatagttccagctaatccaggatcataagtgcaacgttcaagcacatctaataacgctgagcactctggctacaaacaaaagtaaattattttaataaggtgaataaaaatagaatggcaaaattcaaattatgaacaatgcgcaacatcttaggtgacgcagcagaaatttaggataccagattgtttgtgttctcatttattgttgcggcaaactccaagaaggaaatagcttctgcttgaagaatgttgacatcagcttgattaaggcctttagaaccagctgattcagtagcatcaataaaatgattgttttgtgtgtcacaaacaatatgatgaatatactccatagatgatccaaagtaaaaaaatttatctgaaaatatcagactccataaaccctcagcgcgaaaagatttgagcagagctggtactgaaatgagaaccttcctgaatgtgcaaagaatataatgctgtagggtatttgccaaaatcctggagaatttagtcaatacaaacaaaaaaagtcagcaaaagaaatttagaaatgaatgatggcattaaaatacataaacatgcaattacttgaaaaaaattacaaaacatgatacttccacacacagattcattgcactcatgaaacaagacggtagccttgcaatcatcaaattaacaaattgtacatgattagatagatattaggatcaacaccattttagacaattgttcacatgttgtatctagcagaatattttaattatcatccattgagttttgcagtactggctatacatcggaaagactaatatattatatgaagtcccctgtaccatctagatattcaggaaacattgaaagcaaagtccacaatcaattcatctagtctaatcaagaaagatggacagcaacattaaggaaatgagaacctaccttatatggttgggcaattcagattcactagcacaagctttgatgcatggaaaaactgttgaaagaacctttataatccatcttgcacattgctcacagtatgccactgagatggacagagaaacttggctatcaactgcaccagaagagttccttatctcgttaggaggaagaagaaaagaacaaagtgctatgctcagctttacagaatactcagtccattcagttgtatcaagaatatcaataggacttgcaaaagattctgatgtaagcgatatcccagtgctttcttcaagcttacagttctgcactcgagagtcaagtgccttttgttgatgaaacccctgaagcataaatgcaggccaacagatgctgtttgcaaacttatgtatccgtccattttcacataagaactgtaaattgttgacattaccaaaactgaataggaagtcaaggatccatagagccaaactatgcaatagcatatggagtctaacttaaacagactattaaattctggataagtaggtattagtgatatattcatttatttgcagccagaatattcaaggtgcaagagtatatcatcgctccaagaagacagaatccagaaaaaaatgtccagtcatgtatataggtgtgttatagacatgaaacagttaaagtccacctgtaacaactagtttgtacttaatatattgttaataaattatgaaagctaaaaatattttttatggtttcagaatacatcgtatattcaattaatgttcagaggtatttctagtcttttttagaaaaaatggatactgcaagaatccagaaataagacgtttcattgactgagagtaacaaaggtgtacaggaaaattcatgcattctcttactaaaaaatatatgtgcatcaggatacactgcctccctcagaatttccagcgataatatctggagctgtagaattccactcctgtgtaagacatgttatggtcaaatcacacaaattatatatagaaagcacacaaacctcctgcattcctgcacctaaggtttagtattgccacagttgaagcacttacctttcatcactggggacaaaagaatactttgagactgacaatttgcttgatggtaatcccagtccatctaatagaacctccagtcctccaatgcttctgaaatgattctgtgcacgtgcatgttgagagattgttgatctcagagcatgcaaagttataaagtgaagtagcacgtcagtccactgctctttcaaattcaatcttcggatgacccttaagagttctgcaagaacaattccagatcagtaagataataacagtgcaaaacatgaactaaccaatttaacatcataaatcctgaagaattaattgtgttatttttctccttttgcaataccacaggatgcataaagaactaaactatatctagacaagtacaattttggagaatgctatgacaatccatgtcttatgtttcttaggctgtgttctttccccctctttcccaactcacctctctcattttccacgcacacgcttcccaaactactagacgatatgttttttgtaaaagtttttatagaaaagtttctttaaaaaatcatatcgatccattttttaaaaatattagcaaagttataaagtgcttcaacactccaaaagctttggtgtctcgcatgggcttctgcactccaaaagcttctcagtggatcagcaaactcgggcagctagcacttcccagtgtgggctgggttgtgtgcgtgtgtgtctcggtgggagggccttggtctctcctttgttttcttctccttaatgaaatgaaacgcagttctcttgcgttttcgagaaaaaaaaattagctaatactacctccgtcccaaaatgtagctaatttctacagtaacttgtcccaaaatgaagctatttctccacctaccctctcctctcaaccaatcacaaccatgctcttcaccaactttctcttctccaccaatcacaacccttctccaatcatctctacctactttcttaatatccgtgtctaccaatgcttacattctgggacagaggaagtactcaattaaccatgcgctaatgagtcgctccattttgcgtgcatgggagattagctcccaacaccatctaaagaacacagccttagtggagggagcataaatccaacacaggaatgatacaaaataaaatgtgttttgtctcatcaccctgaatcgtgcaaaacatttttattgccatcatgaaaattcagttactgaaagttttgctctatttaaaaaatagcaaggtagcatgaataaatataactatatatgtggagtatttactaagcatttgactccataaatgaaagtaaatataactatatatgtggagtatttactaagcatttgactccataaattatatttcattcatttgatttgagactgcgcaaaaataatttactgcagcaaagattatgcagcgtaatcatctagcttcagcatacttgttccatttcttattactggcactcttaaccaaatcatgcacactaacttagaaaggaagcaatggtttgaaggttggaccaaaataataccataagcacaaacagtatgtataaaatgtaaagtagaagatggtggatgaagtttgcaagtgtaaatttggaataacatctcaggacttttaaaggtccaagtagttggggataatatattggtaaaaatgcagagctgtttctctacattcagtgctggaccacaagctagcaagattccttccaaaaacacatcacactaatgcatcagcaaggtttacgccctctcttatcacccttttggccccaaattacattgagcatgccaggatcattcatctcatgtcgtaatctcttccactctttggtttcagaccagaacatacaggtcattgtcaacttgtctctgaatctagaaccaaactatttgtgtaaactggagttatggagtatggatcatgcttactataagagtttatcaataagctagttagcattacagattaagttcaattgtcctaagcaagtgtcaaaaaagaacaatgttatcagatgtatacaaacattgagaaaacaatcctacctactaaccaattgacgcctccagcttccataactgcaacaatggccttttgctgccagttggtatcatgaacagcgctttttgcagatattggagtaactgtggccaaaaactcatttgatagggttttcccagtagtattgacaaattgcgttaacctagtagcagttggctccaagttcatgaagtttgaaattattgtaacaatgtgtacaagtatcttttgcatcatcttcatgttatctatggctttgtttgacagctgttcatctgcggcaagcaaactggtcaaagtcttgagctttacaactgcagctgaatacacaagagaaaaaacgtcagttaagaatagattcatcacaaaagaaaccataccagtattaccacggacatcacaacctaagctacaacagtgaaaatggtatgaaacaaaaaaggggaaatgagcgaaattacttctagaaaggtaaaacactactaaagaaagtattgtacctttcagaagagcagtgaccttctgcacacctccataataactaaatactctacagttatgcactgagcgagtaacaatggtcaagcattccaaaatattcaatccctcagagcttaacatcaggtctgacgattgttctgaaatgttaggagaggattccgaacagctgctgcctactaatacgagaaaaacaagtcatatatcaattattgctggctcactctagttgcaatactttacaaccactgaacaaatcaactactatcatgcatagcctgattgctcatttttcctttagcaggtactatgaatctatgatcttgctttccgagaagacatgtaactgattttacatcagtgtaaatttaaaactgtcatagcatttagatatgacttctgcaattttgataagtcaaatctggcaaaagcatgtttcaaatctttcgtatgcaaagcacctcttcaagcagatgtttcgaatctttcagtatgcaaagctgttatgactgacatattaatggcatcttaaaatgatatggaattaatggtggggtgcaaactacaaaagttgtatgctatgatatataaaaagcagaaatgaaaccatgaaaaggagggaatgcatcatcaagaaaggcatcatggtgttcatcagatccacttactctcagtaatgaaagaagttatttgagaaacctcctgcacaagaataaggatgatctcagaaggatgccctctggagcatcctaaaaccgtatcatctgatattggttcttgatcaactgattgctccgtgtattgcggttcccactctttgaatgcttgtacgaaatgcatgataaatatttgcaaggattccttcttttcagcctatggaattgttggcaacagaaatgaggaagcatgatcacaaacttttggggaaaaaagtacagtttatgccataaaaaatactacagaatgaaataatgccatactacagcataaaaatgtgacattgtttccttaaactaagctatatgtagtctaaattagtcgatacattcataatcttggtcatcgtatctcatagacaggagcgttgatgaggaaactagtcaaagtaatcaatcaaatcattcctcaacttcaacaaagccatctcataagtcataagtaaaaagtgtaaaacaaatatctgttattggcatatcatgtcatgcaaaaatcaggaaattatgttgtaatgttaatgcacatgtgcttgatacaagctgtttttgacatcatgatcaaaggaaatagccgaagaaaaggttggtggcaaaccagcatgcaagattactcaccttgtcaatggcattctcatatttctgccaaagcatgtttaagactccttcaacaccactatcactggaagcagatataaacattgttagaacttacaagagaatcagccttagcagattgtcccctaacaactataaaaactgatgttacatttgattaagatgtaatgttaacatgattgacaaataagtatctacagaacttagttgcctatcaacattataaaatcatcatttactcttttttaacaaaaaaaatcagtatattaagtgcaaaaccagggtaatcaactctagtacctaattttggcacagattttgtgtgtctatagtggaatatcacacacgagctacttatactgttcagtgatgtaactatgcgtatgcggactactgaaatggaaaaggataactaaaacaaccaacgtaccaacaacatacctcttatcaattatccgagttaacagttagcgtgcacagttacttaaccaaataagcagcaaaatctaccgcacggaagcaagcttgagaatgcagcattggttcgtactcggtatccagtagagcgcacgcaccaacacattgagctacacaagcaagtcgcattccgcagagcgagcggtttcctgaggatttgagtcggctaggttacctgaagcggaccctgggggacggcgcggcggggagcctgtctggagcggaggaggaggagccaccggcgccggcgccgccgtcgacgacgccgtcgtcgacccctacaaccccgccgccgccgccgccaacccccgacgaggccgccgccgacttgcggaggagatcggcgacgcccttcacgatgttcatcgcccccgatccgaggcggctagcagcagcgcatcaccgcgcggcggcgggcgccccccgcgggggaaggcgacgaggccaccacggggattcgattcgaatccaatccccctctcctcgcgggcggtgacgcaggtggtggggagggggagggggaaggggagatcgcgtgaggaaggggagcaccggaattttggaaatgctcgtggttttcagcgtgtgggaggcgtgagagcgtgagcgcgacgaggagactagggagagggatctagaatttctctgggggagaagtcaatgggaattgcgatgttggtgctggcttttgtgtcctctggtgcgcggagtcctgcagcggcacacataatacgaatactagcgctacgtggtactattacacttagtagaatggatgaaggttcttatggaaattaaccaacttgaatatcaatagcagtggtaaagatgtagtataacagtatatagcatacctgtagcagataatatttcatacaagcggatagtctttttaatagttctttaataaatatagaatattggacaacaattcatgtccgatcgatccatacatgtaataaatataaagttgagagatgatttctagagttttagaaacaaaatgtgagtactcttaacacttctcaggtaacacaatactcaacacatctggtgtaaaaactctccgtagtcatagttgaggacctccgacacactctttgtcttcctggcgagatagaacactgagtaggatatggcggcactcatgaccatgtgactcttgctcttgaagaacctctccgtgcgaacgaaactccgaccatccgctgggttgttgatatggtcaattaccttgaaagtcgccgcaacttcttgtaacccgggaaccagtcccaaagactccactagaacgctctttcccgaagtgttcaacgtcttcttctccccttcaagctttatacctcttctgatcatggatttgataacagagacgtcttgacgaattcttgagatgtttgatgccatcttattctccacatggcgaggacttgccatggtgcccctggtaagaaaacccttatatgaagcaattaattaatattatatgtttaaacggtagttaaatggtgcccctaactatatgtttaaaaagaccttatatgttacataaagccatgaagtattcaagacaaaggagaatatgagactaaaaactttcacaggcaaagcttgaatcagaacacacaagtcatgaagactacaggaggaacaaaagtttattgtatagattgcaaaaaacaatggaatccttaagtttaaatagctgcatttgtattgacatttatgtaatgatttcaagctgactacacggtactttgtagctagcctaacaggtaatacaccctgtagataatacgattgcaaaacatcttttatttatacgatgtgcaattatattctctagcaaggaccctacagatcgagctgttccaaccagaaatgatttgttattctaatagagaagacgagaattagtctactgctacctctttaaaaaaagatcaatcacgtaaaattaatgttactatcattaaacaaactatcataatatgtatttctttttatttaaaatatattatttttatagatattgttggttaaaatagtatttcgaagattatatcgaagatcaaaaaatacttatattttgtaaggggagtattgcattacagatctactccctttgtcttaaaaaaactatttctatatttgaatctggatatgttcagatttaaatgtagaaatgttttttttcttttttttaacggtgggagtacttagcataggagaggtaaacaaacaaaactactgtagtacagtaatacacagagggcggcatcagtgttatttctggattaggcgattagcaccagctttgaagcaaaaaggcaaaaattttaccgcatcaaattaaagcacggtcacacagacctcaccatcagacctccacgacgaagccaaactgattgatatatagaagcttccataaagaaaagaggaaaaaaagcgaaccttctagaatccactagaaggcgatcgaattactacccagcacacaaattggcagtctccgcacgaatacccgcgcgcgcgcacgaaacacaacatgtatatgtaatgagaataaacaggagaaataaccagctaattaaggagaaacatatataaggttgcagcacatcgaatcgtaacgagatcacaccgcttggaacatgatcagaggctcacgaaagtcccaaccttttgaagcgactcccctccaggaaaagcatcccgatcacattccagaaccttctacccgctagctttcacgccatgcgctggtgtcgcaaaatcacagcttaagcccccccaaaaccccaagaacactcccccctacccccaccccaccccaccccaccccacccaaagaaagaaagaaagaaagaaagaaaaccagcaagcacgacatgcaagaagccgaactctggtgtggatccgagctgcggatgagtattttggggcaggtgagggagatcggaggacggaaaccctaacctttgcttcgaactcgaacaaaccaatacggggaagagacgcggcgccgaggcggaatggttggggagggaaggggagaaaacgaaagaaaggtgatgctgaggtgcgcttgctactgcgctgcggtgctcatatgcgagatgcctctgccacttatcgggttaacgggtcgtatatggtaatatccatcaccctcagagtatctgcttgatccccttaaaaagaattctcagttcatatcaatattacatcctttccccgttttaagtgaagttgtgtatttccgtctctaacatttgatcgtttgtcttatttaaaaaaattaaaaaagttagccgcacataaagtatttattattcatattttatcatgtgcaggctcatcctgctaacttggtgtgccgctggcaggacagcagatccacaacacttataattactagaaaataagcacgctcgttggcacgttattttcatagcccgtgtgtagtcttaatgttgaaattttaccgaaccatatcagagtcgatgtgactctaatgttataaaatttgattattaaaggtatagttggtcaaaattagcaccttaaagtaaaaaatgtttttttatcaagataaggagtattattaatggtatattatatttacatgtgttttatgatagtttaaaatatacatttctcaatacctattttttagaaaaaataattttagttcatttgtttgtgttctcaaataattatcacgaactcagtttcatttatcatccattagctatatatgtgttcatagttttctttttttcttcgcaacataaataaatctggtctcttctttgggatataatgcgtgcactaaattattacaatcgcaacatacagttattttcatgccctttctaaaaaaatattacccccatcctaaaataagtgcagccatggatatccgtacctaatgtttgaccatccgtcttatttgaaaattttaaaaatatttagtcatacataaagtactattcatgttttatcatctaatagcaatgaaaatactaataaaaaaattttcaaataagacgaacggtgaaacattgaccgtgaatagtgcaaaactgtacttattttgggacggagggagtatattttcatgcctccccccaacattgaaaaaaaactattatcgtatatataaattttattcgatgttcttcaacaattgtacatatataagttaaattttcaatgagcagctcacataagctagcttaatagctacgatacgttgtactcccttcgtttaaatatttggcgccgttgactttttaaaatatgtttaaccgttcatcttattaaaaacttttgtgaaatatataaaactatatgtatacataaaagtatatttaacaatgaatcaaatgataggaaaacaaattaataattacttaaatttttttaataatacgaacggtactctgttaatggacggtactcagttctgtccatcagaattaatcttttgagtaactctgtttcaaaaagatgacgcacaccgtgagcaaccacaaccaggcacttatccatcattaggactgtttttttcgaacgattctccccagaaacaacgcaaagtatagagcatgaaaaaaaattacaactctgggagatcgtaaacaggaaaagaagaaaaaatagcaccgcccacacaccgatagctctagcttacaaacccgggagaaggctagcatcgtaccgaccgctgctaagccaacaaaggaattcaagtgagatcgtctaaaatccaatcctaacaactgacaccaaactctactctagccacatcttcgagattgagggagagagtgagagagaagaatggaatggctctccacccaggccctctgacgtggccatcttgcataagctacggcgccgacacaagaggacataagtctaaagtgagcttgcaccggttgtttgtgaggttttgataaagggcctaccaagatgacgtctctagggagaggagcgaaagaagcaccgccgccgccgttcgtcaaggtctcaaagagaaacgagactgggttttcaccctacacccgctagaagagatgggacgacacgacaacaccctaaagaggagaagtgacacccgaaaagccgtcgttgccggcctaaccaaaacggtgctaggttttcacccgtcgcccaccgcctgcctatccatagcagatacacctttgctccatcatcgtctaaacctctgtcggcgtccctcgcatgccaccacatgggcaccctcatcgtgcgctccacgccgactgctccacgccggcctccagcatgtcgcgttgcgccagcttaccgccaccgccagctatgtgttctcatgttgtgtcggcctcacgccacctccacgcagcactcgccggccacgagcctccaccaagcgctgatggcgccatcactgccagccgccggcaccgcccttccactgacgtcggtgtcgtccatgcacagtagcctgctccaccacacccccattgccggccgccagcgtcaccgcgctggcctcccgccgtgtcgctccgctccgtccactagctcttgccgcaccacacgtcgtcgccgcccacgccggctgctccccgcccagatccgtagggtgttgggtctggctacgctgcctaggaggggggatccggtcggggcagtgccggatccactgccccataccggagaagccgccacctcccacccgacgcgctctgctccgcctcccacatcaaggaggagcttcgccggctcggtttcccttgccaccaccttctcagtcgggctcgcggtttctagcggcagcaaggcgtcgagataggtggagagggtggcggcgcgagcagctaggatttcatccccaagctacccgcatgagagtgacgaggggtttgttagattgatatttttaggacactgcgaaccttgaacaggcaccacatggcaattcttttacccactccctgagaacgcaaaaagctcacctagaaaacacagatacagtacagatgttcgctattaccaaagatcgttactaattttgacacgaggaatcttgggggataaaatctatataccctaactctcttctcaagcatataaacgatttcaagtatatcggctttgattcaccaataaattctcgctgctttatatataaaatgtatttggtacatcataagtttgacgtagatagataaaagagttgaggtaattggttcaaagtaacacaaagataaaattattggattcaaaatgagtccaaagcgaaacaccgataataaaagatagccaaaagtaaaactttataaattttaaattctgtaaaatacttattcatatcatggttgcgtattttcactcttgctgcaacgatctttgcttgcaagggaaaagagacagcaaatgcgcctctgcctcgattcgatcgtatgcctgtttgccaagaggacgtcaaggcggggtgttgacgggatggaacaacgaactagcattgccaacgtacgaagaaacaagtccagctgtcatttcaatggctgaaccaggtgctcgtaataaccaaatgctgataagctgatgtcctgatgggttagtaacaattagtctttttttttttgctcggtgttctaaaaaaacaatcattcacgattaggacaaattattaaaaaaatcgcacgagttatactacctatgtggccctgttaagaaatataaggcgcagtttgactatttagttttaagctttgatcaataatttgtataacaatatttaggttttgttggattattcatgttcgaaagtactttctactccctccgtttcacgatgtaagtcattctagtatatctagattcattaatatcaatataaatgtgaaaaatagatgtgaaaaatagagaatgacttacattgtgaaacggagaaattatataactaagaattcgtaactgtaagagaaatttgtttttggcagtcaaatacgccttatatttctgggcggaggtaaggagatcagtacttatttacgtgcacgcctaattaagcaaactgcttagcggttaagttggggcaatatgtgcccgttaggggagtgaacccgttggtgcaacacgtacgtgcattgccgttttggct

SEQ ID NO: 16533 - DNA, 1094 bp, Oryza sativa
taaccttttaataccgtcattatatattgctgggtgaaccaggtaaataacataagcggccagttactaataaatattatttagcaagctctgctatcatacttaggctgcgtttggttgcaggggttcccaacccctcttcctcgtttttcgcgcgcacgcttttcaaactgctaacggtgcattttttgcgaaaagtttttgtacgaaagttgtttaaaaaaatcatattgatccatttttgaaaaaaaattagctaaaacttaattaatcacgcgctaaacgctgcttcattttgcgtgccgggccaaccctcactcctgaacacagccttaatttgctaacagaagttcactaaatagtgagaactacacaaagcaaaagaatggaggtgcaattgctagcacttactgtttagttactaatagtggtttaaggttggagcatgaagagtagatttaatataatatactggattataaatatttacctacctgccacacagctgacaacatctttatgctgccggacgctctgcacaattcttccatcaccaagggaaatgatctgaaaactattctcccaattaccacacagaattaaataattatcaccatgaatttgaactgctgttaggcattgccttccaaaatcaacgttttcggccagggaagtgctaattttacggggagaaattacatcagagccaattccaaagaaaggttcctacaagaataaaacaaattaatgaataaaaactaaatgttatcaaaaaagtactgctatctttgattgtcattaggaagataccagtgatccagaaaacgtgaagtttccaccagactgcaattgtgtagttagccaaagctttactgacagtacaagtccttcgttcatcacaacaatgtttgagtccaacaagctaacaaacaatacaggtgatgaggagctactagagctagggacaacagaagtcactgttatcgattgtggggcaaaatatagtgggtgagcaattggtataggggggcctcttcttgggtgtttcttccggaaaatttgaataggtgtttgtccaaaatttgcaatttggt

SEQ ID NO: 16534 - DNA, 40169 bp, Oryza sativa
  unsure (1)..(40169): unsure at all n locations
ccgcgtgggnnnnnnnnnnnnnnnnnnnnnnnnnnnnnnnncataaaaatgtgatttcttactgcagattctagctattcacgatctcctagcaggaagaggtacatatttcatttcatcatatgagcatgatcttttgaagttaaattctaaatatgctgtgagtgcatgttaaagccctgatcaaagttcaatttatggtgtctttgcttatctttatcatcgatttattagtatattgccttgtcgtgtttctattggtcttgcattttagtttttcatcattgttaatcaccatttgatatgcttgagttaagatccacacaagctacaattttagttctgtagttttatattaatggtgctgtaaactatcatcaacatatttgttccattataatgctaaaattatcttgctcagaatggtaaggttttgtattcttcctgcagattgtacctggtgatacttactatctatcactcaaattatttgttttgttttcatagtcataagcatgttttcctaaaggtcatgcaagcacttgtataagctgtattttgcgatcaaagtagaacttgatatttgaacactggcatttccgttggaattgtggttgggtttactagatttattctagatgccttgaacatgttgagtcgtgctgaactggtaatttacttttccacaatctatcctttatttccagtgagaggaggcatgaaaagaagactgacgatggagaaaccaactcatctaggagtttaagtctctctgataacaacgatgaaaagaaaaaggacaaattctcaagtggtgatgagaaagaagaccacgaaaagcaggtatgagaaaaatgtaatcaaattcatggcttatacaagcacatttggcacaatcttcattgcataattatgaatattgtgcagctgaaacaaatacggctggatatggaggctttgcgtgacgataaaactcagatggaggtcagtttctatttgtctcgctatatttgttacaatatggcacatgctaccatgttaacattttgactgccactttttattcactcataaaaaggagttggtggttgtgatgataggttccaccatcccatgccattttaaaagatcttttgtggatgaatctaccttagtgtgtgtgtgtgaattgtaggatcttttgtaaaggattacatcttctgcacatgtagacatgcataagatgatcgattgacgcaagtcatatattctattttaaatttgttactaatttgtcatatgtagacatgtatttttataaaaaagttcaaaactaatggcttatttatctgtggtatgctgcaatgaatgagcttatgagcactatgctagtaatgtgtaaattgagaaatggtaatgcatggatttcatcaagtgttcaaagcgtaggtgacttttcactagtccagtactgctgtgccaactatcaactaatagtgtttgcatgtagaacttagtatgtgggtattgtttatcatctttaatttcagacatattctccattctgttcatgtttggcacagagattgcacatcttccaatcatttaatagtagtcatgcttgacgaattggttggcagtgcgtctttccatgaataaccccaagagtaccctctagtcttgtgtccactttggaccttcattgacttattgtacttgagtttatttatttttgtcttcctgtcatgttatattttccgactgagctttggagcgggtcagcactcagcaggcacattattatatggtgcttgcgctcttgtttcaaatgctttctattttatggctgtgctaatatttcaaattttcaatggtgctgcaagaatttgatttcacattgtttttagcatctcgtgaacacagtacttgctaactactactttagaaaagactcctgcttttttttttgtttcatggaatgatattacaaaacatcctacttggccatgtctctcttttagacttttagaaaaagtcaagctcttagaaatgttacataaataaatgtacactaatttataaatggttccttataatttgaaaaaagtttgcattaaagacaccatttaataatattcctacttcatcactgttatgagcatgggccaggccgatgcagcagtttaggcacgataaattaggaataagtcatataatggtaggagattatctagttaggaaagagatgaagtttattatctagttgggattgatttctatgatactatagactatccttggatgtcaagcctgtcctccctatatataaagggaccccatgtactctatcattaatcaatcaatgaatctctaaagttagccctaatcctcagagcctcttttagctgagcagggagaagccttgccgctgctattagtgagcgagtgccctatcactgggtcttcggacccttaccctagctactccataacagtcactacccattgcttgtacttagttccattcacgtctataatgttagatcatgctgaatctttgctccaaactcttaactctagtcaacgcacttacctatttgtaggtcattttggatgagaagatagatgaagtgcgcaagatctctagcaaagttaatgatcttgaggtgcagcttagaagggagaaagatgaatgccataggtacttaagcaatgtttccacatgacaatggcacattatcttgacagtattatccaatagttctatattgtttttctatacctttgtaggatgacctcaaagatgaagaagtttattaaagctcatgctcggtttttgaaggcacaagaagaagtgaaaaggtgctttatgttttcatcatgtttggccttgtaatgctagtacacaccagattactcctttttgcataactatcaatcaataagtgttcaccaattggagttatgcaggtcacaagctcgtttcgagaggcttggtgatttgcttgcttcagatattttgaagcgtggtgctaatgaagaggggtccagtgtcaatgaagacctaaacgaaaggagtcctaatactgcagcaactaaaaagagatcaatcccatactcaacaagtgaagaagcgaaagctggtatgtagcttagtttctcgggacactctgattgccaggttgtgatttgtacaatatggatcttggtgttatgcagcatccaactttccccttctgttaaactgatatatgtacctctttatggagtaaccagtcgatcctagtatgaagtagttcaaatgttcctttatttaatattaagcattaaaattgatgtgcttagttttcttacagtagcactgaaggatgcctagtttcttttataattggattttaattctttctgcaaattgctgaagaagtgtcttaattatgtacttaaacctaattgcttgtctcctcagtgaagaagagaagagagcgagactctgatacaatgactaggtcagataaatataggtcagatgttacagattttgataaaacaagtaaggggactgaggcaaccaagtctttatatttgaagaagaaattatgggaagatgaaaaaagtaagctaggagccaacattttcacagaaaaggtgcaccatttctcccgcccgctctcaattttatgatgaactacatatcatacttagtacactcagtccagtgctttgtttaaacattatcacatattgctagcctatgcatttgattgcactgtatatatctctactagtgtaaaagcagagttgtccttccttcccctcttcccacctaccgcgtacagcgagagagtgaaaaaccgaaaggccaaacttattacttgtctaaacaaaaagcctagttgatatttggaaagttcggtcattgccagaccttgtattgaaactgataggcttccttgatcatcaggtcctaaagcccttcttggctatgttggcatctgtatttatctttgtttgattgtgcttatcacaggcaaatattttgttaacttgcaggtcaaaggttctcccgtcagacatgttttgccctccactggcatggctgctcatgctattgatgatctcaacgaagctattgaactggaggacagacatgaatccatagacgcattactagaaaatgatgctgatgacaaaactagatcacctgctattcccctgcagccaccaccagtggtacagaatgcttatgagcaggtgattaaattttcacctttccaaaaaaaaatattggacctgcttacatgcacggtcagcggcatggaactggacagtgcattttgtttataaaaaatcgttgtactaaaaaagctccttttttttccctgtgcatttgctaatttgctgaaaaagcaaactcataatttgtttcatcttttcccagtatgagggtgatgacgaggaagtcgatgtggaataagtggatggcctcgtttctagacaagaggcctctgatgaagcaatggcgagattagcatcttccccagctccttataattagtactattagcatcttggtgtacaaagtgctatctatttgacattgggaattcagcttatatttatcaagaatccttttgtagtaacatccttggcgctgagacagccttagtcaactatgtggagcagccgtataaatactccatagagtgtctggtttggctaagctaatgacgtatggtatgtgcgctccttctgccctggggattgcgacgccagatgtgtctaccttctttatcgctgcattcagttaagaagaagaaatgccaaagatgaacatttcatggtcatctggctagtcgagctgagcgtgtaaactgggtaaagcaagatatcctgaattgaattcctgatgcctttgtacagcctccccaagacccgaaaaagctagggtttgctgcttgcctggtgctgcggagcgggcatgagcgccagctttctccctcgctgttaagggtgtaataaggggttaatttgtgaacccgcttataaatcaaaatcttctcatggctggtcgtcctcgctctcctgtcgtcggcttctcctccatcgccgatgatcatcactctatcatcagctctatcgtcaattcgtctcctgtgtttcggcctggccagattaacctaagcagaaagagcagtagttttatcagttggttatattgacccaagccagaaatagcagtagttttatcggttggttttataagtcgtaacaatatgtatctcacgacttaaaaaaataatatataaaaatatcatgttggaaatatcctaaaattaactttataatttaaaatcgactcaaatatctaaattttaagtttatcatacccgggaggttatcctcgtcgagagaaaccgacccggttgattttcctgtgtctatatatatcgaccgagttgaagcctcaagaggaggaaaggatcgaccccgacccgacccgaagttccgaccccaaccagagagaggcgcgcgcgtgcgggtgcggtgcggtgcggatcggatcggattgggccgagttcccgaccccacaccacacaccccctcctctccccgtccgagagggctccggcctctcctccctcccgcgatccccttcccctccgcctctagccgccgcgccgcgcctcgccgcgcctccagccatcgccgtcgaccgcgcgcgcgcgcgagaggttcgtctccgtcctcctccatcccatctctctccccttccatggatatttccttcctcttctctcgggtttcttctcttctacttgatgagattttgtatgcatgtatgtatgtgtgtgcgtggggggattggattgattggatttggagcgcgccttagaaattcgaggggtttcctgcgctctgtttgctttgctccctagatttgccactccgatttcaaactcttcgagtaccaaccaacccttgcggtatttttgctcttcgaatgaggttatgagatctcatgagccacttagttttcagacatgcagatgcgcgcatgtcgcctccatgttgccggcgtaccatctgttttttttttcttctgttatttttttcgtttcataagattaccatgtgctagtaattactgtgagtgattttatcagagacccactaattttttatgccttaatttgttttctctcattttttgcagagcggctgtacgcgattcacatgtgcggtaatttacctgcctactgccgccaaccagaagtggaatataccctatcctaattttctttcttcggatgaaaggtctgccagtctgcgtcagctatggcacagagttcgtcccggcttcaccgcctgctcacattgctagacagtatcctttctgcaagactatggttcgctatgcttgcagttttacagatgatcacacgctatgctaggttatactctgtaccgattctctgataaactaagcaaattgcctcatgaaatgtgcaaattagctgggctaaaacgtacagtctatgcttttgcagtcgaacatatatcatttgatatcccctttggtttatctatctattgtgcaaagtttcctttaacacaactagctggttccacgcaagcgacaaggttcgctgctgcacggcaaattggagaaattgccaagtcccacccccaggagctaaatgtcttactcaaaaaggtataccaacaattccaccacctgctagttttgtggatccttctacctgaaaatgtttgcttaatataatatgtgtaagctatgatgtgtgatgtgcgaaatgcccaacttttagtttcttcaattcatgcttcgcttgcttggtagcacaaaaatgaaccctgcagttttatgttatgctgaattttcagtggtgttgaagttatagattttccttttctcggacatgcaggatatctgcattatcattatattaagaaggaaaagggtaaaagaaccctgattacaaaacacccacacaccccagctctcaggctacatgcctgtccgtgctaacaaggaccacacgcagaaaagaaaacagcgaccaaaactgcccctcttcaacctgaaactaaacacgaggctgtagacagttaagaaggatagccctctagcctcagccaaacaccaaaaccgcccctcctcttcagcaagcaggatggcactagccaagtttggagcagcactattgagggcacatcggtttcgatgcttncaaagcgtccaagcaccaagaatgactagagaattaaggccctgttgcactggaccgttgtttgcctcgttggtcctgttccaccaaaataccctgaccaaagcgctgtcggagtgagaaccaaaatttcctcgcgaagacacaactagtgagtagatagatgattatttcatcagctnggtcgcaatgagggcgttgaagttatagattaaatatcaaactttgagggatatatgattttgtgtgatgtctgttgtaagatgcaatgccctcccatgcattgattgatggatgtttgttctatgagaagtaactattactgccttcattatctattatatcaaggtagtaacatgctcatccactggagaacaagcttgttttctttttacacatgttctgcggagaatggctggctgatatttatgcttttatgttatggttttaggtttctccatatttacgtagtaagaattgggacacaagggtcgcagcagcccatgcgattggtgccatagcagagaacgtcaaacacacatcggtgaaagacttgttcgcatctgcagaagcagaaaaacatgcttctgggttgtctggaattggtgatgttgggtcaacgttgcggcatgctgatactactgcaacatctgagcttgcttttggaaggtttgttgagaattctttgaaactttcctagtgcttagtagaccttcccgctcttcttttttgcctaattggaaatggacaaactaattccgtttaacttctttttacagcttcgatataaacagggtgttggaatttggatctcctttattggcatcaggtggacaggtgtattttcttcttaccattattttgccttgtcatatttaatgaatacaattaaaatactgtggtttttttttcagggcaatgttattttcagattcaatccatttttttcttttctgatagtgtcatgcatccatctattgtttgtttttctttgccatatgtcaacttcttgagggctttctatttttcttactaggaacatagtgaatcgaaagcacttgacacttagaagtaaaatagatcaagcctcttccattgcactgaattttcgtttttgacataaaactgcattgaatattgtaatgtataggttacttactttgctgctaactcgaggaaaagaattttagtggataatgtttaaatctaggaacatattctgaagctcctcaatataattatttctcaaattctggagatacacacaaaataacctcgaatttctttgtctataccaagatttttttaaaatttttgttttaaggtgtacttggcaattccattccatttcttatttgtttatggtttcatggtatgcaacatgtgaaagctaatggggattattgcttttgtgcttgctactaggaatatgacattgcaaatgataacggcaaaaatccagcagagcgtttagctcgccaaaagcaaaatctccggcgtcgtttaggttatacttctctcttacatcttattgttgctactttttaattttcactttatggcactcaccgcaccactgccacaaggttctttctatagtgaagactgcacctgtattctgcaaagtatcgttgtactctgatatatctttgaactttttgttgttgtgttggatttctcattcctttcatgtttctgttctagtgcaggtctggatgtatgtgagcagttcatggatttcaatgatgttatcaaagacgaggaccttcttgcccaaaagaattattggggtgcaaatatgcaaaacaatggattctattcatttaatactggtcagaatattcagcacttggttgcatctatggttcccaggtatcccaaacattccaattttcgctccaggcgattaagcgccagggagctcaatatgctgaagcgtaaagcaaaaagcaatgcaaaagatcatacaaaggctgtacccgaggatgatgacgttgtgccaaaaagttctggaccgtctaacggggcctcttctgatcaagttggttcacacaacacatgttctgtcaattgtactatatttttctaagattttagtatcctcccgcacaattttttatttttctggggtcatttatgagatggtcattaattccacattcttaaattatcgggagccttggtagaggttgtaaaactttgtttctgattgttctcaattgctagcacaaactatcatgtctgaatatgtggcgcagtgcaagtaagttaagtgcatttgtgggtgtgtgttcttccatgcatcatgcatgtgtggtttgttgacttgttattgttggcattcctgtttggcaatttacgcagttgcactggagcattctgttgggatggctttgtcttcaatctgtgatgatctaatcaccccacttacattttttcaggatacagttgatgcaatcacagatgaggacaatctggagtacagtgagaatgggagatggccttttcaacagtttgtagatcaacttattcatgacatgtttgaccctagtaagttcattatctgtcttgtctctgaaatttgtcccattcttatctcgcttacaatctttttactgagtgttgtattgtagtttgggaagttcgccatggcaccattatggctttgagggaaattttgacgcatcaaggtgcttgtgctggagtatattttcctgatctgaactcacctttcgctgaccttgatgataaaaacaatttggactccctgaaaagagcacatggtattgatcttaatgaagacattgattcgggacagctcgagccagttttgaaaagacaaaagaaagaggagtctaatccagaggttatggacattcagttggataaggagccaagtaacggtgattattccaaaacagaggcaagtctgagtactgagcctactgtatctagtggtgaaccaaatcttgctcatgcaaaggttgaatcacccttccaggttgatggttcagctaacccatctaaggtggatccatattgtacaccacctcacgaaacactcaactccatgcccaaactgagttctacccatctccctgaaaattcaaaatttataaagctgatgaaactagcgaactactcagcggtaaaaaattgggaatttcttcaagactgtgcaattcgtttcctttgtgtactttcattggaccggtatgtatctctggacttatatactttttgtgtgtatttggttgtcttggctattagtcttattatttttttttgcctttgttcttcctgtagctttggtgattatgtatctgatcaagtggttgctcctgttcgtgaaacttgtgctcaagctcttggtgcagttctgaagtacatgcatccgactctagtatgccatacactgaatattttgctgcaaatgcaggtgtgtcctgtagtaattatttgtcttgctgttgtcaacttcaaaacagtacattctctgttgtcatcatcatcaccatttccgtccttttctttgttctttcagcgcaggcaggagtgggaagttcgtcatgggagtctccttggaattaagtatttagttgctgttcgtcaggtgattgctaatgagaaaaactataacctaataggctaattcaatcgtctttgtgcatatatgaccagaggggcagtagtagttggcttgctaccaagtcaagttttgcttttcatatctctacactagaggaacttaggagttctgagaaacatcctcttctgtttactaatatttgtttttgacgcctaatttatgtgtaaaattgctataatattgtttccttccccaccaggaaatgcttaaagacttgcttaattatgttcttcatgcctgtaaagctggtctggaggatccagatgatgatgtccgggctgtggctgcagaggctctgatcccagctgctgcttctttagttagactaaatgatcaaatgctacattcaattgtgatgttgctttgggatatattgcttgaccttgatgatctaagcccttctacaagcaggtatgttcaatcatgctttcctcatttagtaaacacattgtttgcgtaatgttgaacactgagcccatgttatacattatatggtccatctacttccgatttctaatcttattttgaatccagtcacctgttcccagataaggaatttaaaatgttggatagttgttcgttgctcttttattccgtttaaagttgactgtactcatgccacaataaatattctgtatttctcatgtccaaatttcatttttgtttcagtgtgatgaatttgttagctgagatatattctcaaccagagatggttccaaagatgcttggcacaacagccataggtggagacaacgaatttgatctaaacagtgtaactctggttgccggtgaagaaaaaatgggttctaatgataatccttatgtcttagccgctctgacaccccgattgtggccttttatgagacatagtattacatcagtccggcgttctgctgtacgaacattggtaagaattacatggaatttgagatccactgtagtttgattgtgctgcagtatcaggtgcccattcgagttgagtatgagttatataaatgagaaacagaattgtaatgaaaaatatctgcaataatttaccgggtgaaatagcagttttgagccatcttgtgtatgttttctacattgttttgccaagaaaaaccaacctatccttgggattttgccaatctggagttggatattccactctgttcccatgtgcaattggtttttgctgtaagcttctgaatgccatttgttatgctttcctagttaaaaaccgtgaagttcaaactttttgtaggagaggcttctcgaggttgggaacaccaggaattcagctaaactatggcttgcatctatattaggtgatgcgctgcaagttgtcttccagaatcttcttttggagtcaaatgatgagattattcgatcttctgaaagggcttggaaacttttacttcaggttactgatgttctggctttccgggtgttgtgaatttactcaattcatagaaatttaatgatcatgtctattacaggattatagtaacaaacaaaaatatttctatgcttgtagtgccctacggaggaccttgagtctgctgcaagttcatattttagtaattgggtgcaacttgccactactccatatggcacagcattggattctgcaaaaatgtttttgccagttgcacttccacgaggaagtcgttcaagagctgctgcaaagatcaaatctgcaaggttagaacatgaaaatacgagaatgatatcttttggttctaccggagagaacacttcacaggaaaagcattctgaagcttccttgagtgtttcaaaaataattgtggggtctgattcggacaaatctgttactcatacgcgagtgctgacgtcaatggcccttggtctgtttgcctctaagttgccagaggggtcgtggcaagttgttcttggtccactagcaagcgatctcatgtctctctcaggagtccagagacaggtaagaaaaaaccttatgttttagtgcataaaagcattcaattcaactacttgttttgcactcataattttctatcgctccaggtggcttctatggttattgtttcttggtttaaagacctcagaaaaagtgatcctgctgcggtgggtacattgctagctttcttatcctccctgaaagggtggatgttggacttactggcttgctctgacccttcatttcctacaaaagattctccgcttccatatgctgagcttgcaagaacatacaggaagatgcgcaatgaagccaataatttgttccagtcaatagaatcttgtgctcttcttaaagagtatacaagcaacttaaactttgaagctgacatgctgagtgttgatgatgctattaacttcacttcaaagcttttgttaccatctgaacctgattttagtttggacagtgataaaattgtcttgaacaatatagagtcagcaaaacaaggtctattgtctacgtcaggctacttgaaatgtgttcaggtatgtgaaatttctaattagggtgtcttcagatttatattaatgtgttagaattacttgttgcatctgtctagttctgattttttttatcctttttattagcaatatcataaaataggtttccttgtttgatgatgttctgcagaataatttgcatgtgacagtttcctctttagtggcctctgctgtagtctggatggcagggctgcctagtaagttgaacccagtcattttgcctttaatggctgctgtaaaaagggaacaggtacgacatagtattcttatgctcttaaattttgtcttagatgtaagctcaaatggttccatatcatttaggaggaaatacttcaggacaaagctgcagatgcacttgctgagctcatttttagttgtgttggccgcaaacctggcccaaacgacaaactaacaaagaacctctgcacgttaacatgcactgatgcaagtgagacacctcaagctgcagttataaactcaattcaggttattgaggaccaaaacttgctgtcgattggtaagcgttttagcaatcacaaatccaggggccagatgacttccggtggtgaatcgaagtcggagggttttataagccggcgtggatcggagttggcttttaagcatctttgtgagaaatttggagcatccttatttgaaaagcttcccaagttatgggattgccttacggagtttcttaaacccgtcaagactggagatgatcttatgaaagaagatccaagtattgcgcagttaggaagatcttgtgaggacaaggaaccgcagtcccttataaataatatccaggtttgttttataaattaatttgaattcaattggttcccttttgttttggcataaaactgctacatgatgttggattagaccatcatgtcatatcaatatgaatcaatatatctttggttacttgctactatttagtataaactggtttggttccattttcatctcttgccatatttctaatgccatttctgctcctcctcacaggttgttcgttcggttacacctcatttggctgagcccttgaggcctcaattgctaagtctccttccctgtattcttggttgtgtgcgccatcctcatgtcgctgtcaggttagctgctgcaaggtgcatcacatcaatggcaaaatcattgactgctaatgtaatggtaattgtgatagaaaatgtcataccgatgttgtcagattcatcttctgtctgtgcaaggcaaggagctgggatgcttttgagccttcttgttcagggtttggctgtggagttggttccttatgctcctttccttgttgttcctcttctaaggtgtatgagtgatcctgatggttctgttagacagactgtaactcacagttttgctgctctggttcctttgttgccattagcaaaaggttctttgttaccggatggactgagtgaacgcttatctagcagtgcagaagatgcgcagtttctagagcagctcctcgacaactcccaaattgatgattacaagctcagcattgatctcagtgttgaactgcgaaggtctgtaactatcttaaaagctcctttattggaatgtggcttgacgacgttattctacttagtttgagatagtgtattgagtgctattgtggataccatacataataatacttgttataatgattattatttgatgttcttttaacaaaatgttgtggatcgctacaggtaccagcaagaaggaattaactggctagcattccttagacggttcaagttacatggaattttatgtgatgacatgggtcttggcaaaacactccaggcgtctgctattgtagcagctgatattgctgagtcacgtgcacggaatgatgagcaagatccgaaatctttgattatctgcccttctacattagtagcacactgggaatatgaaatagagaagtacatagacagctctatcatgaaacctcttcagtacatcggttcatcacaagataggattatcctccgttctcagtttgataagttcaacgtaatcataacgtcatatgatattatacgcaaggatattgattttcttgagaatgtcttttggaactattgtgtgctggatgaggggcacataataaagaactcaagatctaaaataacatctgctgtgaaacaattgaaagcacaacaccgtcttatcctcagcggtactccaattcaggtaaaatttcattcatgaatcttgttggtatgcttttcgtctagctgttgcggttcgctttacattgcactttttatttcattgttcatgttctttgtagataattccatcgatccagtactgaaattggtattactatttatttgacacattccactataattgcagaataatgtattggagctctggtctctatttgactttcttatgcctggatttcttgggacagaaaaacaggtaaatgtgctatgaattcaactttacttacagaactgaaagctaagaatttggtcgttgacatgaaccatgccttttttgttcaagaacttagtttagtttttaacatgttcctgatttactcttacgctagcttccaagcttattagttagttcaggaataatatatggatctatggacttgctagttagttccaagcttattattagttagtttagtttttttgttattcactgtggacttgctcagagcgacaggtgatatatggatctgccttatctgggccgttacactttcttacatatgatgcttgcaaatgatatctatgtttagttgtgttataggtgctaggctgcttgataaatcattagtagtttgatgacatgcatctgtagaaaaagacattggtgactatattgtattaatgtaagtggacatatatggctgtgttcggatgagggggttcccaaccccctctccctcgcattccgtgcgcacgcttttcaaactactaaacggtgtgttttttgcgaaaagtttatatacgaaagttgtttaaaaaaaatcaaattgatccatttttgaaaaaaaatagctaatacttaattaatcacgtgctaatggactgctctgttttccgtgcggggagatgggttcccaaccccacattacaaacacacccatagaatgttttaaccaaccaaagatgaaattgtttctgctttcatgaaggggtggatttttactagtcctgactcttgataattaccttggtctattctgatatgaagtatttgtgctgaaattaaatacaatgttaattatgcagttccaagctacatatggaaaaccattgctagcagcaaaagatccaaaatgttcagcaaaggatgctgaagctggcattcttgctatggaggcactgcataaacaggtttttatcttctgtagtagacttgaagtctttaaaaataactgggggttttgagtcttgtgacctttgttgacaagtaaaagtcattttgctatactaggtcatgccgtttctacttagaagaacaaaggatgaagttttatctgatcttcctgagaagattatccaggatagatattgcaatctcagtctattgcagctcaaactttatgacaaattctccaactccaatgccaaacaagagatttccactatagtaaaagaaaatgaattagatcaatccacttctcaaccaaaggcaactcgtcatgtgtttcaggtactgcagttagacaaacattttagctttctcattctgcatttcttatgtggtatcgtgtttgcgttttaattgaatatgcttttgtaatgcaggcactgcaatatctattaaaactttgtagccatcctttacttgtaactggggaaagcccacctgattatcttgtggaccttctaaaggaaatcggtatgggaactggtgatgagcttcatgacctacaccattcccctaaacttgttgctctccaagagatacttcaggagtgtggtatagggtcagaaatatcaagccctgatgcttctgcagctattgggcaacacagagttttgatttttgctcaacacaaggtactgagtctgttctcttattgagactatgtatccctgtttcttttggtatattttcatccttgtcatgtttataaacattcttttctccaggctttgcttgacattattgagaaggacctgtttcaatcccatatgagaaggtgagttttatatattgtgatgtacatcagcttcatgaagaattcatcatgccagtgtgttgtctgtgttgcaacagatttgaaaaaaatatatcatgagttctaaactgaaaaattatatatatatatttatatattttgaaaaatcatataatattcaatcaaacatcaatcaacaaaaaactcaatccatatgcacaaaagacatttatccggtcctagaagatacggtgagatcgcagtttcaccaccaccaccagtagcagattcttttatatagtagagattaatattagctgatgcaaattattttaagcatcttgctttatgttgttttatcttgtgttttattatgcttggatatttgtactttctagagtactgcagtgctgttttatctttgagtaactgtaaatataaggttgtcgttggcctagttgataactgactaaaaatacacacttctgtttctcagtttcctgcctgtgctcatctaatcagcaaacttttgatattcattcagcgttacatatttacggttggacggctctgttgaaccagagaagcgatttgaaattgtgaaggcattcaactcagatccaaccattgatgtgctcctattaacaactcatggtaggtttggagaatgccatatggatcagggatttactcctagatatatatactagaaaagctatatctgattctttcctgttgcagtcggtgggcttggattgaatttgacatctgctgacacattggtctttatggaacatgattggaacccaatgaaggatcttcaggtttgcttttgcatattttatcaacgataaggctaccattaaatttcctccaccattttcaagctatcctctgtgaaacaaacgaacaatactcccctcttacaggcaatggacagagcacaccgtctgggtcaaaggaaagtggtaaacgtgcaccgtctcatcatgcgcggtaccctggaagagaaggtgatgagtcttcaaaggttcaaggtgtcggtggccaatgcggtcatcaatgctgagaacgccagcctgaagacaatgaacactgaccaactgcttgatctgtttgcttcgacgcctgcttccagaaaagtaaatcccttgtgaccatatatctcgtatagaaaaaacttttgtaatttttattctttatttgggtttatgatcctttgtctatggccatacgcaggcgtctgtactcccaagcagttcgggtggtgatcagagtaaagattccaaggggaaatctggtgggaagggtttgaagtccattctgaatggtctggacgagctatgggatcagtctcagtatgcagacgagtacgatctcaaccagttcttggcgaagctcaacggctgaacacacgatcaccggtcctgtacagtgtaaagcgaattggggcgtgtgatgaacaggttggcagattttgttggcaaccacaggagtcagaaatttttttgttgtttcatacggaagaagggaaaaaaaaaggaagatcgcaagatctagagcaatgtggctaacatataggtgcttgagatggtgatctcaaatttttgtcttttgagcttttggttaggagggtttagagagagatagagctagtcttgagaggagttgtatatactatctgctcattataataattaatcaaaggctgcagctccttgtaaattttgccttgagttgcttactgtttctaccttttacttggcctagtaactgagctatccagtggtgtagtaagcctgcctactgggaacgcggatcatttttgtctcgctaacatgtgaaagtaatagtaagatcgggtaaaaacggaaaaggggtgatacattcttgcctatcaatccttgctcgtctgaatcccgttttggccgctaaggaagttcccaaaaatttttcctgttcattgtctgaatcccgttttggccgctaaggccgttttggacaaatgtatagagcacaaaatatatattaaaaaaactaattgtacagttatggagaaatcgtgagcttaatcagttcatgattagccataagtaatacagtaacccacatatactaatgacgggttaattacttaatttggctcaaaagattcgtctcgcggtttccaagcgagtcatgaaattatttttttcattcgtgtccgaaaaccccttccaatatttagtcaaacatctgatgtgatacctaatttttttttcgtgaactaaacggtccctaaaaggaagtcatctcagccaatgtgaaactgatgacctttcattcccttctattctttcatcgttgtaattgtgacatgttagactataactttcatcagttagaaattgatcccttggtctccctttattattattttttgttcgacccttgcttaggccatgtttagtttcaaaggttttcttcaaacttttaacttttccatcacatcagaactttcctacacacataaactttcaacttttccattacatcgttccaatttcaaccaaacttctaattttgatgtgaactaaacacaaccttagatgcatatcttttcaatgtcctttgtttctacatagcctacatagtaagggtagaagcggtgtggaaattttctaaccataccgatacagtttccctaaaatattacatagtcatgctgtagcagcactcggaatatatatgatctagttagactagttcttctctcaactttctcagtctcccctttatttttcacacgcacgtttcccaaactactaaacgatatgattatttttttttgaaaattttctataggaaatttgatttaaaaatcatattaatccatttttatttttaaacttaatacttaattaatcaagggggtcaatccactgtttcatttttcgcatagggaggagttcccaactactccctccgtccctaaatatttgacgccgttgattttttttaatatgtttgacggtttgtcttgtcaaaaaatttaagtaattattaattcttttcctatcatttgattcattgttaaatatactactattactcaagtttttgaataatattcacaaaagtttttgaataagacaaacggtcaaacatgtttaaaaaagtcaacggcatcaaatatttaggaactaaaagagtactacaaacgaacgaagcctaggcttctccatataaggctgtgtttagttcacagcaaaattaaaagtttggttaaaattgaaacgatatgacggaaaagttggaagtttgtgtgtgtaggaaagttttgatgtgatgaaaaagttggaagtttgaagaaaaactttggaactaaaccaggcctaaatgaacattcgatggctcctctagaaacattcttgatcttagcattcagtttggaagatgaaatggcattcacacgagcattgcagattttcatggtccatctggctagcagagaccagagcgtcgtctgcaaatgcatgatctgagcaaacctttgcagtctttgctgcgttgcgttgacggtcagtcaacccacacacacacgcatcatgcaacacattgacagattggccttaacttcactcggtaatttatttcatcgctgtaactatggcatgttagactacaactttcatccgttagagcaggtacaatagcaggctgtaaacatattttaataagataaaagatgagagagaatagcagtgggctatagatctatagccagctgcagcgtggactccaagacacaatgtgtgtatgacaggtggtaccatatattaatagtatagtaaacaactatcgtataaattacctattatattggctataaataaattaaagttagtagtgggttatactattaaacttgctcttagaaattgatcccctggcctccctttatattagttgcattcctttgaatgttccacacttgtttagcgaattaaatttaaaaatatactgttaatttatttttttttctcgaaattttcaggatatatttttttaacagaaatatatcgtcgttctgtcacaaacattacacgaacatgacgacgcgggcgagacggcgctacctcacacgatgaaatagctagaccgagcagtaccagcgagcgagaccgaatggctggccgattcaaactgtttaattatctgatattaattaatcgctaattagaatgattaatcacttgttattattaattaattgctaattgggtaagtctctaattatgcggcagctcactgggcaagccgttcgctctctgctcattcattgtgcgagattgcttggtctcgttgtttcgtcacgtgagaccgcgcgatacgctatggttgcgcacagtcaccgtgcaagaccgtccgcgtcatcacacctcacgttgtttgagatcgacagtttatttctattaaaaaaataaatcaacagtatatttttaaatcaaatctaattacttgtttagctgtatatcttttcaaaatcgattatccctacatagcatatgtagtaggggtaaaaacggtgtcgaaattttccaaccgtaccaataccatttctaagaaatattacatggggtgtgttatgttgggcttttcaacctgcttttacttttgcttttgcaaaagttaaaagccaactaaagggctcaaaaatcataagtacttttgctccaaagctgcttttagtgcagtacaaatctaaaagcacccctacccctgctttcattggcttttgagtaaaaaaaaattacccgcctctctcattataaagaaaacggttcgacaaaaataaaaattaattacacagattacgtgtaaattacaagacgaatcttttaagcttaattgcttcatgatttgacaatgtggtgctacagtaaacatttgctaatgatggattaattaggcttgataaattcgtctcgtagtttacatgcggattctgtaatttgtttggttattaaactatatttaatactttaaatgtgtatatgtatatttgatgtgacacagtaaaaaactttacccataaatctaaacacagtcttaatattctacgcgtgtcacagtgtgaaattttttgttatgaactaaacagtttggaagatgaaatggcattcgcacgagcgttgcagattttcatggtacatctggctagcagagaccagagcgtggtctgtaagccagacagcccatatgcatgatctgagcaaaccttgcagtcgttgctgcgttgcgttgacggtcagtcaacccacagacacacgcatcatgcaacgccattgtcagattggccttaacttcactcggtaaggcctggtttaggccatgtttagttccaaaaactttttttcaaaaacatcacatcgaatctttggacatatgtataataaaaaactaattgcacagttatggaggaaatcacgagacaaattttatgagcctaattagtccatgattagccataaatgctataataactcacatgtgctaatgatggattaattaggctcaaaagattcgtcatgcggtttccaggcgagttatgaaattagttttttcattcgtgtcccaaaaccccttccaacatctggtcaaacgtccgatgtgacaccaaaaaattttcttttcgcgaactaaacatacccttaagtttcccaaatttttttccaaaaaacatcacatcgaatctttggacacatgcatgaaacattaaatatagattaagaaaaactaattgcacagttagaggaaaatcgcgagacgaatcttttgagcttaattagttcataattagccataagtgctacagtaactcacatatgctaatgacagattaattaggctcaaaagatttgtctcgcggttttcaggctagttatgaaattcgttttttcattcgcgtccgaaaaccccttcccacatccgattaaatattcgatgtgatacccaaaaattttcttttcgcgaactaaacaggccctaactcgactcattcactcgcgaactaaataggccctaacttgactcattaaggctgtgtttagatccaaagtttagatccaaacttcagttcttttccatcacatcaacatgtcatacacacacaacttttcagtcacatcatcttcaatttcaaccaaaatccaaactttgccctgaactaaacacagcctcactcactctagtcccagtcaatctaggtggctagctgacagcaaaaaattttcgccatgtcacatcgaacgtttgaacatctgcatgaagtattaaatataggttaaaaaatcacatattgcgactaatttgtgagacgaatcttttaagcctaattgctccatgatttgataacgtggtgctacagtagacatttgctaatgatggattaattaggcttaataaattcgtctatctgtttactgacggattctgtaatttgtttacctgaatacctcatatgacaccccgccaaaactttaccccctcgatctaaacacccctgaatttgctatactagtatataatattctccagccggatccttcctctcggacgcagcaatggcaatgacgatgctcttcagtctgctgttttgcacagctaaggctactgatgattcaggagcagaaactgaagcagaagcactcctccgatggaagtccactttgatcgacgccaccaactcgttgtcgtcatggtcgattgccaactccacctgctcttggttcggtgtcacctgtgacgccgccggccatgtcactgagctcgaccttcttggtgccgacatcaatggtacgcttgacgctctctactctgctgcattcgaaaacctcaccaccatcgacctcagccacaataatcttgatggtgccattccagcaaatatttgtatgttgcgcaccctcaccattctggatttgagcagcaactatcttgttggtgttatcccgataaatatttccatgttgattgctctcaccgttctagatttgagcggcaataatcttgctggtgccatcccggcaaatatttccatgttgcacaccctcaccattctggatttgagcagcaactatcttgttggtgttatcccgataaatatttccatgttgattgctctcaccgttctagatttgagcggcaataatcttgctggtgccatcccggcaaatatttccatgttgcacaccctcacctttctggatttgagcagcaacaatcttactggtgcaattccctaccaactcagcaagctccctaggctcgcccacttaggtcttggagataaccacttgacaaatccagaatatgccatgttcttcacacccatgccttttttggaattcctatctctatcgagaccttttacagtgtttacattcctaaaatggcatagatctaacggttcacgatgaaaggtaccttatgaaaggtatcagaggtagaaaggtactaagtattaaaaggtaattgataacagggcaattatgtctaacaacgtatggacgtaccgaaaggtacggtgtaagtggatttgaaggtaccacaaggtaccacgtaagtagtttttaaaggtaacgtaaaatatgatttatgtggtggggacaaaaattacattctcttctattcggtttccaatcttcggtcgttctgtttgcgtcggtttccaaactttggtccgatttacgtggtacatatcatattcgcatgatcttgataattatttccagatagtcattaatttacatagcaatttggtgatccatcgtttgatgaatgtaatcaaagatcgaaaggacaacaaattgagaagatttacgcacctaacaagaacaaaacaagttcaatgaggaagatttgcgaaaaaaaactaaacaaatcgtctgacagatcgggaccgtgcggccgcttctagctccggcgaacatagacagtcttggaccacttcttcagggtcctcttcttccacggcccctccctccaaccaccgcctccggccacacgtccaccgccggccctcaattctcctcctttcaacttatcgaagaacacgtaaaccttacgtacgaacagaacgtatctaagaatgatgcaacgcaacatgctacaagctaattccttcgataccttctcatacctttttatatgtgtaaaagacacatttgtcattctaatatcatcatatttacattaatgccacctattacaatattttctttccataccttgcccctcgcagatcaacggctcacgtcgccccacctcctttacctcgcaaacatcgtaaaatccctcatctctatcttacaattatctcaacggtacttttccagaattcatcctcaatagcaatagtttgaggatggagcacctcgatttatcgtataatgccttctcatggtccataccagattcactaccaaatttgagggttctagaactgtcgaacaatggattccatgggaccataccacattcactctcaagactacaaaagctccaagacctatatctgtacagaaacaacctcaccggaggaatcccagaggagcttgggaacctaaccaatcttgaggccctgtacctgtccagaaaccggttagttggaagtttgcctccctcttttgccaggatgcaacaattatcattttttgcgatagacagtaactacatcaatggtagtatcccgttggagatattttcaaattgtacttggctcaactggtttgatgtttccaacaacatgttaactggaagcatcccaccactaatcagcaactggacaaatctacactacttggccctctttaacaacacatttaccggtgcaatcccatgggagataggaaacttagcacaagtatatttagaggtggacatgtcacaaaatctatttactggaaagataccattaaatatctgcaatgcaactttggaataccttgcgatcagtgacaaccatctagaaggcgagctccctggatgcctgtggggtttgaaaggtctcgtttacatggatttgtcaagaaacactttttctgggaaaattgcaccctcagacactcctaacaatgattccgacctactcgccctggacctgtcaaacaataacttttcgggttatttcccagtcgtactgaggaatctcagcagactagaatttttgaatcttggatataataggatttctggtgagattccttcgtggataggggaaagtttttctcatctgatgattctacagctaaggtcaaacatgttccatggaagtattccttggcagctatcacaactccccaaactacaattgcttgatctagctgaaaataattttacaggctccataccaggtagtttcgccaacttatcatgtttgcactcagaaactagatgtgtgtgtagcttaattggagtatacctcgatctagatagtagacactacattgatattgattggaagggaagggagcatccatttaaagacataagtctacttgcaacaggtattgatttatcaaacaattctctctctggtgagatcccttcagaattgacaaatcttagaggtattcagtccttaaatatttctagaaattttctacaaggaaatatcccaaatggaattggcaatctaacacatttagagtctcttgacctctcttggaataaactctcaggccatattcctcatagcatatcaaacttaatgagtctcgaatggcttaatctctcgaacaaccttctatcgggagagatacctacaggtaatcaactcagaacacttgatgacccatcgatttatgccaacaacctggggctttgtggatttcctttgaaaatttcatgctcaaaccattcaagttctacgactacactagaaggggcaaaagaacaccaccaagaactggaaactctatggctgtactgctcagtaactgcaggagctgtctttggtgtttggctgtggtttggagcactgtttttctgtaatgcctggaggcttgctttcttctgtcgcatcgatgccatgcagcagaaacttatgtaaaacatagctcatctgagtaatatgctctgcttctcattgagtccacctgagcgtgtgtattagtgtcacattatgtcagcactgcactaagatctaaggttcagtaggtattatccctttatttcagccatcgatgagatgtaatttgctgttgccagatttagcttgttgttgttgtcatgatgaactcttgttataagcttttagtgtaagtcgggtagcatccttggtcagaaaagaaaatttacatgttttgatgatgagaccaatttcctacatggttgtgtttgaagatgcaagtagcatgtaatcaaggaagttccaaataaagtagaatacatcatggctgtcttttgatgtatttgcaagctttgttattacctttggatgcatacagacttcatttgacgctaatttggagaattttgtcttattttctgttcaaactgtaagctgtatgtattctgttttttttttctcatcagctataaattactgcagtacacttctaagcaaaagaacacagctttgccggttgcagcaacaatactgaacacaacaagaacacgcgtggcaaaatttctattactagaatttcaccaaattccgacaaaaaaggtggagaaatcataagaacaaaatcacgctatccactgaaaatttccaggaagaattgcaaatcaactccccttgtgatcagtggccgctgttcacgacagcgcagttcctcctgatctccccctccgatccggtcttgacctgcaccgcgcccagcgtcgccatcgaccggccgaacacctggaagaacacctccggcgggctcgccacgacgccggcgatgtccgcccgccccgccacgtcggtggcgagcgcggcgttggaccggagcaggccgcggtgttagagtatatgatagttaaagttatattaggatatgattggtttgtttggattccttccatatctataatacttccttatttcttcctcctatatatattggatcccctgagactcaatacaatatgtcccacgttacgcagtatacctctcctatactatacaacatagtatcagagcgggtgatctaaggccaatgccgctcacgcttccgctcgtcccccccgaagggtttcgatctcccgggggcggccacccgtttcctttttttttcgctcgtcgagtcttcgcggcctgcctccccagaggagtcaatctccgggctgcggccgcggcctgtccgtcgtcatcttcgcgtcagcaggccctccgtcaccgtcccccgcgccctcagattcgtctacaccgccagcgtgtacgtcgccgggtcacccctccaccggcgcgctgctcccaacggcgccacccccgtgccggtggctcccgacgccaccagcctcctcgactccgccgcgaccacgtggtgaccaccgcgccaacggccgacctcagctccgccctgccggcatctggaggacgccagcagggcctgcgcctcaccattgccggccgccaccaagctccggctgcgtcggctcccggtccctgccggtcaagcacgccgccctccccgcgccacgtctccaggaacaaccggtctcctctcattcccttccaatggtctgtctgcacgtgtcacatgtgtgggtggataagttttggggggatagctggctactggtacggctgaggcaaaaggttagctggactttggcctatgtaccggaccatcgagcaacaggggatgctaccgtactgttgctgcttgtatttttttttcgcccacaagagacaattctttttagcctctaagagacaaaaagaagagcctaacaaggaccttgagataacagcccattcatagaacgggtttgcgtcgcccaccgcctcgtcgacatctacgcgtctccgatatcggtatcgactctgcttcgactttatcgttccgcctcgcgcatcttcggcttgatcacccgttcaagcgcccggctacaacgacttctacaaccgatcggcatcaagcacgcgtctacactatcaaacttcgggttgccgctgcatcgccctcttgggctgcagtgtcgccgcccatggtccacctccactggttgttggaacactgagaggcaacacctccactgcctcgcccgcgcggtattggcaacaccggcgcgcgtgttcgtcccgagttgtccccgggtctggcaaatccggcatgacgtctcgtctttcacggttcgactacatcggctcttcggcatcatcttcctcaacgactgccgcgattgtgtcaccgtcttcgtctcccgcgcatcctcgcgcaccttggtccacgatgcccctcccgtgcgtccacgaccactctacgacggcccatgcgcgctccgcggctcggctacctcgacatctatttttcgaccacagcactcttgccggtttcttctccagtctaagtgtccgcactgctcacgcttggactgcggggggatgttagaatatatggtagttagagttatattaggataggattggtttgtttggattccttccataagtgtaatccttccttatttctttcccatgtactcctgtatatatcggccctctgaggctcaatacaatatgtcccatgttacgcagtatacctttcctatactattcaacacgtggtgcctgagcaccgtgcggtagtagccgaggtcgaacgtcaggtggctgccggggtccatctccaccacgccgtcgccggctgtcctgcacttgcgctcacgcaggttggcggcgtccagcggcggcgggtcggtgctgttgctgttggcattgccagcgccgccgccgccatagaggcggtcggcgaaggatggtgtgcgcacctgcgcgatcggatgcaatttttcagaaatcattttacatccaagaattcattgtgataatgtcacacatgtgtcctcattcttgcacaaaaacaagcttgaatttttatgatgttggcttgctgtagatcgccattttcgggacatgaatcgagcatccaaacgattgggttgaaatgcaatttttttaatgaaaaaatcaacgtaatttttcccctgttgattgtcaacaaagaatctataaaattttctcaagacatgcatgagagagtctgcagctaatttcaaattttcggttgatttgatgctctaacatatgagattatataaagctaatttttgttcagtttattataccagtcataaatcataacagtataaaattgactatagtcaccaattatagtgaccctccccaactattgaaaccagggtaatttaactcacaatacagtattgatagtggtatttactaacgtgacttctacgtggcatcccaaacatcaaataaatttaaaaactaagtagggctcgcctgcaaccccccccctcccctcccctcccttctacccctctactaacctctgtccacctctctctccccatttcttcttcttggcctaacagcagcagggtgccgagacgacgacggggagcagcgggatgatggcgaggctctcctttctctcccaccccggtcccttctgtccaggcgctagtggaggagtggccggccgagtgagatgcggggtggcagtaggcagcgagcccgggtggtcctcatcatcctggccgggtcgcctgagttcgagttcttggatggtggggaagaacccctcctcgttccagtccctagaattcgagttcaagttctagatagtgggaaagaacactgcgagatgaccacagcatgcctgctgtcaccgtcgtgcgggtatcacggcccgattggctccgcaaagccattgcgtgggtgtcacgggagcacgaatgagccgctgtggcacgtcatcctctctcccctctccctcgtacatctccacctctttcctcatatatctccacctcttccctcactcttcttgtgggctctggcggtgtgacgaccagcaagaccatgggcagtgcctagcggaagatgaaccaaagatggcagcgaccatcgcaagtctcaacttaagagtgatgagcatgctctccctcctcccgaccacgcgccaaccatgacgctgccgccatcaccgccaccgcgccgcgccgtgctgctcgaccattatcctcctagttgtgcgtgcacccttatatctcccctcccttcccactcggggattctctctcactttcatctagtgcgtgacggagcgctggcggtacaccagtcccccagccccttctctagcgtcggtggcacactagtcccccaacctcctctttggcgccggtggctacctccggcccgggcccttgccactgctccctccctcgccactgccgatgggggggggaatggagatagatattagatagggagggggatagtgagtatgacaagtgggtgatatattttctttttaaaaaaaatattttttttaaaaaaaaatctctagtcacttacatatggaccttcaatttctactttgtgactatgctaccatatcaacacagagttgaccaagtcaacgagcaatgtcagcgaaaaccgttgagaaagtcaaattgtaccggtttaaataactagaggtccaaggtattcaagatcactaattagcgatcgatcgccccagacgatcatttttcttttcatcactttcccttttttacaccatatagtttttcttttggtaagtttatatacttaaagtttctacatctaaagtttacgcacctaaattttaaacacccaattcaaatttaaattcggatttaaatttgtagagcgaatatttataagtcaaaagtttatatagccgatttaaattcaaattcggattcaaataatttatatatagaatatttctatacataaagtttatgcgtgcaaagtttacggtataacctaaagtttatccgtttgtagagcgaatgtttataagtcaaaagtttatatacctgattcaaattcaaattcggattcaaatattatatatatagaatatttatatacataaagttttatgcgtgcaaagttttacggtataaagtctatgcacatgaatgagagtattagatgaaatttatgatgaaaggagggaagggagaggagtataaggggttgatctcccgcccatttggggctcggtattgaggttgtggagtacgattaagattggagccgtatttgagggagtcaatgtggacttattgcaagccagaaagccgacgtttccgcggagttctcaattgggcccacaacggcccatataacttggtccggaacgggattgcatggtaggagcggcccacgttgtgtgtgacgacgccgactccctcgacaggccgccgcagcgtggcttgccactacccccgcgcttcgctgtgtccgcttttccagcacagatcaaatggccgccacctccggcgagctcctcacccacgcaaccatggtgctctcgctctctccgattctccagcacaaaccgacggcgagcttgcctccttatcctccgatgtcggatttaagcaaaggcgagataaggatctgccatctccttataataaatagtactattagcatccatttgatattggcaattcggctttgtgtataacatcattggtgatgtggaatggtgacgctgtcagtcagtcagtcaaagtaatcaaccgcgtggggtgcttttatctcgtgaatctttcctttccaagatgggtggtgagctgcgcaatagattagagagttgggtgcccattatcattatattgtcattataaattcatccatcctgcaaagtttttcttgacgccgagcatgtcaatgggcaaaccaatcctcactcagtctcggtctcttcgcccgggtgaccgatagtggcatgttaatgcagctttagcttccaactttcagttagaaattgatcccacggcctcccttcaattttactttttttctttttgtttaacacttgtttagcttgcatatgttttttaaatatttcgtcagtacatagtcatcctgtagcaacacccagaatatgtgtacaaagtgctacctacggagtatttgacactgggaattcaacttattatcaacaattcttatctatactaacatccttggtgatgagacagtcaagtcatcaactatgtggactgtggagtgtctttattctgtgaattttcccccagccatataaacattccatggtctggtatgtccctcatggtccatctgtctagccgagcccggagctttactgaggccgtttttagttccttttttattttttttaaagtatacagacacacatttgaattattaaacatagactaataacaaaacaaattacagattccacctataaactgcgagacgaatctattaagcctaattaatccgtcattggaaaatgtttactgtagcaccacattatcaaatcatggcgtaattatgctcaaaagattcgtctcgcaatttacatgcaaaccgtgtaattagttttttttccacatttaatgcttcatgcatatgtccaaatatttaatgtggtgaaatttttgaaagtttgaaaggaactaaacacggcctgagtcatctgtacgcctgccagcccatatgcatgatctgagcaaccttgcaggctctgctgcgttgatggtcagtcaacttcactcaacaagtcactcactccagtcccagtcaatctaggtggcttacagtatttgaatgaatttgctatactattatataggagtattctccaaccgatccttcctctcggacgcagcaatggcaatggcaatgacgatgctctttagaatctgagtctttctgctgctgttttgcacagctaaggctactgatgattcaggagcagaaactgaagcagaagcactcctccgatggaagtccactttgatcgacgccaccaactcgttgtcgtcatggtcgattgccaactccacctgctcttggttcggtgtcacctgtgacgccgccggccatgtcactgagctcgaccttcttggtgccgacatcaatggtacgcttgacgctctctactctgctgcattcgaaaacctcaccaccatcgacctcagccacaataatcttgatggtgccattccagcaaatatttctatgttgcacaccctcaccgttctagatttgagcgtcaataatcttactggtacgatcccctaccaactcagcaagctccctagactcgcccacttaaatcttggagataaccacttgaccaatccggaatatgccatgttcttcacacccatgccctgtttggaattcctatctctatttcacaatcatctcaatggtacttttccagaattcatcctcaatagcactagtttgaggatggagcacctcgatttatcgggtaatgctttctcagggcccataccagattcactaccagagattgctccaaatttgaggcatctagatctgtcgtacaatggattccatgggtccataccacattcactctcaaggctgcaaaagctccgagaactatatctgcacagaaacaacctcacccgagcaatcccagaggagcttgggaacctaaccaatcttgaggagctggtcctgtcaagcaaccggttagttggaagtttgccaccatcttttgccaggatgcaacaattatcattttttgcgatagacaataactacatcaatggtagtatcccgttggagatgttttcaaactgcactcagctcatgatttttgatgtttccaacaacatgttaactggaagcatcccatcactgatcagcaactggacacacctacagtacttgttcctcttcaacaacacatttaccggtgcaatcccaagggagataggaaacttagcacaattactttcagtggacatgtcacaaaatctctttaccggaaagataccattaaatatctgcaatgcatctttgctataccttgtaatcagtcacaactatctggaaggtgagctccctgaatgcttgtggaatttgaaagatctcggatacatggatttgtcaagcaacgctttttctggagaagttacaacctcaagtaactatgaatcctccctaaaatcactgtacctgtcaaataataacttatcgggtcgttttccaacggtattgaagaacctcaaaaacctaactgtgttggatcttgtgcataataagatttctggtgtgattccttcatggattggggaaagcaatcctttgctgaggattctccgattacgatcaaacttgttccatggaagtattccttgtcaactgtcaaaactctcccaactccaactgcttgatctggctgaaaataattttacaggtcctgtaccaagtagtttcgccaacttatcctccatgcagcctgaaacaagagacaaattctcctccggtgaaacatattacattaacattatttggaagggaatggagtacacttttcaggaaagagatgattgtgttattggtattgatctttcaagcaattctctctctggtgagatcccttcagagttgacaaatcttagaggccttcagttcttaaatatgtcaagaaatgttctatatggtggcatcccaaatgacattggccatctacatgttgtagagtctcttgacctctcttgcaatagactcttgggtcctattcctcctagcatatcaaacttgacgggcctcagcaagcttaatctctcgaacaaccttctatcaggagagatacctataggtaatcaactccaaacactggatgacccatcgatttatgccaacaacctgaggctttgtggatttcctttgaaaattccatgctcaaaccattcaaattctacgagtacactagaaggggcaaaagaacatcaccaagaactggaaactctatggctgtactgctcagtaactgcaggagctgtctttggtgtttggctgtggtttggagcactgtttttctgtaatgcatggaggcttgctttcttcagtctcatcgatgccatgcagcagaaacttatgcaaacataactcatctgagtaatatgctctgcttctcaagttctcattgagtccacctgagcgtgtgtattagtgtcacattatgtcagcactgcaccaagatctaaggttcagtaggtattatccctttatttcagccatcgatgagatgtaattttctgttgccagatttggcttgttgttcttgtgatgatgaactcttgttactagcttttagtgtaagtcgggtagcatccttggtcagaaaaaaagaacatgttttggtgatgagaccaatttcctacatggttgtgtttgagatgaaagtagcatgtaagccaggaagttccaaataaagtagcatacatcatggctgtcttttgatgtatttgcaagctttgttattacctgtgcatgcatacagacttcatttgacgctaattcggagaattttgtcttattttctgttcatactgtaaactgtatgtattctgttttttttttctcatcagctataaattactacagcacacttcaaagcaaaagaacacagctttgccggttgcagcaacgacactgaacacaacaagaacacgcgcagcaaaatttctactagaatttcaccaaattcaaatgacaaaagtgaagaaatcgtaagaacaaaatcacgctatcccaggaagaattgcaaatcaactccccttttgatcagtggccgctgttcacgacagcgcagttcctcctgatctccccatcggagccggtcttgacctgcaccgcgcccagcgtcgccatcgaccggccgaacacctggaagaacacctccggcgggctcgccacggcgccggcgatgtcggcccgcgccgccgcgtcggtgactagcgcggcgtcggaccggagcaggccgcggtgcttgagcaccgcgcggtagtagccgagatcgaacgtcaggtggctgccggggtccatctccaccacgccgtcgccggccgtcctgcacttgcgctcacgcaggttggcggcgtaggcggcgtccagcggcggcgggtcggtgttgttgccgttggcattgccggcgccgccgccgccgttgtagaggcggtcggcgaaggacgagcagtgggcgatgccgatggtgtgcgcgcctgcgcgatcggatgcaatttttcagaaatcattttacacccaagaattcattgtgataatgtcacacatgtgtccttaactcctcattcttgcacaaaatcatgcttgaatttttatgatgttggcttgctgtagatcgccattttctggacatgaatcgagcatccaaattttcggttgatttgatgctaacttacgagattatataaatctatttatttcagtttatttacattggtcataaatcataactgtagaaattatgacattgctgaacaagttaagtcagttcaatggtagataaaattgactagtcatcaacacgaactgacagatagaaagcaactattattcgtgctccttttgcatgcagacatgcagatgcctagtcagcaaacaaaggattggaaattcagacacaaagctttcctctctgaaattaatcttacagcttctacattatgtctcccaccgacagtgcagattaattacatgctaatagtgtagtttggatctgattaactagagtaatctgtttagtttagctgataactgagattaattacatgctaacagtgtaatttggacctggttaactagagtaatccaagttgtttagtttgtgcagataagtggtactaagtatcctcggtttcataatataagttgtttcgaattttttttgtcaaatttcttgaaaatttgatcaaatctctacaattataaaaattaaagatatttccgcgatctgttatctgtgtttgagtcggttttaattttatattttgattttaatctataactctatctcttgtctactattataaaaattgaagatgtttttaccggtactttggtacgtcatctttgtatgagtcgatttttaagttcgtttgcttttggaaatacagatccgtatttgagtcaggttttaagttcgttcgcttttggaaatacagtcatataagaaatctcaataaaaaactcacatgctaacttggcatgattttctagaaaaatatatatccaagcgaattctcacggtgaatttcagagtgaacaataataagattaaaatagacttcacccattacaacgcacgggcattttttctagtttataaaaaaaatataacactcataacaccaaattaatttcattacatctaacatttaacatattttgataatttctttgttataggttaaaaatattgctatgtttttcaaacctaaataagtttggcttagaaaataatcaaaatgacttataatatgatgaaacgaggatagtaattaataatgtgaattaatgaattcgttcataatcgtcacgtacctgacagccagacaaggtcacgcacgctgaggcccttggtggcgaacaagccggcgagctccgggaagctcatcgccggcgaggggatctccgcgagcgcctcctgcatgctcgacaccgtgccatccctcctccccgtcggcacgcgccacgacggccctccctgcagagcatgttcagcatcgtcaggctccggccagtgcgcgcggcgcgcggcgaccgtggcgagcgctcgagagcttacgatggcggcgacggcgtcgcgggcggcgagcgcgagaacgtcggcgcagaagacgacgcccgggcaggccgcctccacgaggcccttgacgcggtcgatgaggtcgaaccctcgcagcgtctggttcggcgccgcgtccttctccgccgcgccgccattgccggtcgagttgaggaggatggacgcgtcgcagccctttttgacaaacgcacaacacattccatcaaacacattgcagacattgcacgcgcatcaatggcggccgcacggcgcggcgcggcgcacgtaccctgacgaagcagtcgtggtagtgcagccgaaggagcgcgacggcgacggtgggtacncggccgacgtgctgccggacgtactccccgacgatccgctccgccgcggggcagctctcgtcgtagaaccccatcctgagctgcgcgcgcgcgccgccgatcacgccggcgccgaggacgacgatgaccgccactccgagccggatcaccgccattggcacgccgcccgcgcgtcgcctcctcgtgctcgccattgccgcccactcgactactcaactcaacttaactcaactcaaaacttgtgaagtgaaccgcttatatacactagtatttatagtcctgagcttacttaacagacatttcttcagagagtgagattacttcaaacttagttcgaaatctattttttgagagaaaaatgcagtataaaaagctgatggactacttgcagacgaagccgaatccaccntgaaaattcaaagccgg

SEQ ID NO: 16535 - DNA, 10251 bp, Oryza sativa
  unsure (1)..(10251): unsure at all n locations
cgcgagtgagacntcacattgttacagtagctcatcatcgagaaaatttcacaaaactgcttaggctgtgttcttcccccattttcccaacccacctctcttgttttccgtacgtatgcttttcaaactgctaaacggtgtggtttatataaaaactttatgtatgaaagttgtttaaaaaaatcatattaatctatttaaaaaaatagttaatacttaattgatcatgcaataaaatgaactttgttttgcgtgccgaggaggaggggttcccaaccccctcctccgaacacagccttatttggtaacggatttgctaaaataactactcccaaaacttccaaatttgtgaccatcggatcgtcctacgatttgtgcatgaaggaaaaaaaatttcacacatatcacacgtaagatcccaatattagctaactaaaccatagttgaatgcaagttttatataagttgttatatctgaaagtttttgactcaaaaaatttgtggcaattctttagatactccctttggcaaacaccatcactttgtataactttagctggctatttttcataaaattgtaactttagcaacggaatttatcatataactactaatttatcccctatgtgtgtaagactaaatatagcaaatacacccgccagttctaataccccgcacacacctatgcaagtcaaaacattttgctctaacacccacaattgtcatgggtacaagatttcctccgtacctggatccaccaccgattggaatgggaaatggtaagagactgatgtgaaggagactagagatgtgatgagagtgtgactcctcaatcccgttttccctaccccctataaccgcatgagccccgctacctcccttgtcttgtcttggtcgcatagcaactcacgagcataatgagtcatgagtggttctagccgccaccacgagcactgccttttacttgcggtttgtgtggcaatggagaatattggtaggattgataggtggttaggtgagatgatttcatactaagatttggtcttaggccactgtaattttttttcgctagatctacgagtgttttttacccatggtagacgggacgggtgctcatagaatggacccaaactcatctacctgatgggatatagttttgcccaacactatacacatgattataagaactggactatataaagctactaaaagagtaaaaacctaccatggtcacgggaccacatttctagtatgacatatacccaatttataatggacagtgtatgtggacttaaacttgtcacacaaattaagttgtatctttctttttgataaaaccatacactaatattgcaattctttaaaatacgtggataacattgtagcaaagtgatagattgataaaatagatccagttttctgaaatataccatatcctactaattattttttcgtctttagggtgctgaaggttttggtttccatcacacggttgaaaatgttttggctttcaaaaaatgaaaagaaaaggtttgactttaaaaataaaataaaaatatctgggaaatgacacatgtggggaggggtcgggatatgaatactcttaccaaagaaaatagaatctaacgataggctgagttcagaacttcagatttgatactgaatgttatagcataatagcatgtatgaagtttcaaatctatctatgtgaatgtgattatgtatgaacaatgcctctgcaaatgggactttttacatggtctcgggcgaaaaaatataaaatatctaacataatgtatgtatcttagtatctaagattgtatctatcttcaatcattagagtctgagctatcaaaatgatgatccaaaacagcaggaaactgttgctcctgaggatttgactgggatgatgggttattagagttgccattggcttgagatttatttgttgccttcttttgtgaagcaccaacctccttgcatgccttatctagcatcaccagaaaatctcttacaatgacgaacaggcgaaaaccgtcatctttctcatcatttccatggaaatatcgaatcgttctcttcactaacatcctcaatctcttgtcttctttcaggagaaaattggtctcagtctctgcatgttctatgaaactttctaacgagcggtggaatccactgttctcttctagcgatgccatgtcggagttcaggaattctttggctctcaataattcgtgtcgcagatttgccacacttgtagacaaagcatcagcatccagtgctgctactctcttgacattgtccagctcattactaagccctgatacaatcttaaggccaaggttggagtagtaattgccatcctcctgtagagattcattggaattgtcatccgaagtactaggaaatggtggacttcttccattttccatggcgagtcttgcttcgcgaacaccttcagatcgaatgatctcttgaacaacaaagtgcagcaatgtggtcttcccatcagctcccttgacatctgataacttaagaagagtgtcaagtttgaacgcgttagcaccaccacggaacgtcccatcattcaaacgatttccagttttgagaatggcttctagtagtttcagaaaaaggcggtgcttgagttcaccgcaagcagcctggcacaaacagataaaaaactgaacacttggagaaaaaaggttggaatacttcgcagatttaatacagaagtcaactactttcagatggattacctccaattggaggaatgattcccttagacttgaagcatcttcctgcaaagaggacatgaaaagcaaagctctaatcctctcgaaagcaaaaggaatatcaattagtgccttcatcacttgttctgctaggcctagctgcgagcagtccccattataaagcctgagtttctgttcctcctcatcagtcggtttcatcctcaagattgtctcaagaagtaatctaggaagttcattcccttcataacataatgtgacagaagacaatgtcagaagtatattgaagtgaaccagcacagcatcaactttgtgtgtactacttagacctcaacagctacatctagtgaacaagagaacatatgatatagtaaatgaccaatgcatacacaatatgaaacatgttttcactgtgattgcctgatatgaaatgagatgggccacaatcacaaagacagacaagaaactaaaagaggatggccacaaatacatgtgcttagaaatgcacagtatatagtttaataagtaaacttgctatagttgcagtcgaattcttgtatcagttaaatagaatgcaacgagcattccattttttcaaaaggctcatttataagtgcaatgttatctttggcggtgcaaacatattgtatttacagcgataatggaaactttaggagctttttttttttttggcaaatgggtaagtaggctgcatgtaaatatatgcaatagttcaactaccttcaaccagagcatcatgaatttcctctgccctcacattcattgccttaaaaacaactgccagattgcatgatttcttaacatcaagaagagaaacatgctgaggtgaaggatctgcaatggaaatttccttgtccttgacattgttttggttgccagcaccataaccaaacaattcttctatcatctcctcgttcacactgcagaatgcagtcgtcagttgcaagcctaaatgaacttagaatacatgccattgctaaatttaaaaacttactgaaaagaaccaaatttgatgtcatgccaggccattgactgatcaggattagcaagaactttatcccaatagaaaggccggagcttggctcttggagcattcacctcagtttcagacgattcactggccagctcgcttgcagatgactcttcagaacgacttgactctgtaggtgacagcttaggaaatcttgccatggtggctttaggaggtgcaggtggtggagcacccttcttgataggtggaggcggaggaggtggacgcggaggaggtggagggggaggtggaggtgtaggtgaagaaggtgggggtggctgaggcatcagtttaggggcatcacttgtggcattgttctcctgtgttcctccagttactagtgtaggtgttgtggcatcacttgaggttttaaaacaacatggaaagcacttgctcatgcttacaccagcattggatggcctaaccccatgatcatccttatgaagcgggctggcaggaacatgcacatcaggtgacgaacctgccattcaaatgatagatgatatactaccataccaataataatctaccatgttgatagaagggatgtatcctcaccaggcaagttagagaactgcaagtgaagaagaggatggtcatctcgttgctcgccaaccgagaccttgcttttgttgcatccacagcagtagaaacatagaaatgcagctaggaatgagagtgcggctgttggaagaacagcgatcaagactactttcatgtagtcatgatactcctctgaaggtgaaactggaggtgccactccctgatgcttgtgtgcagatttactgggataatatgggctgggaggttccatgttcagagagttggaaggtgtaagtggtgcctccgccacagagaggggagagtgaacttcaccgccagaggacatggatggtgcgaaagctggagccatggaaggagcatctccgatcagtttatctaccaaacgccgtctcggatagaagtttgaaccgaccaatgatttctggctctcaagatagttgctcagtgcaacactgaatatttgtggaacacccaggctgaagcagtttgcacggatacattcataagtaaaagaagatttctcaggtggaagaagagccataagttccatgaacagtgttgccttcagttcatcttccgtggaatgactcgataactcatcccaggcaaatgattccccaaagccaaatgtatcctctgggctaactatgtcttgtaagcaaactgaccatattttgtctacctgcatcacagtaaggattatttgttaatgcatcaagctatctgttaaattgttctcatataatatatatgaactaagtaaaatttactgctcatcctgattgactaaagtgagcacaataaagatcaagaaacaatcagtcatatttctgttataacgaaatatactaaacataacaacggtaaataacaaaaaaggcctgaatgcctcactttcaagaagacaaaatggaagtcatattcgaagttcttggcagataacaagtccaaatcaagcaaagtaaactagagctattgaatcgattacttctatctagcatgcaaaggagaaggtttatggacgccttacgagatccccactgagaaccaacgaagaggcagctggtccagaagaaagatggcgccgccatccatagaacttccccaacttctcctcccctcctcctcctcctcttgacgacttcaccaatgcagatgccgccacaagcagcaacagaaacaccactctcttcatagccatcttcccccctatttccctcgaaaaaggaccatctttttttttgccttcaaagatgaagaaatctttggggctgtgcaaaatgagatttgctccaagaaatggccgcggagaaggatgtgtatctagaaagagctcagtgctatcttagcttctccttctccaggagtcaaatcctattgcttcgtttaccactattcattaatcagaaaggcaataaaagaatcgaagtcgtagatactcttactttgaaagtcacacgagttaggccacactgatggctcaggagtcggcaaaggagaagaggaggtggtgactgaagcaagtgcacctgcgtctgcctgcaaagatggaatttttttatgctgagagtgaggtctccctctatctatgcccattattagtactcctattttttaattaattctttagtaggatcggatttagatttcaatgcgattattaaccatttccattcgtgtcgccatgattaataatctcttttctttttgttttcttggtcttgccaaatgcataggaaaaaaagattcggcaaaattccaagtcgacgcagtagaagcagtggcttcgcttggagaggagaaagcaaaagaaaagacgtggcctttatctgttcggcgaaggcgcactcgagccaaaaaaaaaaacaaagaaaaagcgtagaaaatgcggtgctcttgaggtttcgcgccgaacttcactgcacccgtcaccgcgcggccgccggagacgaccttcttcttcgccgncgncagcctcgccgccgctgcacaccgacttgtgggccacgaggagaaagcccaccttgtcaattgggcccacgtgggctacggcccacccaccaggctcgtggcgggggcggggcccaccgggcggcatgacacgttgcgctgctgtgagctgagctgagctgccggcgacgacgacctcctcctccgccgccgttgcctccgccggcctcgccacggccacacactgacttttgtgccacgaggagaaagcccaccttgccgccggtgggcctcacgtgggctacggcccaccaaccaggcccgtggcggcggtggggcccaccgggcggcacgacgcgttgcgctgctgtgagctgagctgccatgcgaacgtggactgtgctctggaggcatcagagaatgtggctgcgacgcggagcggagatgccactcctctactaaaataacccaaaaaaggtaattaaaaaataattaaaatactaatagaactgtgcttgcaaagaggtcaaagcccagggcggctgcgctgtggctacgccggcttggattggagcagacttcacctgagtattcgggatccccgcctctcctccgcggccagttcatctcgatcaggttggtagtattagccttggtgattgcttggttgtttttcatgtggccgcaaagagatccgctgctgatgcggtgcttatgcggtttattggtttggttaggttaatcatggctatgatctctgcggttaaggcctaataggggtaaattgtttgcttgtttgattggtttatggctggatttgtagctctgtgtcacggtgaggtagggtttggggagctgggtgttcgccctagtatgacgggttctaccagggattgataaatgaatggattctgcaggtttttctttgttgattcctttataggagtagcctagattcctagaacaccagatcaatcgtcgtgtgatcgaccttcttgggatgaatcactgcttagtttcgtagtccttgtcattttggagtatgttttgtttggtgtgattttatgtttcttaccaggaatgcttggtgggtattcaaagtatagtgaaatggggaatcctgaattttttttactaaattcgtaatgctatcctaaatttgggaatgtgcctgtaaataacttttattactccttaatataaagatacgctccttgcatatataaaaaaagaaatgtgaatgcgcatttacagtgaattattgttttcaatttaggttacctttggacgattggatctacatttgcgttatatgtttgccctgattcggtttgttcattttctgttttgttttcaacaggtaacactagaagatatttgtccttgaaaaagccaaattatgtgctagtgcaccggaaagctttgctccaactgtcccgttgagttcaaataagagcagtgcctgcatgctgttataatgatttttttctgtaccctggtttctgaaccactgaagatcggggcattatatcttttatggacacgaccttggtggtgatagtgttcatttagtcatttataagctctcccttttgaaatatattgttctataagtagtgcctagaggattttcttgatatagattgctacaatggatgagagaaggacaatttcagagcgatatccttagacatctatagtgaaagaagaattgcttagtgaagaattctttatccacaatatatacatacatacaataatgaaaacatcagatacatagtatgacgtttacataggttaatagtacatactctaatgactatcaagtcttacaactttataatataagggagtttgtacttatctacttattacaaccaatattgttttgacaaactataggatatcaatataatgtcttaaacacactgagattaaagcagctttatctctaagtgggacgcactgagattacaataaatctctaagtgggtccgttgagcagtattcgatgagcatatcatctattgcagaaagcgcagtggtatcctctgggagaagaacgagggtgttctctggttcaataggagcctagtgagaactttcaacctcaggtctttcttttgtaagattgaagtgagcttcaaatcttagttcctcagaagactttttctcctttagggatttctgatacaggagaacaagatgtttttgagatgcggcaatctttagtgacatgatagtcagatacacacctgttgcaatgcatgttgctattgccacgaggttgtggtgccttacccttcctatttcctttctgtcgaccattggatttgcgcctgttgttgcgtttgcgttttccagtcagattcgtaggggtattcgaggaatttcccttaaatccttttagtgcgatactattggttcaatatcttgtcctctggaaacatagttgatagagttttctctatcttctctgcttccgttggctcttatcgcaaaatatcaacttggagcaaatgttatgtacaacatgattgtattcggccacagtttaaaatcctgtaggcgtaaatgaatccactcataattagcctctggccaaatgagttccttttgctgatcataacgctctattagagctttccataggttgagagggctcgtctccaacatgtactcatatttgagatctttatagatatagaacctcagaaggaaaaaggtaatatatagttttctgttctcaactggtggatcccaatcattgggttcttaatctgtatgtgaaatcccactagaagaaaaatttattttgatatcagaagcccaaattgggtagttactcccatcgagggcgagttcggtgaactctatagttgccgtgtccctataatcatgattaacactattaatttacagaggtaaattaataaaaacatgatattgaggttgtaatctcaatgcgaaatgtaaaacttcatatcttgtaatgtttcgaaaagatgtaggttatagacctgacaatttgagttaggatttgaaattaggtggcacaatgtggataatctccaagtaattaaacagtggagtagatctcttaatagtgggcaagttatacttgctgcctaaaacatggtctccaggcaaatatattctggtgaatataccgcagccaatgtttaggactccactaccttgtgttcaatcaaatttcaaataatctcatttttcaaaacatatgctcggaaaataacacatgtgggtaatcatcatgagatgtaaacctctgtgagatgagcgagatgctcgctgcctaggttataaccagtgcggccaatttgtagggctccatcgggtaatcatctcaaaatgtagaccacttgatgatgagcaagatactcgctgcctaaattatggtcgtgatgaccaaagtataggactccatctacatgtgattaatttccgagtcaaaatgtgaagtggaacatgcattaaatcctccattaatcatgttgcacataattaagagaatttgctaaatcaaagtacaaaatttatagaattttataaattaatgaagcgagaaagtagagtgtgtcttgaaataatatgcaaaaggcatgttattaagacaacaaataaatttagtgaaacggggtatttgaataaacatctatgttaattaacacataacatcagtgatctataggaccattacataataatgtgaacaactgatgaactggttctattaaatgcataaaacatagggactaaagggtaatggctgctaaaaataaaaatttaaaacaaaaaaaggggaaattggtggggccccctctctctttcaaggggggcgccatattgattatttttcctggcagggaagcaatccccccattctatttataaaaccttggttgggggaca

SEQ ID NO: 16536 - DNA, 32341 bp, Oryza sativa
  unsure (1)..(32341): unsure at all n locations
acaccgaacagtactaggcgggcccatttggccggcaagcaaaaaaggtggggaaggggcggggttagggttagaatcctaaccgccccagcgagatttccgccgccgccgccgccgtgcatatcgccgccgccaactgccgttggtccgccgtggggtgcgccgccgacgccgccgtgggtgcgccgccgttggggggcgccgccggttccaccgccgcctcccgcacccaccgccgccaccttctccttttgttacgccgccgccgccagcctccgccatccgccgcccaccaccgccagttgggccacgaggagaaagcccaccttgccgccggtgggcccacgtgggctacggcccaccaaccaggcccgtggcggctgtggggcccaccgggcggcgtgatgacgcgttgcgctgcttagagctgagctgccgtgcgaacgtggactgtgctctggaggcatcagagcatgtggctgcgacgcggagcggagatgccactcctctactaaaataaccaaaaaaaggtaattaaaaattaattaaaatattaataggctgtgcttgcaaataggtcaaagcgcagggcggctgcgctgtggctgcgccggcttggattggagcagacttcacctgagtattcgggatccccgcctctcctccgcggccagttcatctcaggttggtagtatcagccttggtgattgcttggttgtttttgatgtggccgcaaagagatctgcagctgatgttgtgctccctgcggtttcttggtttggttaggttatttgtggttgtgatctctgcggctaaggcctgagaagggtaaattgcttgttagtttgattggtttatggctggatttgtagctctgtgtcccggtgaggtagggtttggggagctgggtgttcgccctagtatgatggattgctctgctaccggggattgatgaatgaatggattctgcaggtttttatttgttgattcctttatcggagtagcctgaagtcctagaacactagatcaatcgtcgtgtgatctacctttttaggatgaatcactgcttagtttgtagtacttgtcattttgtcgttttggagtatgttttgtttggtgtgattttaggtttcttacaaggaatgcttggtgggtattcaaaatcatagtgaaatggggaatcctgcaatttttttactaaattcgtaatgctatcctaactttgggaatgtgcctataaataattttactctttaatacaaagatgcgctccttgcgtataaaaaaaagggaatgtgaatgcgcatttacagtgaattattgttttcaatttgatttacctttggatgattggatctacattcacattatatgtttgccctgattcagtttgttcgttctccgttttgttttcaacaggtgacactagaagatatttgtccttgaaaaggccgaattgtgtgctagtgcaccggaaagctttgcaccaactgtccggttgagttcaaataagagcagtgcctgcatgctgttataatgattttttctgtaccctggtctctgaaccactgaagatcgtggcattatatctttgatggacacgaccttggtggtgatagtgttcatttagtcatttataagccctcccttttgaaatatattgttctataagtagtgcctagaggattttcttgaaatagattgctacaatggatgacaggaggacaattttgatggatcgctatgaaataggtaggcagttaggacagggaaattttgccaaggtatattatgctcggaatctcacaagcggacaggccgttgcaataaagatgattgataaggagaaggtaacaagggttgggctaatggtgcagataaagagggagatttcaataatgagattagtaaagcatccaaacattcttcagctttttgaggtgatggcaagcaagagcaaaatttactttgttttggagtatgctaaaggcggtgaacttttcaagaaaatatccaagggaaagttcagtgaagatgttgcgaggcggtatttccatcagttgatcagtggtatagactactgccacagccggggtgtttatcaccgtgatttgaagccagaaaacctacttctagatgagaatgagagcttaaaagtctcggattttggtttaagtgccctttctgagtccaagagacatgatggcctccttcataccacctgtggaactccagcttatgttgctcctgaagttcttagtaggagaggctacgacggtgcgaaggctgatatatggtcttgtggagtaattctgtttgtgcttgtatctggctaccttcctttccatgacacaaatcttatagagatgtatagaaagattgccaaagctgaatacaaatgccctcgttccttttctgctgagttgaaggatctgctatataagatacttgatccagatccaagtactagaatttctatcccgaagataaagagaagcgcttggtacagaaaatccagtgatgtaaatgcactgaagagcaaacatgaaacaggagacaaggtgtataagggtgaagccacaacctctgacacaacagaatgcagtatttttgagggaaatcgtgcgtcatcaagagacaaagtgtacactaatggtgaagccacaacctctgactcaccagaatgtagtaattccgatggaaagcaagcttcattaagcctcccgaacttgaacgcgtttgacatcatttctctgtctaccgggtttgacttatccaatttgtttgaagaaagatatggccggagggaagagagatttaccactaggcaaccggcggcagctatatttgctaagctaaatgaattggccagacgcttcaagctcaaaattaagaaaaaagaaaatggggttctgaggttggtagcaccaaaggaaggaataaaaggattacttgagcttgatgctgaggtttttgagcttgctccatctttccatttagttgaatttaaaaagtccaatggggacactatagaatatcaaaagctcatgaaggaagatataaggcctgcacttaaggatatagtttgggcatggcaaggaggtcagcaccagcaacctgagcaatctatgcaaggaatgcaaggagagcagcagccgtcacgtttaccatcacagcagccacagggctaattaatccgctacattgccgacaaaagccaggacaggctgccaacgcagttgccgcctgtaaaacatgtgaccagttgcaaataccacgaccaggtttacaatacaacttcagctgcagagcttgttccatcagaggccagagtcacaacttgttcacatacattggatcgttgttcaggtttaccctgttctagtttctccatttcgtaccatttggcttaatttttttgttccctagcttctttacatttcagtatttcttctgataattgtatattccatttttactaaggatacaaagtatatatgagtcaattttggaacatgtatatatgagtcaagcaactgtgcactacaggagtttgtttcagtgtaaccaacgatgttggccagtccaaatgtaaatttttgcatgcaaccgataccatatttgtagattgttgatggcgaaggcggcctaggaagtagataattattgtaatgtgattaaccttttgtcatcaagacctcttcacatacaaacaaatatctgggcaaattctgggtaccaaatctcactaggattcagcatcatagtctaattcttcatgtttatcattcatgcataattttaggatctaagtgacagtgtatgttcatatatgtgccaaacagtgaaacaggatcatcttctggtgcatcaaaaggaatttctttgctatgtgaggtgttcaaatgatgcaccattagcttctggccatctataacttacctttcaactaacagtcctttttccccctttttgagggcaactcgcagtcttttttttagatgaactagcagcctttttagttttagttactttctttggctgtgctgggtgctgctgacacttccatgccagagatatcaattgtcaataataacgtttgagaattttcttttccccttctggattcgttctgatattgggactatttgtaagtacttgaaacatcctgattacaatgggcacgatttgtatttggaccatagtatacagataatctgaaactttaaaactagtatattgttcagaagcctactttagcatacggctgtttttatttgttgaaaggaaattcgtgtaaattctcaacagataagtacaagctcaccaattctgcatcttccatgccctggtggcaatagcgagatgtttgcacattcaaatttggagttgtagttatttatcatttctgtgtactggacccaagactgaggtatactgcaaatccgcagttctgaaatctgtagagctaacttttctgtgggaagaaaagaaaagaaggtctttggagctaattcctcctggatgaggaagatttgtactacacgcgaagcaaaataatctcactggcacatgattaattaaatattaactattataaatttgaaaaatagatttatttccttttattaaacttctatatagaatttgaaatttggagtcgaactactttttagtttgataactttatagaaagatatagcagcattttcaacacaaaacaaatacacaataaaaatgtattcaattgtggatttgatgaaactaattcggtgtggttagatgctgctatatagtactccctccgtttcaggttataaaacgttttgactttggtcaaagtcaaactatttcaaatttaactaagtttatatataaatataataatatttataatactaaattagtttcatcaaatcaataattgaatatatttttcataataaatttgtcttgggttgaaaatattagtactacttttctctacaaacttgatcaaagttaaagtggtttgactttgaccaaagtcaaaacgtcttctagaagagactatatattttgtgatcgtggtcaaatttgaagaagtttagcctatacaaacccgaaacttcaatgcagcgagtaccacattattctgtactcctactatcgtattcatagttttacgtgttcgtttgcgacactgcttgacaaagtattagtactaggctactagcactatcaaagagattattgataaagattagttagcgcatgtaaaacggaagcatgattagttaagttccaattactacaaatttgacagatgaatatatttgatattttaaaacaacgtatatatggaaagttatcgtacaaaatacattgtttagtagtttaaaaagcttgctaacagaaaccgagataaaatcatctttaatcagaaaaggacaggcactcatattctgacttgcaaattgtaatgcagtacagtttgtagttgtactgctctatagtctgtacttgccgtgtccgcccaggttcaggacggtcacggtcatgctgtactgcctgcctaaaacttcatcgttgtattggtcaaatcatctccacaactctgaattattggagagaagcgtatgcatgattcttttgttctgaaaaatgctgcactcataagaaaaatcccatttttctgtcaagtattacatgtatgtggaattttagagagctcatctaaagtctgaactctgaattagtagtacgtactacctgatcgatcaggacgtgacaaagtacaacacatagaaattagtacaatccgaggatgctgctgcatcccatggtagtacaagcaacaccgttaggcacggtgcagatgcagtagtacaaaaggaggaggtgacctgtctgaaaagcaacacacacacacacaaatgcagtgcagatgcagctacacacgcacaagcatggaagctgcctagccaagtgatgcatcctgttcctgggattagagatttagagctaggaatattggcagattcatgatgagatcgatgggtgatggaagagaagggaaggcattattgagtgcagcgttgatgaacctgccggccggctaaattaattagcaagaaagtctgaaactggctcaaaggttcaccagcactgcacccaatcacgcctttgctctctctgaggggaaattaattagtttgtgctagttcatcagatgcacacacaatccatatccatatccataaatcttatagtactattagttttcaattctcattgtagattcgacaaagttcatatgagaaccaggggatggatgcagggatgcatttggtaagttagctctcttcactctcacaagatgcgttcttgtcccaggtttgtagctttatcacatcccttcttgtcttcaaatactgtcatctcgatttggtaattagacatgacaaaactgaaattaaggcgctcttgacttgattagtactcctttcatctcaaaacataaacataagacgtaactattttttcagatgtcttataatacaagcatgtatatatccatgcaattaactaacatattctctttctctttaatttggttttttaagtccagtctcaagatctcaagatggtactgatttttttttccaaaattagtaaatgagaaaatggagggctacaaggactccagtctactctcgtacgaagttgattttattttcggaacagagggaataggaggctagctagatctccatgcataaggatgaagatacatgtaagcggcagaacattttcacaaacgggtcgaatctgcactaaactggacatgcagatcacagagacggaagatggagcacataagccagcgatcgatcgagatgccacacagcttaaagaagagagaagagcactacactgcacagagatcagaggaagacgacgagacgagtggcatatgttcttcaggaagatgtgagatgagtatatataatataaatcagttggggccccagcagacgaggtggtggaccttgcgcagcctcacgtcggcggcctcctccgccggcggccgcgcggcggcggcggcggtgttgaaaaggggggaacgcagcctgggcgagaaggcggcggcgcggaggtaaagggagcggagggcgtagtcccagcggcagaggcccgcctggtccttgagcgcctcgacggcgcccatgctcgccgccaccaccagcgacggcgccgccgccttcgccccgcagatcgccatcccgagttcccgacccggttactccgcctccgcctccgctcggtcacagtgcgcggcgcttgcgcttgctagtgatgcgaaggtggtgaaggcgtggtggtcaggggagacgccatgtttttatacgcgagatgagcggaaagcggcgaaacggggagcgcgtcgccgccggttttggacgctcactctgtttccaaggatgctgggcggtgcgagcctcactgcgaggacacggggattattgtttgttttcgtctgtccagaaatataaacaatttttaaataattgaaatatattttaatattgcgaataagaacagtatcctatatatatatatatctatataggtcatcccactaactacaattaaaactaatttccttctccaggagtgatccacatcacctctattccacctgaccgttggattgcagatagattccacctagccgctagattgcaaatgagggtgtaaagagcgatagtgggatgcacctcttcgttttttttttaattccgatcatcatgcacgacagtaattaacaaaggggcctattcaacagttaaaccgtttgttcctgacgggtcatcttctgattgaaaccaaaacgttggatattcattcattggctcacgcagcaggccttccatcttccactgcacttgcactgcatatattccatcctctagctaaatgaattaggtgaatactcggcctttattcctgattcctctgaaaacaccatcgcagtggattgacatgctgaccacaagccctcctgtccagagtccagttgctatacttgatcgttgcgatcaatccttcattccgttagccatgctgctgcgtttattttgccgctatatatatgctcatgctccagcggatcaacatttcttttagcaatttgttgttacttattcccttaatttgttttgtataatatgagtggaagggagtgccagttgagtttccctccaattaatggtaccaatatcgaagccatacgtttgaaaaatattatttgcaggctatgaacttggtacggttgaagattatttttatttgtacaaatattcctcacgcgcagtgataaattgggttaggtttttccttttaaggtgattatatttcatccaaaattttgacatttgtaattgcttaaatttccccagcaacgcgcggggtgacctctagtactacctccgtcccaaaataagtgcagtcatgagttttcactcttaactttgatcatccgtcttatttaaattttttttataattagcatttttattgctatgagatgataaaacatgaatagtactttgctcgtgacttatgtttttaattttttttcaaaattttttcaaataagacgaacgatcaaaattggacgcggaaaaccatagctgcacttattttgggacggatggagtattataatgtgttccgttttttaaagttattatattttagaatggaggaagtaacctgtttcagatttattatcattaaatcacgttctatattgcaacattttagaatgaagaaagtagaatttatttcacatatatgatgtgaaaatttcatcctcggtatttttttttgattgaacgaataaggtctaatgtaaactaataccatatccttacgttacaataagatgtagaataatatttttcactcctttgagtgtgccggttctttttttatggataataggagaggttaaagtagtaaagataatcgtgaaaaattataatagagttttacgtaaatatactatcatgtactattccaccaagaattatatttaaacataatctaggtaaacgaaaaagacaaatgttttagtttttaacgtgagttgagttcagcatatgtggctaggctaaatttgtttttctttcttantcttttgcagtagacgagtagtagagtgcttccaaaacaaagttcaaaaagtatcagggcatatggtgtgaatgtagattgtgtggtattttatgttctcaatttgtttttaccacagttatgtgagggtacgtagaaaaatgcagtttcagtgtagaaccattttgattttttgtaggatacttggtgattgagaatttgtaggatatattattttttaaaaaaaagatatttagcgatattgtttaggctatagctccacagcatgacttttaacctaaagactctcgtgagttcagaatctaaaagctgcgttcgggacatcggtttgatcttagccaacacttgaaacgagacaaattattagcgtatcattaattaattattaattattataaacttgaaattagataatttgtttttcaaaaaacttatatataaaaaactaatgtttcggacattcacaccttctattatctgtgccttgtctaaatctccatgaagatactgtggaatagaatatgatacatcaattagttgtccgaatccaactcattttcatccttgactcacatcctaattatgtttcggcaatgctctttttttttaatttgaagttgataattcatatttttttaacatgtataatcatagcgtcattcactatttcactgataaaaatcttctctatcatcatttatcttctcgatatgtgtttataggtggcttatagcattgtacctgctctaagcggttgtatactccgttcaagcttgtcgctggtcactagctagccatgttataggttaaaaaatctagattaatttcgttttaaaaataaaaatactaagattaattaactcaaattaactgttgtttcacaggccaatttgttgtccttcaaccttattatcccgagccatgcaatcaaatagtggaagtatagtagtttgtaggtgaacggtccaaatcgtatttatagctatgtaatctcacacgtatccctctctttaatacgatattgtgtatatctgagacgtaccataaatcaaacctcaacatttaaaatcactaatatatatacaaaacactaatatgcagtcatttttcagataaattttactaaattaataaaaaaaagactaggaaaaaagtttgtgtgttgcaatggggaaaggcaattttagttgtatatattaaaccgctcacatggatgactataacgaatatgttaataccacgataaaattatgttgtatagagtactaagtttttttctagcctagttaagtcatataatattattttcttgtattatataatttacatcgaatctttagcaagttaccaattttagtttggaattcatcttaaaattgaatgatacacattttttccgatcgtcacaatccgtttttgttcgtcgtcgtccttgtgtaccccgcgacgcctttatccatagtccgtgccaatgcaaataattcgctcgctttgactcccttcctatctatatggcaaagttggctatttcttacctactcaagaagatacttactcgagaaaatagccgactagccaactatgccgtatagaaagcaggggagtcaaacggaacgaattgcacgggaatggggtttggcagtacttcgtaagtatgtacttttcttttacacgcataaatatgtacttacgtacaggattgggattaagaaggtgggattagccggttgtttcctagatacataatctagtggtaactataggtccaccggtttaagtgaaaaccaatggttaatatttgtttttttcccttagaagttataaaatttctctaattattagatctacaagctattttttttcaaaacatacatgtgtcctgaattgtggtaatttagccgtctactctggcaaagttatcttgaattttttagactaattggatgatgtacacacagctatagtgttggttcattttctgtttttcataatcttaaattattgatttaatcatgagaaatacaattattgaaataaattagaaattaaatttgtagtttagcagctatggttattgctgagccaactacaccataaaaaggagaggagactttttaaaaataaatagagagaaaaaagaggagagaagtctagggacgaataggaggggatcgttggtggttcctaagtactactctcttcttcttcttcttcaaaacgtactattctttttaaaaatcacgaatattacggaagaacctaatattaaatagttagaatgagcgaggctttgaacccaggtcgaatattatagaaggacctaataatatcaaataattagaagatgtgaggctttgaactcaggtcgaatattagggaaggacataatgtcaaataattagaatgggtaaggcttcgaatctaggtcgtctagtccaccaccttgtgaaactagtcggaaaacccttgagcgtttctctacttttcttttacgcacgtacgtacttacacacatataggttaggaaggcggtattacctgaatggtagtgatatgcatccaggtttggcggttcttatacgtacttttcttcttctcctcttgatttcttcttctttttagcgaattacactttggatcatcttttatttttaaaattttattttgaactattatttactcagtctttttaatttggattagataagtttttctttgttacattttggaccatccgaaaccacttcttcaatacggagcacatcaacaatctcaagcacattggctctaacaggccagtgaactctcctacatataaccagatcctgttaatttatccagaaaagaggctacatgcaccctcggtcaaagttttgaagggcatttagactgttttgtcaaccaaataaacaagttgttgctttgacgtttaggatgacattttgtcaaacactataaacaacaattatatgttttaaaaagtttgtaagtatagtaggtttacggcaatactaatggtcaagatcttacgaaaagtttgattagcctttatcttacaagttaaatccttatgaccggaagcatacataccattactcctactacttaattctactaatttctattgacttgtctaactcaattatttacaccagcttactgctcatagcctcacattgtcaccgcaggcatagagcaaaggacgagactacaaggtactccagctcccacagctgtttccagtgcttagtgcgtcctggctgggacttgtgtcgggagatggattttcatcctccaagtagcggtggtcagaaaaagaccgaaccaaaaagaccgagaccgaaaaattcaatcctagaaagtgaaaaaccgaattttatttggtcaattcggttagtctcaccgaatagaccaaaaagactgaattaacaaaaaaaaaagtataaatgtaacatacaatcactatgttcaataggattaaactctatttttcgcatcctacttcttctaggcatacaacctaataagagtatttactcataagtgcttacattttttctgtgatttttgtattgaaaatttccattgcttctttgcgtatatgaaagtgttgttgaatttgggtcaggaccgagaccgagactgaatttgtcggtcctgatatttttgcattgaaatttgatctttactttttaaagaccaaagaccgagaccgaaattttcggtcagaccgaatgtccacccctactccaaacatctgcttgtttattgtatctcatcaaaatggacactgaaaaatttaagaaaaaaattataaaataaattaatatgggatatatcgtctcacaaaatgcaattttaaatttcacttcttcaagttataactaaaagaacatattaaattcaaacgagttaacgtaaattcacaattatatttgtgtttttttattataacttatagaagttgaatttaaacggatatatcttgtatgaatctaacttgttatttttctaactatttatgtgacatataacaaacaatggaacaaaaaccctaccacaacaaaaaccctgttcagggagcttaaatctactgtttgatagccagcttagtttgatagtcagcttcttataacctgaagaaacttggtttttcagcttaatacagtttctattttatttttttagattttacaattatatattaccagaatctgaatccaaataataatgcggactatttgggatagctaaagaatccgagagaacctgcagctggttaaaaacttctcttaacatgccctttaccggaagaacgagcccaaatccaaccactggttcattccggattggtcgagagaccccgtttttcaaacacgcgcattactccacgcccctttcccgacaccgaccgcccgcctcgccgcattcacgacctcccctcccctcccctggccgccgtggaaaattatacacccccgcgcgcaccggcgatcgcgatcgctgtacgcactgatcgccaagcgcgtggtgatcccgcgccgaggcgttgggtgcgggataaaaatcccgtctttgggtatctctcggccactcgattttggaggggttcatcaatcatggtggctgatatttattgctgactattattgcccctgttgattgcagtttgcaggaggtgactcaggactgggcttttcacactagccattttctgaaaacatattttataaataaatccttaaaaaacttaggccctttttagctctcaaaacaaaaaatttcacccatcacattgaatatttagatatatgcatgaattattaaatgtggataaaaactaaccaattacacagtttacgtgtaaattacgagacgaatcttttaaacctaattgcgccatgatttgacaatgtggtgctacagtaaatatttgctaatgatgaattaattagacttaaagaattcatctcgcagttttctgacgaaatctgtaatttgttttattattaaactatgtttcatactttaaatatgtgtccgtatatccaatataccaaccaaatctaaaatttttcccaaactaaccaaggacttaatctcttcgttacatattataaaaatgtagaactagagctatgagtctctccgagagagcggaaaggagtctattctaactatatagtactagtatctcatctttagattgttatattcaaacctgtagctcggtgacagaatatttcatctgttacatgatatagcaatcttgtatcatacttcctccgtcccaaaatgtaagtatttttgaggttagcacgggtattaagaaagtatgtgagaataattgaagaaggtgtgtgattggttgaaaagagaaagtaggtgaaaaagaatggttgtgattggttgagaggggaaggtaggtataaaaatagcttcattttgggacaaagtactgtgctagaaatagctacattttagaatgaaggtagtattggatatattttagttgtaagatatctgtccaaactcgtcatgatgctggaatgtgtcatattcagtaccatattatatttctggatggaaagattaagttttttttaaagatctatttataaaataaatgttcataaaaggctaaaatgtaaaattgtgtgtgactcatgaccaggagtagtgcagtggcagtataagaggctaggtgaggtggctgggagagagaagagaccggactgaggatgagcagcacgagctagatagcatagcaagaagggccaaggagaaagcggtggttgattcgccatgagcagcgggcgcgagagcaggtgggagctcccggcgacaatgcgtgcgctggcgcgcgacgccggccagcagctgcgggtaccccgcgcggccgcgaccgcggccacgccggcggcaacggcggggcggcgcacggcggacgtcggcggcaagacggacaaggtgatgcacctgctgctttgggggcccaagtgatcgatcgatgggcctccgccgcgccggccggccgccgccggcgggtcatcgtctcatctccgaccagatcacggctgtacaatatatatgtactagtactagctggctgattgctcgcttgctccgttctctttaatttcttatggtgtttttggtccagtatccatgcactgatgatgcttgtttgccgggtcagtctacaggggtttccaccgtttttctgtacatacgaatcaagtggttttcctcgtgaaaatcacatgcgttctaatcggtcctttttttatggagcaaaacttatgtatcatcaatcatgtactactaccttgtaaacttttgccttgagtttggggcaagtaatgatcagatcgtgtaagactgccacttttaattttgggtaatttttgtttggttgctaagattcacagaatcacaaataaccgcagacacggacgattctaggcttctaaacggtacattagttgatgtgaccatggctaccatggatgtgaccatggctaccacggatgcaaccattgctcacatcatggatgaacaagaagatatcgagatcaagtactccaagtgctggaatccgattcggccacctactacactgctgacttcaaacggccaccgaatctgcatacgacctccgttttcggcccgtgagtacttgatggaaagctctcggagccctctttctaacggatccagcctcttctctgaattctatctcgtgtggccagaatcacaggaacaaggtgttgcatcacctataatgggcctatgggcttgtaacttcatttgggaccccggcccaggtggggcccatgtggggtgcgccctaagctggtggagcacgaccctaggcacccctaggtcgtcctcccacccctatatatagctagttaccccttcagggtttctcgggttttgttagattaaagtttagccattgctacttgcttgcagcgcgcgtgtcggatagaccgtccgtctgcttgttcttcggaaccccaacttatcattcgtatttaactcctatttgcaattcagattgcttttatcttgttcttgcttgtttcttcgatttgcttgtaggaataaggttgatttgcaccggcaagatcaacaactcacggagaggtgtatcgatcgctaaggcgcaacgcaacgtcttgtacggttgtagtcgggtcgtcaacgtttcttccaaatcgtagttttcatcaactcaccgaaagatcgggccaacaacagccttgagtgtcgagaggaactcagggttcatcattagtactcctccattctaaagtaaacgaatctaatactagatctaataaacaaatctagtcctaaatctgaatgaaaataaatgaacctaatactagatctaataaacgaatctagtcctaaatctgaatgaagagagtatatgttgatttttgtaaaaactttcttcatcggtaatttttgtgaaaagaaatgtatacggttaaatatttaatttactcagctatgtcttgaaataattattataaactcagtttcacttataataattcatcctgcatcagctacaaacatgcctaccagtgagctgatttacgcacagttgtgtttgcgatggacatatgtgctccttattatacctcgagcatatgcaaacccttttttttcttcttttacagtcggattttttcggccctgttatttgtggcagatttttacttgcaaaagggaaaaggggctaagcaaaagcgaaaaggcggggatggtaaatatcttgggcttgggccgatttgtgatagcaggaacagctacataacgaatcatggaggcaatatctcatctcaccatctcctactctgagaggccaaagcccacagaaacaatgaaaagcaccaaaaaaaaagtaaaagaaaagaaaaggcctgactatacttaaataaattaatttgggagtacctatacatctttcgaaagatttttataatcgtatcacacatatttttaatctttggattaaaatccgatagatataataaaagcaaaaagcaattaagaaacactataatggacactaaattaccatatcctcaagaaaaagaccaaatccaatacaaaatttaaaatttacatgcgaagattcaaaaattacagtgtaacttataaaagttacattgtaagtttcataaattacactataacttacaagaaaatgcactgtaaatttgagtgagaaaatcgagtgagagataagaaaaaatctttcgagtgagatatagcaaaatcgaattaatttaggtccaatatttgcagtgtgaaaaagcaacatttttgtaattatttctatatttttttaatttaaatatattctttattcttacagctaaattaatcatccaatagaaattatgggctgagaaaattgggccagacaaggtctccatgggaaaaattgcagtgtgaaaaagcaacatttttgtaattatttatatatatttttaatttaaatctattctttattcttacagctaaattaatcatccaatagaaattatgggctgagaaaattgggccagacaaggtctccatgggaaaataaacttgtcatcaataaactgcggacaagctcaattgagagtactgatttatggaccaaagccccaaggaaaacaaacttgtcatcaattcttcatttacaaattaaaacaagctgacatcaaagtgacaaacttacatggaaaacaacaaacaaaatggtacacttacaacgacatgctatgatcagtcctactccctctgtcaaaaaaataaaaaaagacaaaccctaagtttccgtgtccaatgtttgactgtccgtcttatatgaaatttttttatgattagtattttcattgttgttagatgataaaacatgattaatactttatgcgtgacttacctttttatttttttcataattttttcaaataagacggacggccaaatgctggacacggaaactcagggtttgcctttttttttaagatagagagagtacataccagtagtacaaacaacatcagaatcggcaacaagtttaattaccaactaatcaatgagtgaacccatgctgcacccctagctatgaaaagtactccatctgtaaaaaaaacccaacctagtatctagatacaacataatctagataggccgcctgtccaaattcattatagattatgtcctatccaaatactatgatgagctttttgatgaagagagtatgtgtattcttctatcataatcaggcaattaatcaattagcttaactgaaatgatagatcaatcaatcaacattgttcatgttagctaagcttttattctcttctctttttcgcgaacgcgtaaaagctttgcacgtcagtatattagtagagaactctagctcatctctagggctatcctcttcctcatctcggcgccgccgcggtcgggggagtcgacgatgaacttgcgccagaaccagtgcttcctccagacgtgcgccacctcttcgagcggcacgcacttggtctccgggaggagggtggcgatgaagacggtcatgaggaggacccaggcgccgaagaagtagaagaggccgaagcggaggtggcagaggagggtgaggaagatctggctgatgaacgccgtgaagaacatgttcaccgccaccgtcacgctctgcgccgccgacctcaccgccagcgggtacacctcgctcgggatcagccaccccatcggcccccacgaccacgcgaacccggccacgtacacgcacacgaacagaacgatgcacatcgcgtactgctccgacatcgcccccgtcccgctcaccccgaactgtaatccgatgaatgttcccaccaagatctgcaaagaaatcaaacaagattgttaataaattaaatctttggttttgcagacaaggtgtttgatgaaatgggtgagtgcttgctgaataaattaaatctttggttttgcagtcaaggtgtttgatgaaatgggtggttgcttgcttgcctgggagatgatcatttgggtgccaccttggaggaagagggcgcggcggccgaccttgtcggcggtcatgacggcgacgaaggtggagaagacgttgacgaggccggtgatgacggaggagacgagggaggcgtcctggcggaagccgacggtcttgaagaggacggggnnnnnnnnnnnnnnnnnnnnnnnnnnnnnnnnnnnnnnnnnnnnnngaagaaggggatgagcaccgcgaacgcgagctgcggcttgtacctgccgccgaagaagagctcccgccacgggtgcgccaccgccttgctctcctcgctcgccgtcgtcaggtcctcgaactcggcgcgcacgtcgtcgacgccgcggatcttggccagcgtcgcgcgcgccgcctcgccctcgccgcgcgcgatgagcgacaccggcgtgtccgggatggccagcgaccccagcgcgatcaccgccgccggcaccgtcccgaacgccagccccacgcgccacccccacccgccggcgatcttcgacgtccagtacgttgtcaggctcgccgacaggatccccaccgtgatcatcagctggaacagtatgttcagcatcccccgctgctgcgccggcgccatctccgatatgtacagcggtgacgcctgcaggccaatcaccggcgatcgatcaacaactgatatataattttgagtattttctacaccttagctgtatacatgcggtttaaatggttatataaaattttcaaaaagtttgataagatagattataatgatataagacactatagaaacatgtaagttaaaattcaataataaaattaacaaatttttatgggttgtacattacaattacaatgtactattcactgtttgattttactctttttttttctaattgtagattaaatttaatcttacatgcttatctatagatttatatcatttcaacttatgttattgttttatttaaataaatataattatttaattcacatacaaataataatgagtgttatggtatgcaggtgatcgatgtcacatgacaacgtacgtggatgcagacgccgacgccgacgccgaggaggaggcggccggtgaggagaacgatgaagttgaaggagatggcgccgaggatggcgccgatgaggtaggcgacggcggcgacgaaaagggtccacttgcggccgaaggcgcgggacatcggggaggcgaagatgccggcgaccatggcgaagaggaagagcgacgagccgacaagcgtcagcacctggctgtcgaacttgcagtactggttcgtgatcacccgctcctgctgctgctcgaagatcaccgggaagaacatcgccaagaacgactccgtcgacgtcaacccggctgccatggacgtgatcagtcaaccacaaccaagaagaatcgtatgtaatggcggcggcggcggcggcggccggtgaggttgcgtgtaccggtgaggccgatgtcgtagccgaagatgcagccgccgacggaggcgatgaggcagcagaagaagacgaagccggtgacctcgccggggtacgtcttgtaccgcgtgtggtggtgcacgatcacggcccccggcatcttgcccggccggccggcggcggcggcggcggcggatcgatcgaacggcggcgacgtgggagatcggtcgatcgatcgatcgaagccgcgagctgcgcggaggagggaatcaatggaggaagagaagagagagaggagtacttaagagaggggaggcctcggcgaacggcgcgacggcaatggtgggtgcatggcgagcgcgagcgccctaaatcgtagggacgtctccttggtttcaaggtcaaccagaaaaaatgatttccattcttagcaagtttacaagttagcatctttgctggatgctgcaaagaagatgaaatttcgtttagttcttatttatttgtaccaaggaacactagcttgtgttatattttagtttggttttgtaaaatcacctggtcatgaattgaatgtggctttatagcagtaaggcataacgacttgtgttcaattttgtgcacctaagaattgggggcaataaagtatgaaacactacagaaagcttcaaaaatcataagttggatgtgacaaacaaacgattgattgattataggccgtgcgatctacacaaaagaatttcatggatagtacaaaagaattgtagggatgagtagtgaggactgaacaagaatgtaacaggcaaagaggaactatgaacagcacgcagccacgcagggtagcaaaagctgaatcaatgaattctgtggttcaaaactgaagagcgatcaggtaaacgcgagaaggaagtcatgtgatccggattctcgtaagaatgctttgcaacttgttagcacagagtttcttcacgatcttcttggcaggaaggtcaccggagtctgcgagtcctttcaagctgacaaaatgttgagacgatatgatcttcttccttccagcactggtctctgccaacgacacgaggcaagaaatggccaaatccttcgccatcgtcttgccgtcaccgtgctcaagcgactgcagcagccggttcagattatcaccatcttggatgaaaactacacggttagagtgaagcaacagtaggttgcagagtacttgtgctgccatctccctgacctgacaagatttggctccaagtgagcttaccagggcagtcatgaaccctgccctgccaaccatcttgctgtattcctcggagatcctcgttagccgtaccagaatgttgagggtgcattccaggacagcatagtcaacattgttgagataggtttgaagccagctaagaaaattggagctgatgagatcatctgtcagagctttggaagggaggcagaagaatgcaatggctgagagagcaacctccctggctttggatgagtatggaagatcagggttcatcagctgagtgagtgattggatcatccccatgctgattgctgcttgtctgacattggcatcagccaaggccatgtaatggagcagctcaactgatccaactttgcgttcttcctccttttgtcgggacagcttcaccaactccataactgcaccttgttccaccatgaacatcttcacctcctccaccctgctcaggttcttcagcaccgcgaaagcggagctgaccagcttgcccctgctatcgacattggcgcagacgatcaggagcacggtgacaccgccttgtgcgcagacggcccagacgttgtcggagttgctcgtcagctccctcaatgcatgagctgctctctcccttgatgaaacagtagtgctggtgcagcttggactatccagtaactggacaagtggagcaaccacacctgctttcacaagcattcctctgtaagaatcatagcctgcaataagggagacaattcttgcagcctgttcttgaatgcatgcatcccctgattcaagaaagctgatcaggagagtgatgctattatcaatgtcaagagctacaatcttgacatactcgatatcttcagataggagctctccaatggtgaccagggcttgttttctttgagccaaatccccaatcctcaccctcaagaagagatcattgatgtagaacctcttgttgcttaagcttgcaccaatggcaggcctcgttgcgatgacagcttgagaacgcacagaaattctggaggaaaccatctccttgaggtccttcaggtggatatcaagcttggagctgatgctgtccaaatcactcctcagacgaagccttccaccattgtaagattcatcgctgcattgagaagcaatagcttgaatatgacttactgttgctgtagccgtctgaagaaactgaacaagaatcacattttcgttgcagctgccgtcgtctcctggcgcattcaggttggaacagagttgctgaagcttgtacttgatggattgccacttgactgggaactgaacaatcgaataagccattgatgctgaagccgatgcctttaaaatttgcagcttctcactgcattctgctacctccattcctgcactcctgttgggatcaaaactggttcttggagttggagacatggaattgaagatatgcagatagtagtttttctgtttagtaaatgataatgataaggttcttatagctctagtggtctgcaatgtatatgcaaagcccagctggcctggccagatgaatggatcagttggtgaatccatttgatctgtctttttgctgcctccttttggtttcttcgattggaattttgcactgctctgcctgccacaggctcgaggcatcttttgctgcaccgaagtgggttagatttagtgggataggtgggtggagtgctggggtgtaaagcatatccttaatataaacctcggtagggttgattacacctgataatcatatataaactgcttctcattgtgatatgtgcaaacatcaactcttccataaatgcctttatttagtaaaatattaatattcaatttaccttttcccttctttgttttgtcctatggaaaaaaagctggctggcaccaaacaaacagttctttttcttttcccttttttttcagattgcagtagtaccatacaaacttgcattgaaagaaacactgtataatggggtcatctatgatgcagaatctgagcgctactgcatggtggacctacagaccccaaaaatatgcatgacaaaagcaacttggaatggaagtattaaaggaaagattaatgtttgcatcaagccatggcccaatgaccagtcctttcacagttcaagtgaacaatgcataacagtaataggctgtaaaatgcaaatgtgaaatgataagagggtgtgaaagaagtttatcacatgttaggacctgaggtactggacctgtttcagactctccccatgctgccctctgctcgtctgtatccagcaggtttagctgtgtactgcattcatttataaaggtagttacaaagagattagatacggtacggagagctaagataagagcaagtgcacgtgctggaaaagagctaattggttggtgtgagcattgagcagggaaaatggaccagcatgctggagtagtagagactgtacgaccactgaccagtacgggtggtacctaattatcccagtggcacaccacctcccatgtgatgtactactgatgtaccctcctaaattcaggattggataagctagacatactgtcgtcgctaaccctgtagaacaaattaaaaaaaaactaggagcttgagaccacactttatttctagatatatatgcatctagacaaatatttgtctagattcataagaaaaaattgaagtctaagtaggacagaggtagtaagtaaataaagaacaagtaaaggtgcatcctctccatacaaaggaaatccataggagaaaattgcagctatattattttatagaagtatgtttatacctagaaaatgcatttcattttagtataataatttgcagcgtgcagtgtacgtgctagtgctgctcctagatactcaaaggttattactctcagctacctccagaatcagatattaaaaggtcatacggattgtaatgggggccatccaatcagcaatacagtgcttttgcagttttgctcccggaagaacccaatatgggataacaagatatacccagtcgtctttgtaaaatccttctccagctgccactacttaaaaattaaacccccaaaataatatggatgaacttggaagtaacatacatctccttcatgctgaaacctggtagctttgagcctttgaagagcaaggtaaataaaatacaaaaactggtcaccaagtgaagaaagagaagagcaccaataggactcaaagactaccagtaattggctaattgcttgtgcctttttaatttacaagtttccccatgattttgtagcccaccttttaagggaattgtgaacactacccagacatgtccacctgcccgcaccactttctggaagagaggggactaattattattattattatggctctaaatcgccacttcaaataacttgatcctgtagtccctgtagcaacatagctcgacatcaaggaatacaaatactaaaaagtagtctcaactttcaacatagaccaccactagcacagtagcacgtatgctgtacactgatttaaataagatgtgcacataccattcatcataaagtaaatggtacagtgaaatgggaggagaaatgaaaaggcaggtatactaggcaaacaatacagtgaaaaatggaaggacaaaagaaaagcaaggtactgcaaaggacacaaatatttaagagacgttgagagagcattcatatgtatgtaccagacatataattggttatttattattatatttattacaggtcagtagtatagacgtatggaacaatgaaaatactcatggaagactggaaatagaactgtagaaaccacctgagctgttgggcaacaaacctttcccaattcatgtcttgatgagccatatatgatatatgatcaccaacaaggcatttatatgaatgaaatccaaaaaaagaggtgattccaagaccagcagcccaaacaacagcctcgaataagtttccccaactgatgtttgatgagttcatcgcagttgatcattatcatacagaataagaattgtgcttcctctgcaggctttgctttgacaccagggaagtaccatcagaaaaatatcgaactatggagtaaaagaccaaaaatgcattcagctccttgtataaaaggccaaaaggacagggtgctggtattaccatgtatatagtcaatggtcatcatattattttagggcaaaaggtccagggaattggtctagtatgtacatgttgactgccaaaccaaaccattggtttctaatggctaattagtcatctactgttccagaacaactcatctgttacaaagtaccctataaagctcaaagcccaaaattagcatgaagtaatactagcttattattaaaattatgtaattaaattaactgaacaaaatgagtgatataagaaaagaatttatcagaggcaaataatactccatccgttcttgaataactggcaatttgaccaaatcatttgtttcagaatatttgtcaccaccatactttcattggtaaaatccaattttgcccctactttcccatggctacacttgtgggtctaaatcaatcttcaccatagagaaaacctctagatacttctattttggatccattcctttccccccacctcccatttattcttttttttaataccatctcctaacaattgccaagggcaaattggtcacaaaatttgttgccttgttctacatggaatggtcaaattgtctattgctcaagaacagaggtagtatagtgttctactaagatgttattctaattggcaaaggctgacttcagtttatataagaaatattaacgaggctgggtatacacttgtaacaggaaattctttacccagtctttcttaatcaagttagtagccatcttgaaaaagaattgtagctagtattgaaaataggggttgtcatatgtaaatatgtacctaacatattcaacataacatgcagactgaataacttaaagttgtgggagaccttcaataataaaatcatgtacctctgctacaggggcaatcacagtaggcccaccatgccaccatagatcacaaaaagtaggacatcccttcatttcctcaccgacatatgtgaaggcgttccaagtaaccaatcacattccttgagatcttgtaagctgctcctccttcctgatttttttgcaaggtggcactgttagtagaggatatatgtagctcatgtatctttgaaaagttaattttagatagattgcagactaaaataaaagaatatatagattatttctcaagtattgagaaatcaccaacggtaaattttatcaatggaggtgctaccataaattatttctcaagaaatgattaggtttgcatgaaaatgtctaattaaacacaaatcaccccaaaagtattaggattttaaagtgagtatttgtgtgcaataggttaccaaacaactaaatctccttggtcctcccagccacaatcggatctgtacaggtgcttctagtgtagtgtagtgtacaaccccttgagtcaataggcattgaacattaaacggtggaattctcaacgttgctttcaacttctgataaaaacccaagaatctatattaatataaagcagaagtatggattaacttgcagaaattatgacatggcatatcaaatttgttctggatgtaacgatattttactgtgctttggagaacaatcataagtagctatgtaagcatgaaaaagtcatcaaataaagtcatctttgaatgtgtcaggcaaagagaaggatttgacatcaaaatggaaaattatctaaatatccataacctaggaaggcaaagagaaggatttgacaaaaaaaaatgaaaatgcatatatttacagaaaattatctcacaactaaataccaatagcctagttattcttgtcatggtatgttactgtttgttgaccagcctttaaacgcctgtgaaccagtaggtagaaaaatgcaagtactactacagaaacacacgacagagaaagtgtgaatcccataaagcttagaaatcactaagcccaagaaaagttaacgttattcttttttttgcggggcaaggaaagtgttattcaatagacatgtatgtaaggttcatatcctaaagggttcaaaatatagcaaaatacaaacacattagtaacagtgcttttcaacataaaaatgcataaaataggttgtagcataatggatacctttatcaacattacccatatcattccacaaatcacaatgctgtgtggctcaatagttctatgtggcacactggcattataaggtgcaaatgcaaaacaataaaaggtgatatgactttcagttcatataaggagcacataagaaatttcataaagatgctccacccaggtccccccagctaacccaacagaccaagggtaataccaccttcttaggggcagtgtgagcttacatcaggaaatcatcagcatgaaatggttcattcagtcatgcctcctccaacactgcaaagccaagaaacaaagctagctaagaactgttcatcaattgatctcatccctcagcatccaaatgacccaaacattcaagtatttaacagaactaagaggccatgatactagccccaaataaaaagcaggtataagagtcccaacaccacattttgagcatgagttatatagcgcttccatatgacttaacttaccaccatatgtttcatcagtgcccttctcagatatatgattgcatgaaaagtcaatgttgctagtatcgagtaaaactggctcccaccaacaccacaagtaattcagcttccatacaaagccgacacaaagctatctttcatcgtaactttgtcacactgacttaaaataaatgtagatcagaaaactaaatacattggttggaatttagaaagcattccatccatttaaaataattaaaaagaaagaaagaaagaaagaaaaggaagggagagaaagaagaatcaaaccaactccttcagaactcagatgcatttcataacagcaggaagcaagcaaccaccacacaaaatagaaatgcataaacatcagtacaggactccctctattccaagcaccaaatgagcatagatgctagaaatcatcaaacaagcttatactagtatatatttgcatgaagtataaaaaactggagtccaactgactaaagaacctctatagtgaataaagagtgaagagcaagagttcattcaaatttacattcctatttgagtacatctgcgccacttttttttcagcttctatactgaaatatgtttgctattgatgaacataagtcaagaatatacacagaatacgaattttaagaaagtatttgtttcttaagaaactccttgggaactttcgtgcattaccaacttaaacaagatatacgcacagtttcacaggcaagaaaggcatgctgaaagatgtataagacacattatacaagaccaggattctctgaggaccgctaatgaaaaccactcttaaggttgcacaggtaacttaattcgtgacatacagtccaaggagtgggaaaaagaacacatagcccatatcaattcacattagttgaatgtagaaacacgtgttctgtcatccgtgccacctgtcctatctaagttcaaaccatatttttcacgttcacgaacaattgaatatgctacattgatgtccataacttctgtagtttgtccaaatttataatcggtaagacactttctccgtgttcatttcttctctaatgtatttttttacatgtgtcatgaagatcaggcaacagaatagctcaccaattttagagtgcaaaacataccagtccacctccagggtaaatcatttttataaatggtatcttacagataattggtaccacataacacacagttatgttcataacacacattggtgtatgttttagctagatggcatgccaaaagcaaattttaaataagctaactcttgaggggattttggacaaggaaaattcaggcatttgaaaacacaaattgcaattatgttataccaaactatagtttcaatcatcttgccagaacacgaggatcataagaggactggaataccacaaatttcaaccatcttacccagacatttcaaaacataaattgcaaatatattataccaaactttgtatgcttgcagatctttttcatgtctgttgcctaaaagctataatggtaataattaaggagcagcaattaaactacggtgcaattgcttatttcagctaaactctgacaaagacctccgaatgcaagggtagtatctgaggactaacagactcatcaaaaattatctgggcgattgctgaagctctttcaagatgcaatacatctgtcttgagaaaatggggcagtgcctccgagtggacctttcggaggccttgtgggtgaacctccttgggagcaatcaggaacagtttgttaagacggctagctttcctcagcaggaaatccaccagtcgtagttcattgcgataacccttgaagtttgtcatcttgaccaaccgaaggttttctaatccgccttcaggcggttcttcctctgctacctccaaataattcgtcgtgaacgaatcataagtgtttgttgggagctgcaatgttgaacacaatatgttaagtacataaatggcacacacctataagtaaactagcaacaaaatgcattttgcctagaaataacaacctgcacgaagagcctctccaactgaggacaacggcaggccttgaggaagctatagatatctgcgaggttggagttggccattccgaacatgagcagctggagctctctcaagctgttcaagctcttctccacgttgggggtggctactgaagcagagacatactacaaggcgtgcaagtataagcacaaaagcaacaaaatgaaacgcaaccaaagacggcatagatacttgggcagacctggagagcaatgctgcatagggtgagtacggtgaggtttgacaggcgggggactgccgacggcaagttggtgcgcggcaaacctgtctccggcccgccggagcagaggtagagatgctcgacacaatccgcggtgctaccgaaaatgttgctgcagaggaacgcgccgctgaaccggaacgaccggaggaggggcgccgatggcacgcgcagctccgtggcgcgggagcagtcgacgacggtgaggctcttgagattggaggccccgacggtgaaatcgatacggcggaggtgtcggcagtaccggagctcgagctcgcggaggcgcgggcaggcggagaccacccgccgcagcgcggcgtcggtgagggagacggagtggaaatggatcacctcgagcgtggcgaccatcgcgttggcggacgccgtgaggtggagcccccgcaccgacagccgcgcgaggagcttgctcccgatggggaagtgcacggcgagcgcgccgggccgccgcgtgccccctctcgccccacgcccgccgccgtcgtcgagccgcagccgcaccttctccacgtcgcacgccgccgcgtactcgatgaaccgcttcagctcggggggcgcgagctgccccgcgtggaaggcgagcgagaagaggtccattcgacgtcttccgcgccggtcgatgcctgcgaggtgctcggcccgcagcgccgccaccgacgccgacgcggttccttcccccgatggcagccgcacgtcgagcgacgacgggtcgggccacccgtgcttccacaacccccgccaccgcgacgagagggcccccgtccggattgccgacttgagcggcaggaggctcagaatctggagccgcagcgcgtcggggaggtccgagatgcggtncttctnctactncccccaaccccgncgacgattgtcgcttccctcctgatcccccaccatttggcaccccntccccgctaccggcgtcgccgcacgaacgacgcggattggatgggattcccacgccagccgggtggatagctggtctactcaacttcttttttctttgtttaatctcaagaagaagaagagacctgtggagcgtccgtatcttcgcggggcaaagccgtgcgtgtgccgtttacaccgtgctactgccggtcggtaaatacacactggttcgacgggttcaccaatgtaaaggactaccaggccagcctggggcggcggagtaattatggtttaacggagcctgaccgaccgaacattatgaattaaccgggccttttatgggcccggacaccgggaccgaggcaaatccttttaacaagctgggcctcttgacctttcttcctatttttctccactctcggggttttttcttcctttgttgtcacaccctttttttgggtggttataaaaggacattcgcgcggggtattgcaatgtgt

SEQ ID NO: 16537 - DNA, 4480 bp, Oryza sativa
tacccatcataaggctggtttattccaacgattcctccccaagaccaccccaaattatagagcataaaaaaatattccaactctgggagatcgtaaacaggaaaagaagaaaaataggcaccgcccacactccaatagctctagcttaaaacccgggaaaaggctagcattcgttccgaccgcttgctaagccaacaaaggaattcaagtgagatcgtctaaaatccattcctaacaactgacaccaaactctactctagccacatcttcgagattgagggaaagagtgacagagaagaatggaatggctctccaccagggccctctgacgtggccatcttgcataagctacggcgccgacacaagaggacataagtttaaagtgagcttgcaccggttgtctgtaggttcttcatccacggcctaccaacatgacgtctctagggagaggagtgaaagaagccctcccgccaccgttgctgaaggtgccgcctcccctcctgatcccccaccatttccaccccctccccgctaccgccgccgccgccgcatcgacgcggattggatggattcgccccggccgcgcgggtggatggctggtcctcctcctcctcctctctctctctctctcagtatcaaggaagaggaagagacgtgtggaggcgtccgtctcttcggcggggcgaagcggtgcgtgtgccgtctccaccgtgctactgccgctcgctaaatacacgcggctcgtacgggttcaccagtgtagtgtactaccagcccagcctcggtgcgccggtctacttctggctcaccgcaccgcaccgcaccgcacattcgcatcacccgggccttttttggcccgggtcgccggcacggtgccgagcccttttcacacgctggccctctccaccttcctcccatttttcctcctcctcgtggtttttttctccttttgttttcacaccttttttttgggtgtttatgaagggacattcgcgcggtatatgcaaatgtgtgtacagtgtgtagtgtaatgcgcgaacgtttaaacatttacgcgggaatggtgcacgcaaatgtgcgcgctgggtgttatgcgtggacatttgcgcgggaacggtgcatgcaaacattgtgtgtgttatgaggtgtagcatgcaaacatttacgcgggacgtggtaaatatgcaagcgtgttccgcacggcacatgtgtgtgcgcggttcatgtttctatggctgtgttttgtgtttagttcagcgcaaagtttaaattttgtttgaaattggagatgatatgactgaaaagttgtgtgtatatgataggttgatgtgatggaaaatgactgaaatttagatccaaactttagatctaaacacagcttatatgtaaaaatgttctatgtaaagaaaatgtttgattagaaataaagttttgatgttgaaattggagccatgtcgaaattagatgtgtcttctgtgtgtagaaatactattttaggaaaaccttatgtatataaggtttcaatgtggaatgtttctttgtataaaatggaaccaagtttgatttagatattgaagttcatatatataaattttatctatataaagtttatgtgtataaagtttcacactagaagtttgatccgattcaaaaatgggacatttgccctcgggggggtacgcatgaatctttttgaccctttttagtgccttccgttcactgcctgcttagtttatccaagttaagccagggcaaaaataattaggcaccaaattgaaatggcatttggttttgatagtgggttaataaacaataaacctttttataatatcctcactgctgctaattttgagcgaactttctaataaccgtgtagatgtactagctgggacggataatatagagaaaagcaagcatatattttccttttttttttctgattggcagcggatggtacacagccacgccgggaaaaaggggttactacatgcgtctccatggctgtcaaatcatgctgttcctttcaataaaggttagtttttacaggatttgtccagctaatatgttgattgacagattctgagactgaaaattaaccctgacctttggtctgatgatgcacccatgcgattctacagctgctacaccactatatatatacatcagtggttgaacaactgcaccgtaaattgtttataggacaattttgtataagagcatgtacaatagaaggctgtccctctcataacctatggctgtccctctcatctcaccatccctcaactttctccctcacctacagtggtcttcgttcccgctttgaagcacacggccgttcaacatcgaaccacagcatgacatgcatccaaatcttgttgcaaaggcaagtgatttcatccataaaacttatgatgtcaaaaaaagttggattgatcttgagttgagtaccagtgccagtgtgccaccaaatctcctccaacttttgccttggctgcatcagggttgtcaccaattagggaaagggatctcatgtttgtgagcacagtaaaagatggcataatcagatgttggtttgaggtgaaaaaggaagaagggacattattgtggatctgtccatacaatctccaccgtccctaattgtggttagcaacaagaaaaacgtggatatcactacaaatctcttgggttggcttgtgtagttgtgtagtaggaggtcaattgctatcatgggttttggtttgagtccttcatggcatgtgaccacgagctttaatagcggtgatattgtgagaaattgttcaacaaaaaaatgtagtatatgtattatgagtggtttaaaggttaaatatgaaaaattgacctcaacaaaaaaaactctatatttaagttttctttcttttcggttgacaagtcaacaagtataaaatacaaggcgtaagcaagttcttttagtttcctcctcacataagggtattaaaggtgtttttatttgctcataccgtctccaacacaaggtcgttgagatgtttacttatctaaaccatgagaccaaatgatttttgctgtttaataaatagatgcaccataaaattggtacggggatttgattgacgcgatgaaacataacattcttatttctattggtgtttttactctgcactttataggaggttcttagcattttagcaacctttatatcaaatgcatgccttgataaaaacatcaaatatgtaaaaccacactagtttttatcactacaagaaacaatagcacacacatatatatgattatacgttatgtggttaaatccagcatatgcttcgatgtcttccctctaaatctagctcagcggccatggctttccgtagtcgagctttgtaatccttcttccacatgcaaaaatttgacttgagcttctcgaggtcatcaatggaattcccaccttgagtgcttggctgccatggctcccttgactccacgagtgcttggctctgttgtcggaactccgtgcatgtaccacgagcaatgcccgcataatggcgagagctgtgcgccaacctcgccgatgtttccttagacatcttcacgtaggattccgaggattcttggcggtcatatagtgataacatttcacgtgatctcttttctacacattcttgagccacctgtgagattcagacaatcaatcgaggttagttagattattgtcactttgtcacgtgaatggctgcaaaaatggtttgattaattacgtagctggtgatagtgttatgatgctgacctgtagagaaatcatttgttcatcaatggtttccttgagagagctgagcctaatctcgtgttgcagccacctaacatggtaaccctcaaacttccgtttcagttcagcattctcctcctctttttgcctcaatctcgcctctgccatggccgccttcccctcaagctcctcaaccaacgttgttgttttgtcctttgcttcttcttcctcctggcaatccaagccatactgataacttgatttgcacttattattatgattaattcatcatataattcaaatgatggaaccttgagatgtgatgatgaccacggttgcagtgtccatggccctgagaattcgacaatgacatgcctttgtggccgcgatgaatgtcgtcggcatcgtggggtcggccgcatgggaagaggtggcaatggcaatgagtcgaggacattgtcatcgattaacacattgtcgcctcctcctcctcctccttctcctgatgatctccccatcatcggattcaacatcacctgcaaggagcttagagccaatgtcgctatgattgacgggctctctaaaggatcccaaggccggcgacccctatgacatggagtatgaacgattgatagattattgtattagcatcaagaatcagagacatgcgatcaagcattgcatgatcgttggataaagaaagctagaaaaaaatgtaga

SEQ ID NO: 16538 - DNA, 16316 bp, Oryza sativa
gatcctctagagtcgacctgcaggcatgctttaactggttaccttttgacatcactaccagggaactcccattatttgctccagcaagtgcacctatatagtagttcctttcccattggtccataatccattccttcaaatgaccagaaaaccatggaatcacatttgacaatgtatacaagagcttccttatatgtaactttgccttgaaaagttatgtgattagtttgctaagattttccaccagttaaacaaggagcaagctactcaccttgtgaagaaaatgtggtgaaagttcataaacctgggaagtgaacccagtgccagcatccatgattagagcccacagatttgagcaagatgttatgcaactgataaacagaccatcttcattccctttgtcaatgtgttgtacaagccttgaatctgcaacgttgtagtgatacctgcaaaatatagaacatgtatgttgcattgtactgcattaacaaaggtggatcatatagctaactataaactaaaactttcgggcctcataagaaaaagtacctttgtttcataggccgtctggcattataaacactaatccactgtgttgcaggcatacccatcctgatcttcttctttggttgttcatctgtctcttccatcaataagcgacctctcttttggccaactagatgtataagctttagagaaattacaaggaagattagtgcaaccaaagtcatgatttttaagcagtataacagattgcaatatatgattgtattgtaccttctgagcaccatcggtgttaattggcctgatatctggatttgggcccactacagtatcgaaaagggatatacactttgcatagttaggttcttcatcaaacttcaagttgaccacatactctacaaactccctaaagggttgtgggcaaaagcagcacaatgattctggagacgtagccattttctttttgcacacaaggaaacccttgttttcaccctgcaggcacacactatcaattatttaaatgtattactacaatcagaataaatggaatggtgggtccggcgaattacctgataaccttgccaaggtagacgcccccgtagaagaaaaactagtgtgtaagctagagattctaaatcatcccttcggctaccgattctccctagatgtgcatgaacactagcatagcgaactgtccccctgaaatagcagcaaaagcaaggcagagttactgatttgctataagcctacaacatgaagaatgagttggcattcaagacagaaattagggctctatttccatgcagaaacagccagtcaccaaacataatagtgaggagtgattgaccagcaccagtgccagccgcatttagtgctgttgagaagtaatgaataatggttgtacaggaacaagcagaatgcggggaaaaaaaagataaaacaaaatttaagtgaatgaaaataattgttggccagaaaccagtacaaagggtgacctgatttggctgcatcctaggactcaaccaaaaacaggaaacagaacctacgaaggaaatgccacagagcattcaatattatccataaaagcactagcgacaatgtaaatgatgcctattgattatcataaaatttccatctggtcacctgaaaacatcaggtcgctggtcatagtcaacgtggaggccagttgaagcatctctccacttggtagctgccatttaaagatagattaaactcaattaattcagactcctcaatctgctgctaccttaaaacaattgaatagacaatgatcgagcagttggttaatctgtgaagatttagttacctaaaccaagatcgacaaggaagagtctcttttcttcaggagttccaataggccctagcaagaaattttcaggtttcacatccccatgaacatatctgcgattgcaaaacattttctattacaacagaggaaataaaatgtattttggtggggaggggataataataattagagagatggcaaccaacccttttgaatgcattttctcaagtatggagatagcttcaatagcgatgcacgcaaccatctcaacagacattctgaaaaccaaaacaaactatgttagtgataaattagaagtctacataaatgttagctaaattggaaaactcacgtgtgagaattattattccaaacatcccaaagactgggtcccagcatatccataacctacatttttcataaaccaagttaattaaaattttggaaagggcaaaaagaaaacagtttctctcgtagtagtcaaaatgaggtgtcattactataacatagtattcgccttgacgtcctttatagtggactcgaggaaccccatgaatgccaccgatggcgctgtatatacgatggccatgataaaagtcaggtacctatatatagcatgcaacttgctatgcataatggcagatcatgaggcacatacttgtaaacctgccattcgtaaggaggcccatggttgcatcctttactggttctatgttcaaactttagcgccacctaccattcgaaagcacgatatttattttcaaccgttaataccatccacggttacaagtacagttttacaaataggctggcactaaatacctcagaagcacctggaccgttagctaacatgcggcggccaacatatacttggccaaatcctcctttaccaagctttttatcaactctatactttggtgaactgcccacctggacctgcacaaagccaaaacaaacagattagaaaaaaaaatcgttttgaataaatggagacaactgaagctaggatcttttgggatacaaacacgaaatggctaccgatcccaatcataactgtcgcttaacctctggctttacaagatgaaaacaatttagcttcgtggatgacgggtgaatctactgaataaatgttcaaaacggctaccaatcccaatcataaccgtgaaccgtcgctcaacctccggctttacaagatggaaacaaattagcttcacggctgacgggtgcatctacgtgttcggaacagctatcaatcccaaattcccaatcataacccttgcttagcctccggctttacaagatgaaaacaaattagcttcacggatgacgggtgcatctatagaataaatgttgtatgattgttgtatccagtccacgcacaggcctggttgatgattgctgcatccagtccacgcacaggcctagtaagcacaagtatcaaataagagaacatctcaccgtatcaggtactggagtggtattcccctcgtcctcgacggcctgcttgtcggcgctgcgcgccccgctgtccgggccttccatcttcttctctccgccgccttccctccccaaatccgcgacctcgatctcctcctccctcccctcttccgcctccggagcagcctcgacggcgacttctggctccttcctcctcgccgcccttcgcctcctcgccggcggtggggccggtgccgccgccgccgccgccgccggattctcctgcgcctctcgggccctcctcgccgcgctacgcagcacaggcatcctcagccatggagccccatatgccccccgcgcccccgccgcctcctcagattcctccgccaaacaccaggaacgccgccgatctcgggggagtgggtgggaagcgagcgatgcggcgacgctcgggtcgcggcgcgcggcggcggcggcggccctagcacggagacggctagggttggggtttgtatgcggatgcgatggaatgggggaggagacgggagggagggagggagggggaagcagatggtggtggtgctgacgtcacccgcggctagacgcggagcggagtactgtgttagttctacgggaagggaaaaggatttagcgcggcggccaccgtgtaaaatctggctgtgtacatcatttcaagtttttctatctcaaaaatatgctgccacttgcaagactcgactccgatttcgcttggaggaccttaatcagctacttctactattctcccctctataaattactctcctctagatgtttggaggatgtatgtttgtcttcggtcaaactaccaaaattataaactaacactagataacgagatacgatttaggtttagttccacgtcaaaattgaaagtttgaagaaaaaagttaaaagtttatgtgtgtaggaaagttttgatatgatggaaaagttagaagtttgaataaaaaagttgggaactacacaagcacgtagtgtctgatgaaacagaaatttgcggaactgaaattggctaagaacgagtacagttagtgatgcaagtgggctctaaaaattgtcacattatatttgtgcttaggtgaaggagcgagagaaaaaagtgagctacagagttaatatatcatgggttaaaaccatatgtgtatgagtatatatttatatgtaactattttatggaaagattgttaaattggttacatatgacgtattaatttttagaattatggctttataagtaaacttgttctaagtgtaagaaatgaggtggagtacataggcactatcttcaatgtgcataatcacctatattagtggtagaactacatgtatgttttcccctgttaattctctcacgttacatattttttttatattgacttcaaagtgttggtagtagaaagtaaacagttaaaaatttctttgttgacaataaaattatgcttagtttacatgtatcaaataagtcctttatcttctattggtataataatatttatctccatcgagttaaaaaatagagcaatcttgttccctgccactccttagtttcataaaacggtttatatgttctagtaacatcttataatcttctaatggaagttgatcatcgtcaatgggtttataagcttttctcattaacttggggattcctattttacgcgcgcgctggctacggaagtagcacgcagccgtacccccctcaacgccctgcagcatcgtaattagcggtaatgatggtaattagcaatattttccttttctggaaggttttctttttactaatagattgataagaaatctatacgtgaagtccaattttgaaaaactttcaactcgaaatttgaaaaaaaaattcaagtcagattttgaaaactttcaacttttcatctcaaatttgaaaaactttcaactcaaatttgaaacttttaacccatatttgaaaactttcaacccagatttgaaaactttcaacccagatttgaaaactttcgacccatatttaaaaactttcgactcagatttgaaaactttcaactcgagatttgaaactttcaatttggattgaaaaactttcaagtcaagatttgaaacttttcaaatcaaaatttaaaaactttcaactcaaaattttgaaaacacatatgtttaagattaaaaaaagtcaaaaaaaatgtgaaaataaaaggctacaaataggagaaaatcgaaaaagaaaaaggaaaatcgaaaaaaaaggcgtcgcgtggaggctgccagctggcgcgcgcgtgccaaatagcaatcgcgcattaactttaggtatgaaatttattatgctaacgatgcggtagggttttcggaccgactacataagggctttcgacactcttatactgccggtttgttggatggtttggaagaagagaaacgtgcgtgtgtttccagaatcagagccgaagctagggttttcaaagatttaggtgagtaacatcttattgtaacccgtctttctttctgaaagttgctattgtggcaacctccattcacttcagcagcctcttgtcgaagcctgaattctgtatatgtgtatatactctattcttaagtaaatttggtcatgctaaaaaaaattattaggcaaaaaatttactacggtcctatacttttaaaacgagttatttatttataaaattcatgtaaaccttctaataaaaatgcatgtaattgtaagcttcatctgttacgtacacacgagaggtggtgcaagttttatggcgtgaagtgtgaccgcaacgacatggtccggcacttcaatgaattcaaggactaagcaggcaagcacgcggtgtctacgaattcaacaaatccgatcaatcctaaacccagatgctcggccaagaccccaaagatcgattggatcgatgaagagtgatggaagcgctttggccgcccttcccctcctgattcatgcgcctctaactatccccgtcggcgccgttgtctatctctactgtaatatggaatttccttaaagcatgaagaaaatttgatgttacaatcttatcaagttcaattgcatcaagacgcttaatttctcacatgccttgaatcgcacagacttttaagttaatcagtttggcatgctatctacttgttttattaagaaaattgttaaactggcctctacatctaaaatagattacacggccaggctgtcatgctactatgtaactggagttggttgaaaaactttatacatatctagttcccttgttatgtaataatgcgattgattctgccatcattattgaatcagtgactttctaaattaattagggtatcatgttatacatgtaattggcgttggttgaactatccagttctgtgatagtgtgaatatgtaatgagaatcgtcgaatagtattttttttcttctgtgaataattatgtgagctccgataactaaatagcacttgttgactaactgatgcgggtaactgattaatttcctagtgttttgttgtttatagaacaatcccacaacgtgaacatcgtatggccctgtctagatcctccaaaatggcaaaagttttgctattttgtagcactttttgccattttggatctaaacattagtagcaaaagttggcaatttggcatttggcatttgctagtccatagtagcaaattgtaccaaaaagtgctttgggaccactccctctctctttctctctctcactttagtgctagaatggcaaaactttaacatgcatctaaacaccaactagtacttttacaataccaaaacttttgacaccaaaacttttgccattttggatctaaacactagtagcaaaagttgacaatttggcatttgtcatttgctagtccatagtagcaaattgtgccaaaaagtgctttgggaccactccctctctctttctctctctcactttagtgctagaaatggcaaaactttaacatgcatctaaacaccaactaatacttttacaataccaaaacttttgccacaaaaaattttgccatttgtcattccaaatggatctaaacatgccctaaacaggcccttagatcctccatttgccactttgaagcaccttttgccattttgatctaaacactagtagcaaaacttagcaatttggcatttggcatttgctagttcatagtagcaaattgtgccaaaaagtgctttgggaccactccttctctctttctctctctcactttagtactagaatggcaaaagtttaggatgcatctaaacaccaactagtacttttgcaataccaaaacttttgtcatttgccatttgccattccaaatggatctaaacaagaagtaaagtgctcgtcgcgtattgctgtggaagttaagaagaataaagggaaaaagactaattcccctcatcgaatgaggggttggagagtgggccataatgactgttgctactggcattatcgtgtggattcatatgaggatgaaactcacatgtcggcagctataagcttataacggcaataccgttacaatagagactctcagcctatggaatggtggttgtggtagttgagtgagaagagcgtgacctgtggaacccaatttagcaagcatacgcaggaaatatggtgtgccacattttaccaataaatatttggcatcctgtgactttcttccaaacatgccctacgttgttggaacaacggggagcaactgttcagaagcaattgttatcagatcatcactgatcagcaggtcagggcgagcgaggatatctgactgtcatggctgtccgttgtgtgctggagtacaactgtacaaggcgcaaacgatgatcaggtcctggccttcctggctgtccaaagcctcaagctgtcatcagctagcttcactgctccaactccaagcatcacatgcccagtctcgctacacccacacgcacagattgggggaccagtgaggagccacacagacacttgtgcaacccctcacatgcccaaagccctcttgctttcctaccaactggtcagtgcaatccagcaatgcacagtgcatcacacgcttgaattgttattacaatcaggtcagcagcttaaaccaccgtgcaccgggtgggcagcagtgcagtgcggtgcactacaaacttgatgcaagaattggctcaagaggtttgtattgcatggtatattgggtcaagctatccatagtgttgtacattctgtgatcaatataatgaactcctgaagtgtgaaagaatggattgtagcccatggaagcaaagaacatgactttacaaaaggggaggaaacaatgaaggcaaaaaaaaaaaaaactgtggggggttaatactgcatcaaaccaaggggggggggggggggggcaccttgagcgtctagagcgagcgccaggaagcaatgcttgaatcagacagaaagaggagtaccccaaaggctatggcaaatctgagttggccaacccccccatggctgtcggaccttctctggatgcaaaatcctgtacattcaaacacatttgtcgcgattattcaggggaaagaactttgtgcgtcagtgagatattaaaaaatgttctatgcagacatgacccaagcatgaagataaacaaaatgcatgacgacatgacccaagcatgaagataaacaaagcacacaaaagcaaatagcagtataacatagctgacctgcaggcggtgcatcaagtacatcaagaataagtgcacaaacacctggaacagagatatatggattcaattatagatcaaccttcatatgctaaaaaagcaagaatacaggaagtaaaatctttgcagttcttaccagatagaatagaaggctgactcgagcaacggggtgacgccacaaaaatctagttgcacgtacagctcctgaatctagtaacttcgcagccttttgtaactggaaaacagaatatgcaaggaaagtaaggtaaaattcaatattcagggtgcagcccttcagatttccattggtcatgtatacctgctgatttgctgttgccatgtgtcgatgatgtagaggaagaggcctgcaaatagtacacttaattgtctaagacaacagcacttgaaaatataaggaccattttaaacattatgtgaatcatcaggtgtgattgagaacagaaggtttgctcctgtttccctggatgttcagaacaaaagagaaatggtgaacgtactccagtgccttgatatcagcatcttcttcccatgctgatgctgatctgcgagcaactctactcctttctgcttccatctatcacatggagaacataatggagtaagataagaacatatagatgaaattgattgcagcaagaacattatgacaaggaaagaaatttaggaacctgcacttcatgaaactgctttattgatttctccagttgaaactccagtgcagccttttcacttgccatggattctagttgtgtttgcttgtggtactggaagaatggatccatacataaataaacttggtcttattaatctagatgtcaaaggtaaaaaaagaacaatgatttgaatcatagcataccagcaagtcagtgagctcacgatatctcttctccagttcaacatgctcctaaaaataagacatgtttacataaataaatgcgacctgtgagaacaatctggtaataagctgaattactgcagaagttatattaaccaagctagatgttcgattatctaaacacaaacatgaaaaacccatataattgttagatgtattgtatagctagctgtgtatttactcccttcttgagggtgctttctgcatatttgtattgagctttgtgtatacctgtttggcccagttggcccattcaatctaaggtccaatatttgcaacatggtatcagagcatatggtttagggttccacatccgccgtcgtcgtgaagctctctctctcctctcacgcgactggatccctcttctctctcgcgcgagcgtcgccacctctgccctgtgacctcgcctgtggtcgccgccgcgccgccagtgtcgccgccgcgcctctgcctcttggggtcgccgccgcgccgcctggggtcgccgccacgccaactggagtcaccgcccctcttgcgggcgccgccttcctctgctcgcgggcgttgcctgcccctgctcgcgggcgccgccgttcctactcgcgggcgggtggccacgggcgggcgctgcctctgctgccgccgcctgcttctccctcatcttccaccgtctaaagctactgcctctactgtgatggcgccgccctcgggaaaaccgggtgccatttctcttccgaagcctccggtcatcttcaacggactcaacttccgggagtatgcattgcatatgcagatacacatgtgcagccagcggttgtggggctacctcatcagcgatcggccttgcccgccttgtccaaccttgcctgctgagcctgccatcccggcatatgctgatgagaacactaagcgtggtctccttgatgatcttgctgctgctatggaggcgtatcagatagatctctctctatatgagacttggttagagcaggaggcctatgccaaggctattttggttgggagcatggaggttgacatatcactcgacattgcgggccttgctagctctgagttgatgtggacccgtcttcgccagcagtacgagcctcgcaacgatgccatgtttcttgccattgtgaatgaggcacaatctcttcgtcagcttgatgccactgtggatgagttctttcgcaagatgtctgcggtgtggcgtcaaatggacctacagggcgctgatgtttgtcacacttgtacctgttgtcagcgccagagggtccagactgagaccactcgcctctatgagttcttgtctcgtttgaggcctgagtttgagcctgttcgagctcagctgttggcacgacgccctcgaccttcattgttggagaccttgcctgagctacgggctgaagagactcgttgtcgtgaggctggtataggcattgcacagcagtccacctctgtcttggttgcacagggcttgccttctcaggtccatgtctctgcccagcctgttgtggtgccatcacctttacctgttgcggctagtgctcctagtactccttcaggcattgtttgcgggtactgtagcaagacagggcacaccgcctctatgtgctacaagaagaagagagatcagagtcgtcgcacctctcagggctctcgacagggctcttctcagtcaagctctcagcagatcacatcgaccgagcaagagcttgtaaggctccttcgtcgtcttatgactacagcctctacctccacccatgggtctgctgctcaggcttctagtcttccaccaccacctccatcctcttcaggtatattgtcctcgtggtttcttgattctggtgcttccttccatatgacacccgattccacacatctttcttctatgagtcctcctgatacccctctcacagttcagacagctaatggcacctcacttcctgttgttggtcgtggcacactttctacttcttcctttcgagttcctactgtctctcatgttcctaagttaaccatgcagcttatgtccgctggtcagatcattgatcatggttgtcggattatacttgaggctgactcttgttgtgtccaggatcgtcgcatagggctcctggtgggaactggtcctaggcgccatgactctcagcgtctttgggagcttgattggctacatctcccttctgatgcttctaccagccagtcagtcggttccactgcttcagcgttagctacttcatccactactacttttgctcagtggcatcgtcgtttaggtcatctatccggtgctagattatccacacttattggtagtggggtcttaggtcctgtttctggagataccgctctacattgtacgggttgcaagcttggcaagcagctgcaactcccctattcttccagtgcctcagagtctcagcgtcctttcgatcttatacactctgatgtatggggacaagctccttttgtttcgaaaggtggccattcctattatgtgatctttattgatgactattcgagatttacttggatttacctcatgtcttctcgtagtcaatttctttctatttatcagaagtttgctactatggttcacacagtacgattcttccatacaggtttttcgtgctgactctgctggtgagtacatttcggcagcccatcgccgttttctagctgagcagggaacacttccccagttttcttgccctggtgctcatgctcaaaatggcactgctgagcgcaagcatcgtcacattcttgagactgctcgtgccctcatgatctcctcgcatctttcgcctcatttctgggctgaggctgtctccacggctgtttttcttatcaatcgacagccttcttctgttcttcatggttgtactccctatgagcgcctatttggtacacctcctaggtacagtcatcttcgatgctttggttgtgtttgttatgttcttctttctcctcgtgagcgtaccaagctgactgcccagtctgttgagtgtgttttccttgggtatagcactaagcataagggttattgttgctatgatcctgttgctcgtcgcatgaggatatctcgtgatgtcacatttgatgagtctcgtccttactatcctcgctcttccacttgtgatcagtcctccactgtcaagtctatctcctttttgactcttccggattggtcctttccttctctaccaccagttccgtctccatcaccacacctccctttggtttctacgccatctccatcactgtcaccacctccttcgccgatgccatcatcacccatactaccatcaccacctcctagtactcttttagatgctccacatgagctatcaccttttccgctgcactactctcgtcgttcacgaccccttgttgagttgtcctctccctctatccttggaccagctcctgctcctgcttctcggtatgatcttcgtgatcgccatgctattaggcctgcgcctaagtatggctttactgctgcggctattgttgagcccacgacttaccgagaggctattgcccaccaggagtggcaacaggcgatggcagaggagattgctgccttagagcgtaccaagacttgggatgttgttcctgcacctactcacgtcactcctatcacttgtaagtgggtctacaagataaagactcgctctgatggctctcttgagcggtacaaagctcgtcttgtagctcgtggttttcagcaagagcatagtcgtgactatggtgagacttttgctccagttgctcacatgaccaccattcggaccttgttagctgttgcctctattcgtcagtggtccatttctcagctcgatgtcaagaatgcctttctcaatggtgagctgcatgaggaggtctatatgcagccccctcctgggtattctgtccctgatggcatggttcttcgtctgtgtcgttctctttatggtctcaaacaggcccctcgtgcttggtttgagcgcttctcctcagttgtcactgatattggcttcaaagccagcgaccatgaccctgctctctttgttcacacttcttgtggtcggacccttcttcttctatatgttgatgacgtgatcatcactggtgatgactctcggttcattaatcttgtgaagaagcgtcttagtgaccaattcttgatgtctgatttgggtcctctcaggtactttcttgggattgagttctcttccatgtcttctggtttctacctctcccaagagaagtatattcaggatctccttgctcgttcgggcctcactgataagcgtgtggttgacactcctatggagcttgggatacatctacggcccaatgatggtgagcctcttcaagatcccacccgctatcgccaccttgttgggagtcttgtctatcttggcgtcactcgccctgacatctctcagttcacattctgagtcagtttgtttctgcccctactcagctccactacactcaccttcttcgtgtcctacgatatcttcgtggcactatctcccatcgccttttcttcccttgctccagttcattgcagcttcaggcgtactctgatgcgacttgggctagtgaccactctgatcgtcgctctctctctgcttattgtgtctttcttggttcctctctgattgcatggaagaccaaaaagcagactgcagtttctcgttcaagtgcagaagctttgttacgagctatggcagccttgaccgctgagatcacttggctgcgttggctcctggaggattttggagtttttgtctctcccccgactccactcttgtcagacagtactggtgcaatcagcattgctcgagacccagtgaagcatgagctaaccaaacacatcggcgttgatgcctcgtacatgagatcgcaggtgcaaaatgaggttgtggctcttcagtatgttccttcagagcttcagttagcagatttcttcacgaaggcgcaaactcgagctcagcatagttattttttgtccaaactcagtatggttgatccaccatgagtttgaggggggggtgttagatgtattgtatagctagctgtgtatttactcccttcttgagggtgctttctgcatatttgtattgagctttgtgtatacctgtttggcccagttggcccattcaatctaaggtccaatatttgcaacaataatttggctagtgttaacaaaataacatcaatgaccagcgagacaagttcacctgtctggaataatgctctgcatctcgtttcattccagccatttcaactctcatcttctgtaactcagcctacattacaaacataaattagtaaaatgaacaagtttcttaaggtaaagcattatatattactatgccatgtataataaatatattgtaatataatatcctccaatgtacttggtcagcatattaccagttctattaccttgacctggttgcaacttaacaaatttaagctatgcatatccaatggaacatcatgaattgatataattctctattattctttggcatcttatgaaataatagtacctccaaagatgatatcttggtttctgcctctctttggctttggcgtgcacgctcaacctcctcatgccatgcttgcatctgtttttcaaaccgcagtggtaagaaaagaacaaatacccagaatgttatatttcaggatataacttgactcaaaaaatgcagttagccatttgcagggtaagtaacaattatatttcccttgtgcaaagagcatttcaaattgaactagagtacgctaaaagcacagctcaatatcaagctgtggataacatgaggcgctttgattctaacctgaataacttgattagcttcttcagaaggctttttctgagcacggcgattacgagcttccatctcctgtagttcttgttgcagcgatgcacattcaacctatgacatatccagagtactgacaatgactagcacaaacaaaccagttcacatttcacacgaaatattaaaaataacttacctcaagcacagccaccttgtgttccaattccattgctctagatgagctttgatcagcagctctctggacggcaacaaaacagtagagatactaaatttgctatctttttataaacacgataaaaactgcaacagtttatccagagcaatgatagtgctggaaggttagagatcaatggaaatacaattttagtagaatataaacaaattagcttattataaagtataaggctgtgtgatttgatggaaatatatcaaaatgatagatgctgaatggcgcacatcatgggaaacatataagttgccaaactttctatctgaagtcctgaattactgtttcttacagtaactgttctgatcctcgctttaaggataaaactcttaaataaaaataagtaaataacgt

SEQ ID NO: 16539 - DNA, 15125 bp, Oryza sativa
  unsure (1)..(15125): unsure at all n locations
ataacagaatctggctaaggtatatggtcctttaggctgtgttcttttgttcaagttctcaactcatctccctcgttttttcgcatgcatgctaaacggtgtgttttttgcaaaaagtttctatatgcaaactgctaatacttaattaattatggctaatacagtaattaattatttgagttgctctgttttgcgtgcgcggagattagttcccagacacaaggaatgaacgcagccttaatgtgtcaagcatgggagattaactagaacaaaacatctgctcaacaccattacgcaattttctggttagtgttgattttttttcggccatataacttgacatcctagcaaaatagattttgctcatgcctggtagttataccttgtaaaattacctggattctagcaagagcatttgatgcttcaacagctcgatgctctaattcgacttctctctcaacagctgcctgcattatagtagagactattaaaactaaacagaaaaaacaatgagtaaacaatgtagcaaatagaatataatttgacaaattaccatctttgtagcattatgtgcaatacgctcctcctcagccctgcgctctaccgtagcaagttcctctcgtaaagcctaaagagtaaccaacacatatgaaggtaatatacctgtatgaaaatgtggggacagaattttctactcgaagaaacctttgttactaacctggatgaccctagtttcagtaagttcacggttcctcttgagaccatccatatcttcctggtttcaacagacaatgagattaatatgtactgagagcatcaattgtgtgactgagctataaaacacaacaaatgttcaagaccactggacagccatttcgtttaaggtatgtttctagaaaataacatattattaagttaactgctgcagaaagaaactgcaagacttaaagtgatatctaacaacatttacatgcatattcttttttttaaaaaaaaacatgcattttagatttgatggctcgccactgcccacactggaacaaaaccagatgaacctcataactctcagacctaaaatacagctagggagcagattttccatgattttgttatgctaaattgcaatcatgacctagaagaatctaagatatgcaagagtggatgatatcaaagcaccaagaatccacatcttgaattcttggaatgactgtgaaatttccagattcatcttattccaaataattgagtatgccaatcttcagaccttattctcaagaaatttaaaagggtactcttttttttttagataatgggtaaatcaggcctttgcttcagtagaagctacagccaatgattacagtgtttgcagcaaccaagttgccaacaatgtcaaaacagaagacaagaacatataaaaaagaaaatcctggatgaaagaaagctcatgttacaaagcaataacaattagatcaagacagccacaacacaaaacatgtacttaacatagcaaacataagaaaatgtaagcactgcattagtttattttaagctattaaaacgacaaaagaaccaggaaagtgtgaaaagtgttgatggaacccatactacaaaatgaactatattatggatttatgataaatgatactaggacacaacatatagtttccttttggtcctagtagtagtaacatggctactatgaagaaatttctaagaagagcaataaaagatgaaacctgtaaagctgcaagcttttcttctgaagctgctgcctttttcttccaagagtccagtgacttaactagagactcaatctcagcgttttttgcagtcaaagcatcaaccatgttagattcagctcgtgaaccttctactctcgacattgacagttcttgctgtagttgcttcatatgagcttcatatgagctacatttctctctctgttaagtgttttacattaatacatagagaaaacaactatagaacatatcagcgtcaaaaactatagaacatatgagattaatgttaatagaaaatgtaatgaaaagaatgttggtaagatgatttgacctcctgaacaagaagttcctccagctgtgcattctcagatttatactcctggaggcgggatgaaagtccagcgcagacctattggtagtaacaaataaatctacaagtcagcatatgaactagccacaacatagataacaggcagggtcaaacttatactgctcttacccgagctaacctagcttcttttgattggccagttttcacaacattctttaacaaaccccgagcctgtcaaggaccagcgagacatggtatagtgtagctgtgcggaagagaacacataacatgcaggatatcttggattactacaattttccacaacctacctcctcaagttggtcttggtctttcacagaaccagaatcaagcttatgttcctgctgattttccgtactctccggtgagtcagacaaaccctctcgtttggaatcttgggattttccagaaacttgtgtgtctggtacttccttgatatttttctcatggataacttccatagctgagtctttctcctccaaattaacagctgaaacgatctcagcatcctggttactgatgcttggctcacatctttcatctggaacggaaggagcagagctttcagcagcaccctctgaatttccagaatctgcagcaccatccacaacaatggctgcatcctcagcacttctctctgttgattggacttcaacctcagtatcaacaacctctgcacctatatcattcttacgatcaacgacgaccttctcttctttctctgctccaccatcatcatccagtcccttaacatcacttgaggagacatcaggtttactggcactagcgtcgacgcttgatgaatcaacaggtggcgaaggcctgatcttctcaatcttaatccgttcccgcggtggttgcctactcttcctctctttctgagcagccgtcctgctaccagcatccccagttgcaagcttcaatggaccctgcgatgcaatttagcacaaaatgtaaaccattggttcccaagcacattttgtatgcacaaggaggatactcagtcacgaccttctccctcagctttcccttcttcgcttgaccttcttgactgcttgaaccttcaccaaacaaaaattagagattagttcgctctctaagcagcaaaccatgcactgactaaaccaaggagaaaactacctgaaggctgagggctagactgctcatctgacaactcggtagccacaatcttcgccctccggtcgacaacttcaagcaagtctgacacaaaaaaaaacaggtaagttgtactgctccccgttaccaacatccaatagcgtattcaagcaagcaacaagacggatacgggttcggattgggtgcaaatgcacgcggcgcgccaaaacgatcggacaaagcacagcgccaaggctagttcgctaggtttagcgactggcattatagctccaggagcaatcgagtaaacggctggcacgagagtagaggggggacaagcgccaagatctcagtcgcggagaagcggtggatctgggcggcgaatcgggaggaggggggaacgaggacaagaaggtgggcgtaccttcggcgaccttgagccaggaggccatggcgggatctgccggatcgccgccaggcgggaggaggggtgtgggccggcgcgagtgacgaggagcttggatggatggatgaattggctggtgagatctccggccgcggcaaggctgtggggttctaatggcggtactactacgggttggtggtggcgggggacggatccaaccggtcgctcggttcggtcgacgatgagaaaactagttcgtgtgtcatatacagaagcccgtctagctcagtcggtagagcgcaaggctcttaacctggtcgtgggttcgagccccacggtgggcgtgtggctctttttgcggggaatttttctttcgctccttttttttctacttcctctgttttgatgaaacggagggagtataatccttctttgagctcgtgtaacaaatatcgttgcacttttttgagcagtgattatttttgagcaataattcttttgctttcctttttctaatccttcaatgatacttcttgttttctctctttgggataatgcccacctgtattttcattcatataaacaaaaggatgagaaaagttttaagttactgtaggaaataaacgtgcttattggcgcgtctgttttacagcccgtgcattcgatttcaggttattaaaaagctatggctgtattttaaattttttatagatatatactttggaaaaacaattgtaaaatacgtgtaatggagcttttgttgattttcgaaatgacattattttaagtacaggggtagtacaaattttgcaaaattttataagaattgaactgaacttaagaaaaaaaaggtatattcaaataaattttattttaacttagtttaacataacaaagtcttgacattcgtctccaaccgttgagtagaggcgcataggggtgtcacttgtttaatttactctgttttatatcaagtttaagctaatgtgggtatctaaatttgtattgaggggtgtagacatggtttnnttnggttnnttatngcttcnnntttttnttntcngnnnnnnaggnnnnnnccctccccccccccccgcccccaatactctagctccgccctggaggcgcggccaaactgcacacgtgacaaagttcagcaccgaccacactgacgctaacatacccgacctcaacaccaagcaatttgacgctgagattggggacttagcccctcaccccctcgcggtgaaggtgtactagagccgaaggtcagcaccaaacgccttggcgctgaggtggcgaagctcaggccgatcaaattgggacccacgtgttctttaattgggacccacgtgaataaaaaaggaaatagagattggccactttatttctgggagcaatgatatctgacatgcgggtccaatatacttttttctacactagcactgatgcctgtcactatgcttaaattcaacagggagaatcttgcaatgcgtagaatcggccttatcaccttctctctctcctatagaaccctctctaaattcaacaatgcacatgctctaagattaatcaggcgccttaacagagaaggtgttcttgctatcatacagcgacattgatttgatagtttaacatatttccagacggtaggttgcagggttcattgcaaacttttctatgtagatgtctcttaaaactggcattgcccttagagggtcagtaagtaccaaggcgtgattaagatggttgttccaatagctgcccggccagaccgtcatacccttgaaacaaatggttacaagaacaatatacagtgccaatataatcaccatgacaattacctgcaaaacaaacaacagacaaaaaaaggttggtaactggaaataaggcacatcactgcaacaacaaaaatgcgaacagacgggaaaaggttcgaagggtgaaaaaacaggactaggatgatgcaggagttcaatagctagtggggtgatagtagtggagaaaaacaaaaagggggcatcaggaagggtttacaaaaccgtgtggttatcatgtatggtaaagtttttaaaattaggtatacctcgcgataaccatgcgattttcatgctaaccacgtgcactagtaaaaaaacaattttaacatacgggccaaaagtaattttcgcgtgcggaccttcatcccgtctgtctgaaaaggtctatgagaatcgttatttttccatacgggtggcgcacccacacatgaaaattgatttcacgtgtgggtatgaatgttgtccctatagaaaaataaaaccgggaaaaaaatcgcaaaacgcccgctgccgttccgggtgggggatggccgccaccaccgaatctgagcgagggagggccgtcgttgctgccatcgagctcctcccgcgttcgctgccagatccgggcgggggagggccaccgtcgcccctcgccgccttcgacgcgtggggcgcccgctggccgccgtgctcctgcccaccacccatcgtgcttctgactaccgccgcgcgcccgagagagagtagtgtgtgtgagagagaagagtatgaggaagagagggatgagaggagctgaggagataagaatagcttgaaaaaaaattgaaatgctaagagggacaagaggaggtaacttaaactttggagcggaccttaagaaaatatattttttcgtgcggctgcttaagagacccgtttaaaaaaatagctatatttttgcataccgcttagatttttcacatttgttaatcggatttgttaatttattaggtgggaggttcttttacgagtcggcccatcatatccctccgtctccagcgcacccttttgttatctcgggccccggccgtatttagcagcatctcttagggcaagtttaataagagagtaagcagccatctattagatgcttacatgtcatttctatatcattaaagataatataaaatttaactgagtcattaatttttctttcaatgtggccaaaccttggttctctctcctaggctatcgaccaatcacagatgctctttctatgtgggccaaccttaattatctctcacctattcttttcacctatcacagtatccatcgtatgcatgccgtgtctaggcgcccgtgcacaggcgtcgttaatttagtcgacggctgctctctctctctccactccctttttcttccagcaatgcaaaaagagcttatgtcagcggctaatagtaggtacattttccactattgcactagcccttagagcatcaccaatagattagcaataatctattccctaaatttgaattttgggtttcctaaactgaaaataggaagtgaaaaaactcattcctcaaagagatagcctaaattcaatcccaaaaattaaaagtggactattctgttaaactaccaacagaaatttcctttttttccttccatgcacacaaaaagatattaccatgacccgcatgctccctacagaaaaattcggcgctcgcgcgggaaggagagaagcgcggagaaggagagagaacgcgcagacaagagattgtgagtcgctctctcaccctcaaatccacataacgaaatatatggagatagaaactccaaaactagtgcaagacttttgggaatctgttggatctgatttttttttcactaaaaacccttaaaatcagttttgggaatgaaataggacgacggttggtgatactcttacgtggccgttgaatggtggccgttgaatggttgaagggctacgtgataccgttcaagatagcagtttcgaaccagacataccaaaataatcagcgaaatttctttaacctgattgaatacgtcatgtacaaagttacacatattctgttagtggaatactgtatttagatgcaacatcagtcaacagtaacctatacaattgagtacaacaatattggtgtaatggcgatcgaaccgtcaaacgtatggcatcgtgcagctctcgaccctgccgatctgcttggaggcgccaccggcggcgcaggcatccgctcgcgcggagcgatgccggctgaggcagttggtccttgcgatgtcgcgcatggagcgcacgagcgacagcgtggggttgagccgcacggtgcggttgaacctgtcgcagagcgacgcgtgcgactcgacggcctcgcccaccgtcagcgccggctcgcgccgccgccgctcgctcacggcctccgcgcacagcccgcagaccagcctcccctcgaagcgcgcccggacgcggcggacgtatcccggggtgcaatcctccgccatgccgcagcactcgcaccgcacgctccgcgcctcctcctgctgctgctgctcatccacctcctgtagatcacaaacgatgcacggcacgatcggtatccatgccaatggatcggaaaagcagtgggataattagaatggcatggttaccacttaccgtatgggcctcgagttcgacttcctcgtcaactaaacgcgccgtataccccttcatcgtctgatcggtcgtcgaatcttccgagctctgccaaccaatcactagtccgttccactatgagtctgatgcactttacggctttgcctgtgttgccaggaacatgtgtgcgcgcctcggctatttatagacccggttttcaggtgttaccgtcagggccctgcgtgtcgagtgcaggagcccctggccaatgcccatcctaggacgtcgagatcgcgccccgtgattggcaggtgaattcggttttgttgcggcagagagcctcttggttctgctattctatcagccacccggtacgtgtaacatgtgaagatcgtgcagcccgtgacagcatgctgccggaaacagaaacaggggacgaccggccggcagttttatctgccgtagattaattctgcgggcgcaccgcgtggatgcaatccatcgtataatccagccagcttaatcatcggtcatgtcacttaactcacttcacgtttcacttgttccggagcaaaggctaaaataggacagctacagctaggacctgcatggcgctgtagggaacgatgagagtgagatgactcggacagaggcacctgatgactgggcgggtgaagtggcatcacttgaatagatgcaaaatttgcactgaaagtctgaaagaaacagatcgatggatctttcatggttaccgtgcgccaaatttctgagtgagtactctcttgctgaagtagtactagtagtaaagcagagtaagattcataacgaactatcgcgagtgcagatgatcaagtgcttcatcatgttcttaaaagagaaaaaatctatgtcaagaacgccttatcatttgcatgacccacataagaaaaagcaccgtcacacatagaaacaacttgacaaaatcacgagattaacttgaaccaggccacaacagtaaaagttccgtgccatgatagcgaagcaaatacctgggtttctcctgatttcagtggcgaaattactgcgccactgtagagggccatcaaacgtaacgagcaggattatatgccactattgaggctgcggcatcgatcggtcgccgtcgcagcttgttgtgaccttaggtcacgaacaagatcggggataggccggaaagaagtgttttcccgcctatccttagaaactagctcgaacagcaaacacaacttttgaggattactcttgtattcaagatgtcttgtcctgctacaggtttttgactggcttttataaccagtggtcgtacacgtgagattacatttttacccctgtgggtctttgtaagtttactctaatgcccctgccacatcagcgtctgtgggggcattctagtacatctccaggggtcttttagtcttttaggtgctagctggcgagagtggttgaaggtggtccccacggaatcttcccttggcatcttctcttgttcgagtagtgctcttcctcgaactcttgggaaaaatgccttttccgtcctggaccgtcttcttcctcctgggaattcgaattcccctttgccttctctttcatccttggaaaacacctgtgaaattgtaacttgtccaaaatatgtgtagttgtattagcgattatgggatgtccctaaaaaggtgttcttcacccgaagaggtattttctattcgaatgagtgttcttcctctgggaaggtattttccctttggaaaggtgttcttcctcttggaaaggtagttcccactcaaaatgagtgttttcccttctggatacttaggtcttgcaaaacctcgtagtgttttgaccgaattggaggaaaaggtgtttgcaccctgctacaacaagcccctcacgggtaagggcgatgtgtgttttcggccgaaaccgtgcctgagtttatggaaaaagggggaaaaccgccgtcctcctattcggtcgaaacacactattcaaatatgcatatacgccacgtttactattcatttatttttattcttattatttttcatttttatttatttttatttatttatttatttatttatttattttttgaatgccacgtgccggtatttcgttggtgcgctcaaggggtcgcgtcgcttcgggtttcgcgtccgctcgtaaacccgcgacccttaccaccctgcgctatataaggccaggaggggtcgctatcacgtgacccacgccaccactcgtttgctctgccatcaactcgaaatcacaaaatactcgaactaaaactctttcttccttcttccatttgagttttggtgctttgcttgatttcttcctttctcactacacagcatggggaaaaacaagaaaactgcggaaaagtcgaagtccaagaaatcaaaaagccacgaagatactacttgtggtattggtgcctcttcgattaaggaaaaaaacttaaacgatcttgttgatgttggttggatatctggtcgaaacgttgtaattcgaccagtgggagaatcaaggccttctcctaagctgggatacactcttgtgtttgaggatttcttctacgccgggtttaaattcccatgcagcactttcttggttgaggtcctgaaattgttcaaacttgagtttcctcaattgactccgaatgctttagttcgaattgggctttttgaatggatgattcgaagctgcggtgggacccctcgagctgaagactttgcatacttccattgtactcggcattacaccaaacagaactcgaagtttgggtgtgtaaactttgctcctcatcccaagcgcggaagtccatggccagctgtgtctgctattcgagcaaaatgggggaacaagtggcaatcgaagtggttttatcatcaaatccctcttagcctgctgaatgataaggattgtcctttttcgttctctgggaagaaaccgaaaactgtctccgagccatcagtctctttgtcgccggagttcactgccatacaacctcgaatcgaagaacttgtttcgaaatttagctgccgagacctggtggaagagtttgttcttctcaaaattagacctctttcgagcggctgggatataactctcggagaaatccccgaaagttgcccttccagtcttcctccatttgtggtttcgtctgatcgtaagtttccttttcgaactgcaaaccttgtttgtcttgaagaagtgatttagttaagaagatttattttctccctttgttatcttcttccttgtagttgtgattccagaggatatggtccgcccagttcggaaatttcttggcccttataccaaggacgagcatttgaaatttttgacacttcaaaacgggaaaaggcaaaatcgggtcttcgcttctctaggctccgatatccctgtccgcgttcatcccgaaattgtccccaaactaaagaaaaagaaatctgtgaagccctcttcctctgatgatgatgatgatgttgaagtggaagatgttgacgaagaaattggggaagaaaatgctgaagaagaagaagaaggcgaggaaggagctgatgaagaagagaacgactcgggtgatgatagcgactcgagtagcagttcgagcgacaactcgagcgactcgtctgattctgatgatagcaaaacagttcctcctcctactgttttagctgatctgaaaaggaagaaaactgccagcagtcctcctcctggaccgagttctaaacgagtgcaacttgttattgataatgatgaagatttggatgaggatgatatccgtattgatctttctgccatccatgtcaccccaattcgagctgatgctagttttgccctttcggcaaaagaagtggcttcactgcaagttgttgccccagccaccacggttgtcgaggaagattgttcgacccaagtggttgatactgttgagacaacaaaccctcttcgagctgatagagacttggttgcaaaaaaggcaaaaacgcccgtcaatgcagccgaaaaaaccgaagcagggaagagtgctgctggtggaggtgttcgaactacatgtagttggaacccaactccacctccgtcaccgccgttcatcgcaaccccttccccagagctgatacaaaacgttcttggtggttttagcgaacgatgcgcaaaagatggacattggcttatgggtcttcctaatttcaatgaactcggggaaagtagccatcatggcccaaacttgtgtttgaatgacctaaagtatcgccaccccctgagttcgattggtgatgaactcgagaagattctgattactcctgatcttgaaaaggagtttttggaagaaaatgatcttatgtcctcttggacagcacttgatgtatctgctgcacaggtatttctatttatttattattattattatttatttacttattattattttatttattttttttgacttaaaaacctattttctaatgcgcagactgcaagccttgctcgtcttcaacgtggtgttgctcggaaagctcttcgagcgctttgcacgcgacggaagaaatcacttgatcgcatcactaaacttgaaaaagatcgggattatcttcgctgcaaacttgatcgaatggccgacgagaagaaaatcaccaccgatctcatgcgcgagttaagcggcgtaaagagagagctttccgaatgaaaagaagttgctgattgagcaaaagaaggtattactcgctcgcgaaaaagcattcgaccgaaagctcattgagtatcaagaggtcgcacgacaacgcgctgaatcagaagacaagatgaaagagcaagttgaggtcttggagaagaagaataaagaactcgaacttgcctgcaaaaatcaaaacgagaagatatctgctttagagctcgagagcgaaaattgccgccaacttcttctgaaaagttgcgagaccgttcgaatcgcgttgcgaagtctaggggctgacatcagcttgctatcggaagaaaataccttagcagctgtgggaaaatggttcgaggaattttccattgggctaaaagatagtgttactccctttgcatctcgctgctcgaagactgctgtggagagcctttcggcctgtctgctttcaaatgggtgtgaacactttaccacccttaaagctgatatccaaggtatgcttaatgatgaagccaaatttgcacagcttcgagatgcagctcaacccgtcgtaaaggctttccaagttctttactggaagaagaaaggatatgaagataccctgaggtctcttcgagcatctcttgcctcaagatcaaaatcacagctggccagttcgagccaacaagataaagacagtagtactccgagctcgagcgcacaggtgtgacgttcgtaaaaagaatagttaaggatgcttcgcatactcgaaaacaatgctattttgctgcttcaaagccgttatggttgagagcctttattgtaaaaatttatagtgtagctgactataatgcttttctcttattgcatgcttttcacggaaattccctttctttggggggctgcaggttaactcgaatcgaaaacttgtgattcgacgcaacaacactttgcctactcgaaatgtgaagcacttaagcatttagagaccctgcaaagctttcttctaccaggaccaccatttccgatgacgaactcgaagcctgttatgataacacttgtatatttgcttttaagtttttccgatggcaacgaagccatcgacatgacagtttacgtgactttgtactcgagtttagggaacggcgttcgaacaataagcttgctagtaaagccttttggcaaaacttccaaccatccgaacgccaacgtagaatatggaaaaggcgttattcaatagttccatatacagtaatgccttctcctctcaacattgtttatcccgactcttttctttcttctttgtagagtttgtatgtaacttgttataccttcttaacatcaaataaacccttcctttcttcttttctttataaatgctctttatttcaattgttcaagcacccttaggtaaactacgtcctccttatctttggaagaagttacgaaatcgaaacgtactttatctcgtcacatgcattttccgccttccgagctcaagcgaggggaaaatagagttcgagcattctttagttggttttttggactaaggcaaaaaagttcgaaaaccgccgtcctcctcacctttcgaaggagtgacgaggtcgaaacgtattttacctcgtcacgcggattttccgctttttgagctcgaacgagaatagagttcgagcattcctgagctggttttaggactagggcaaaatagttcgaaaaccgccgtcctcctcacccttcggaggagtgacgaggtcgaaacgtattttacctcgtcacgcggattttccgctttttgagctcgaacgagaatagagttcgagcattcctgagctggttttaggactagggcaaaatagttcgaaaaccgccatcctcctcacctttcggaggagtgacgaggtcgaaacgtattttatctcgtcacgcggattttccgctttttgagctcgaacgagaatagagttcgagcattcctgagctggttttaggactaaggcaaaatagttcgaagaccgccgtcctcctgtcgaaatttgctagtcgaatgtatttgactccgagcgtgcggagttctattttgtcgactttgctagtcgaatgtatttgactccgagcgtgcggagttctattttgtcgactttgctagtcgaatgtatttgactccgagcatgcggagttctattttgtcgactttgctagtcgaatgtatttgactccgagcgtgcggagttttattttgtcgactttgttagtcgaatgtatttgactcctagcgtgaggagttatattttgtcgactttcttagtcgaatgtatttgactccgagcgtgcggaggtctattttgtcgactttgctaatcgaatgtatttgactccgagcgtgcggag

SEQ ID NO: 16540 - DNA, 3270 bp, Oryza sativa
  unsure (1)..(3270): unsure at all n locations
ttgactccgagcgtgcgnagttctattttgtcgactntgctagtcgaatgtatttgactccgagcgtgcggagttctattttgtcgactttgctagtcgaatgtatttgactccgagcatgggagttctattttgtcgactttgctagtcgaatgtatttgactccgagcgtgcggagttttattttgtcgactttgttagtcgaatgtatttgactcctagcgtgaggagttatattttgtcgactttcttagtcgaatgtatttgactccgagcgtgcggagttctattttgtcgactttgttaatcgaatgtatttgactccgagcgtgcggagttctattttgtcgactttgttagtcgaatgtatttgactccgagcgtgaggagttatattttgtcgactttgctagtcgaatgtatttgactccgagcgtgcggagttttattttgtcgactttgttagtcgaatgtatttgactcctagcgtgaggagttatattttgtcgactttgctagtcgaatgtatttgactccgagcgtgcggagttttattttgtcgactttgttagtcgaatgtatttgactcctagcgtgaggagttatattttgtcgactttgttagtcgaatgtatttgactccgagcgtgcggagttctattttgtcgactttgttagtcgaatgtatttgactccgagcgtgcggagttctattttgtcgactttgttagtcgaatgtatttgactccgagcgtgaggagttatattttgtcgactttgctagtcgaatgtatttgactccgagcgtgcggagttctattttgtcgactttgttagtcgaatgtatttgactccgagcgtgcggagttctattttgtcgactttgctagtggaatgtatttgactccgagcgtgcggagttctattgcagtcatacacagaggcatgttttttatacaggttcgggcctccattatggataaaaaccctacgtcatgtttatatacattaacttggatatcattcgtatttacatctgagtgagtatactacaaactcgagctcccgtgttctcctttttctctttctctctctcctctttttttttttaggcataaaatttcttcaaagaaatagcattccaagtatgctttaactcttcaccatcaagatatgctaacttgaatgctcccgtttctgtcttctttttgactatgaatggtccttcccactttgactcgagttttccaacagctacctcattgagcactttcttcaagactaaatctccttcttcaatcggccttgtctttactttttggttgtaatagctctttgttccttctgtgtatgatgccatcttctccaaagcttcgacccttatttcatctagcatttcaagagttatctctcttccttcttcatctttttggtcaaatatcattcttggagaatgtgcccctacttcgcttggagtcattgcttcatcgccataaaccaatctaaaaggggtcatgccagtcgaccttactaccgtggttcttagtgcccaaagcactgatagcaagtcctccggccatttcccttttgctgatccttctaacctcttcttgatagcttccgtgattttaccatttgccctttccacagctccatttgtctgaggatggcctacagaggcaaagttgatttgcaaattaaggcctttacacatgtcttgaaattttccagattcgaattgctttccattgtcacatactatttcctttgggattccaaatcgacatattatgttcttccaaacaaacttttgtactgctgcagaagttattcttgccactgcttctgcctcaatccatcttgaaaagtattcaattgcaacaatgacaaagcgcagatctcccttcgctcttggaagaggacctactatatctattccccatctgtaaaaaggccagactggcggaattggttgcagttctttgggtggtgcttttgtcattggaccgaacttctggcatgctttgcacgtcttgatgtacttctctgtatctttcataattgttggccaatagattccttgtcttatgacttttgaagccactgaccgtggtgcttgatgagctccacacaagccttcatgtatttctaccaccatcttcatgccctcttcccttgttacacactttaacaaaggagcagtaactccacttttatacaactgtccctctaccactttgtatttcttggacgttagttgtattctctttgcttcttcttccttttctggaagttgtgcactgacaaggtatttcaagatcggttctctccaatctccttctctctgtatgcatgctacttctttcttttcgtaacttggctgggtgattatatcgaaaaatgaattttccaatggttgacctgttgcggctgccttagctagctcatcagcttctccattttcttcccttgttatggcttttaccgttattcccaagaaatgtttctcattcagccttgcttcttccagatatttagccatagtttcctcctttgcttcaaaggatttggaaaagtgacctgctaccaactttgagtcagttttgactattaaccgccgagcccctagcgctcttgcctttctcatagccaacaaaacgccttcatactctgctgtgttgtttgttgaaggaaaagctaattgaacagaatacttcaacgtttgcttcattggtgttttcacaactgcagcggctcctgctccggcggcattgcatgctccatcggagaatgctatccatggtttttcgacttcttcctgttgttctacctcattgggagtccattctgccacaaaatctgctagtacttgtgactttatggctgttcttgatatgtatttcaggtcaaaaggtaagagttccattgcccattttgctattctccccgcgacttccttgtttgttaacacttctcctatcgggtatgccgatggtattgttacgtcatgcgatagaaaataatgcctcaactttcttgaagccatcacaattgcataaatcaacttttctacttctgagtatcgtgtttttggtccttgtaatgcttctgagacaaagtataccggcacttgcctattttcttcttcttgtaccaaaactgcgctaactgtcgctggagttgctgccacatacattaacagaggttgaccttttggtggacttgctaatgttggcatttcatgcaagtatttcttcaagtcatcgaaag

SEQ ID NO: 16541 - DNA, 1120 bp, Oryza sativa
atatcgaccacatcaaatactatctcttcttttctcacattagtgcctttttcaaagaccacttgtaaagatatttttccaattgcatgtacttgttgtccaccaaacccttgtaaaggtactcctgcgtttgttaacctatcttctggtatttgcattttcttgaaagcatcgtaaaacagcacatccgctgaacttcctccatcaattaacaccctttgcacttcgcattgtgctatttccactgagaccactaaaggatcttgatgagggaaaagtattccttctgcatcttcaggcccaaaggaaattaccgtttttgagtatactggtgattttgactgatagcttgtcccgacatgatttacctgtctgacatatgcttttctttgcctttttgactcaactcccaatgaagagcccccagttatggcatttatcactctctttggcacttcttcaattgcctctatcttcataacttgcggtgcttctatggcattttgtcctcgttgatcacgagctccttcatacttgttctcatatcgatttacgtgtttttccaacaagtgggtcatttgcctgcattcttctgtggaatggcctcccggaccatgtatatgacaaaacttactgtaacattcttctgtggaatgacctcccggtccatgtgtttgacaaaatttggtttggtcaggtttattttctcttccttttcctctttcattgttccaccatcgtcctctacctctgcctgaattccaccattgtcctcgaccttttccagactgcccccaattgtttctccctctgcgagtgttgtcccattgatgttttcctttttctctttcattgttggatccatctccgataaaatttacctgttttttctgatcttgtttatagtcatacttgaactttttccagggctttccggtattctctcccttttgttcttccccttgggaaatttgcttgttctttgactgcttttttcccaacaagacggcttcttcctcttgcactctcaactcatcttcttctcctcttgcaaaactttccattctttcaaacaagtcttttgctgtttttggtctatttctagcaagatcaaaacgaa

SEQ ID NO: 16542 - DNA, 22899 bp, Oryza sativa
actttaacccactttaaaaagagaggatggatgaagttaaatgttgacgggtttttgatgcaacctcaggaactggaggtctaggtgctgttctcaggaatagtttaggctctgtcattttgtcatttttttcagcctgcggttctatggagagatgtagcagccctcttgaagctgaacttttggcttgcaaagaaggcatcaatctagctctacaatgggctctgctgccgctcattatggagtcggattgtttggtcgctatcaatatgatccagtcaccagggagggagatgtcccagcttgcttaccttgtcagggacatagaagagctgctggcaggcgatagagtggtcagcattcagaaagttcagcgatgccagaataacataagccactttttagctaatagaggccgcactaattttctttctgagttctggccagatggctcttgtaatctcatttcacagtttgtgaatgaggaagctttaaatgagtaatatatctggtcttcctcgcaaaaaaaaactcactgaatatcaaaagctcatcatataaacatagcaactacatctataagttattacattttaaacctcaacatatgagcatcatttttcgcaatagtgatttacagtctctaacataaaaatttaactagatgaagtaccaaatttcaccggtacttgaaggtaccaaatttgcactaaaaattttggtatctcttcttatctttcgagaaacagtaaatttctcttttcacaatattttaacataaatctgctcattatttatataacatttaacgtgtattcaatcatatattttacagtaaaacttggaagaccgtctaatataatactatttcagggaacgtttgctttgaattactgtcgattcatcccagaattctcattaattttccacgcaatctacactagacaacaatagtttatttatgtcaacatcgaatggttcaaatcgagagtacctgactgactggggtgcgatcgtttgtgcagtggcggtggacagtttagtcgcacgcaaaatgagaaatacgattaacatattattaattaagtattaatatataatttttttatgaataaatttattgaatttttttaacaacttctttatagaaagtttttgcacgaaatataccgtttagcggtttgaaaacgtgctaacagaaaacgaggagaatctaatcctataaactgaaaagagcgcaccctaaagaaactatcagatcggatgatccattcagcaaggctcgattaacctctgaatgcacgcaaaaccctcttcacccgtacacacctgcatccccccgtcccgggccactggttttccaccgccctgacccgccaagtcgcgatcgcaactcacacatgctactgatgatgtacgtacggacgttacgtagcgcgcgggcctgacccggggcgacgactcctgcaggctgcagcgtgcgacgcgacaacgacgtgcgtagtggcccacgccccacgtaacgtagcgtacagtgtacacctgatttcgctcggtcgagaggtggagccgtggaggagtcgatgccgtggtgtgcgcgcgcgtcgcgccccaccaaccggataccagcaagctagcgagaggagagagggccgggggggccctaacggctgggcgcaacgtgacagcggaatccggacaagagcgcgaggccttttgcgccaaggaatttcgaccgggcgagattccaaccacattacgtacgtccgctgtcacccgggctgggcttagctatcttgtggcctatatatactcgcccttgacccgattacgttctcgtcccaaaccaaaatttctcatccttgccaccacagtgaccactccgcccgtctctcctcctgatcgctcgttgttgtctcttctcgcgcgtagagctctctgcactacgcaaagcagaggctaagattgatcgagtgccattttatatacaccgttgtgcatttccctcgcgtaggtgtggccatgtctcccgctatgctgcaggcgtcgtcgctgtgcgtatccgcggtgctgtcaggcgccgcgagctggccgggccgcctggccagccaggggcaccagggcaagcgggccgtggcgcagcctctcgcggctagcgccgtgacggaggcagcgccgcccgcgccggtcgtcgcgccgccggcccgccccgtcgacgccccgcggcgccgtggcggacgtggcggcggcggaggcggcggcgagctcgtggcgtggaagagtgtacggcaggagaggtgggagggtgcgctcgaggtggacggagagctgcctctctggctggtgggttaagcctcctactgattgcaaatctccctaaatatgacttgatttggcttttgccttctctccaccctaattaagtattcatgaacacaccataacctcagcattttataagatctgccggtggtcaagctaaggctagccgtgcatttttcattcaagaatgcgaatcttttctgttattttgattcaaaggtttcccagtactccatatcgctttcttgagatcatctataaactaaagatccttttgaacatcttagtaaaaaagcatgcacaacatcttcccacacattgagaaatacgaaaggcactttctggaccacatcactgtgcaacaaatcctttataattaacctaaccattttcatcttgtagcatctccttgattagtgcaggctaaccgctgacctagagcacatatatgcatatagccccagaagggtcctaaaaaggtaccagctttggccacgtacctagcatatttttaccagcagtatctaacacgccagggtatattacttgccgactgtcatttttaatttccactgtgccagcagttgctgaagcactcacccaaatcttcagtaatttgatcgacaaagaggagggcgacactaacttaccctatgctggcctagcgaaaaggagatggcatcttggcactcacgatgcttgcggggaacacaacatatatacccagattctctgctcacccctagcttcgatcggcgacaacaatggcatcactgtcttgtggttgcagttttgttgcaccccgcaactctctgaaaacaaaagtcaaaaaccttggtctcccctaactccaagtgatcttatcactgttcttgccaattttgatagtgacttgatttgaggaattaatacaggtgtacatgtagtataatattgttgtaactttgtagttacactcactaagctatggataatacaatcgtttcagctaattaaaaatgcaatcttctgaggtaagctcgtggatagattaatttgtcggtcgttaattagaggtggacggatttgtcgacgtgctgcaaatgattgatcggatcgatgcatacttgctgcaggatggcacgtacctgaggaacggcccgggactatggaacctcggcgactacggcttccggcacctgttcgacggctacgcgacgctggtgcgcgtctcgttccgcggcggccgcgccgtgggcgcgcaccggcagatcgagtcggaggcgtacaaggcggcgcgcgcgcacggcaaggtgtgctaccgcgagttctcggaggtgcccaagccggacaacttcctgtcctacgtcggccagctggcgaccctcttctcgggctcgtcgctcaccgacaactccaacaccggcgtcgtcatgctcggcgacggccgcgtgctctgcctcacggagaccatcaagggctccatccaggtcgacccggacacgctcgacacggtcggcaagttccagtacacggacaagctgggcgggctgatccactcggcgcacccgatcgtgaccgacaccgagttctggacgctgatccccgacctgatccggcccggctacgtggtggcgaggatggacgccggtagcaacgagaggcagttcgtcggcagggtggactgccgcggcgggccggcgccagggtgggtgcactcgttccccgtcaccgagcactacgtcgtcgtgccggagatgccgctccgctactgcgccaagaacctcctccgcgccgagcccacgccgctgtacaagttcgagtggcacctcgagtccggcagctacatgcacgtcatgtgcaaggccagcggcaagattgtaagccatcatcaatcgctgccgcccgtagtgcgttcccgttttgcctatttaattggttgggtgatctaatgatgatatttgtcgggacgatggccaaccgaaggtggcgagcgtggaggtgccgccgttcgtgacgttccacttcatcaacgcgtacgaggagacggacgaggaggggcgcgtgacggcgatcatcgccgactgctgcgagcacaacgccaacaccgccatcctcgacaagctccgcctccacaacctccgctcctccagcggccaggacgtcctccccgacgccaggtacgtacacacacgagccacacgacgacgtcccgccgtcaatttgctacgctacgcatgcacgtatgcacgatggatgacggggaacaccatgtgtagggtggggcggttcaggatccccctggacgggagccagttcggcgagctggagacggcgctggacccggaggagcacgggcggggcatggacatgtgcagcatcaacccggcgcacgtcggcagggagtaccggtacgcctacgcctgcggcgcccgccggccgtgcaacttccccaacacgctcaccaaggtcgacctggtggagaggacggccaagaactggcacgaggagggctccgtgccgtccgagcccttcttcgtgccacgccccggcgccaccgaggaagacgacggttagtgtcaccatctctcctcgttggctgcgtatacgtacgtcttggctttgcctcgtttcgtttgtaataacttgaccaactctgttattgatggcaggcgtggcgatatcgatggtgagcgccaaggacgggtcgggctatgcgctggtgctggacggcaagacgttcgaggaggtcgcgcgggccaagttcccgtacgggctgccctacggcttgcactgctgctgggtgcccaggaaaaggaacagcaagtaacacacacgccggtccatcccaacatgtcaccgccagtactgattcgtctctgctgcttgcgtcttgggtctgcgcatcgaatcacagtacaagtggaggcttggatttgtagctacgaaaatggcagcatgaatgcagtcaccgtttggtaggtggtctcagaaggaaagaaagacatacatacgctgcacgtggtgaactgttagtacgtgatgtatgaggtaccggaagatgtaatatacgtggaaatgaaactatagcgatctgtacgtgttaggctgtagtaattcacatgatgtgtaaaatgtgtacataaaccctccgttgcgattgttcgtactcctgctgtttaatttgtagtacagtgaatatatcttgtgctctttaaatcgaagatatctcgtgcacgtactagtacgtttttgcatgtactggggtcactgggccattgcatcagacatgtttgccaatttcagattgattatgtccgttcactgttgtacagaagcagtggcagctgaactttgaaattgattatttgctccacatctcaaataatatgttttattaaaaatatttcttctattgtaatatttagattacttacataagctatttgcttagtttatttcttaaaatattttatttatcactataatgaagttgataatctacgataatgtcggagatatgggtctgggggtatgtgaagcgtgggaaatctaccttcctgtcctgccgcgtgtccctacagcctggtcttgcccacgcaacccgcggatcgctggagcgaccggagggaggtcggggcctcggggtgccacgtcatgcccctcgggcctttgcaccgcttcgccccgaggccctcgcccagccgccatgtggcggagggatcgagcgaggagggggcccaggctgagcctccattaatgcacacaacgccccaactgccccatgccgcatttaatgcagtaaggcagacgtgcggtgtgcgaatctgacatgccataatcaaagaatgaccggtttgtgaccggtcatgattctggtcacgtctgactagaccgacaaccgagctcccacgtcacgtctgctcccaatgaagtgggggtaggtatgacccgtcccatcggagggtcattcggacggcggccaccacaagtcttcatccattaatgggggaatgacagggctatcccccatgtcaggcgagggacggcgctgggccccactcaaggacaagctgtggctttgcttccaagcgaagacacgggtcgagtcccggtcaagatagggtgggttcccacccgaaagaagagtaggtagaggcggtgcatgtggtatccccttgagatataaaaggaggaccttgcccaccgaaaaaggggacgactctcagaaaacctaaactctaggagaagaagagcgagagtgctctccggagttaaggaacccttgtaacagtactctatcttcaacctccaaacagtgaccgagccgtcccaagcctgtgcagccgtgccgcctcctcccaccaatccggccacctcgttgctcctttttccaaattagttgcgggaatggaatcctctcaatctcctcttccttttccccaagaaatccccaaaagtttctatggaaatcctttccaatttcggggttcaatctttccttactccggcgagaaccctagactttcccgagttttatagtcgatttgggctcggacccgagctcccgtgcctatataaaggaccccctagtcgtcctctacctatcccctcatgtctcatcttccaccgtcgtcggaatcgccctccccgcgagctccttctctctccgccgccggtagccgttccagccgccgtgcgccgtcgcctcggccgtcgccgatcagctccaccacctccctcggctccgcaaagtcgagctctatcccggccgctggttcttttgcgccaaatccaaccggagattggccgtcatcgtgaaccggagcgccgccgtgcctccaaccgcgtcgtccgtcatcgccttcggtcgccgtcgtctccattggatttgcagctgcgaggagaagcccatccgccatttgtcatccgccgaagatcaccggaaagtcatcgccggccatctccttcgccgttcatcgctgcgtaagtgttggtaagcatcgccgttgcctcctctttctcccggtgccctccgtttgcattattgtgccgtggttcgccggcaaccgccgctcctatgtcattcaccggtgtactttatccttagggtcttaattcaatctaatccgttatttgtctagcatcgtcgtcgtctccatgtgttgtcgtcgggtcaccgtcgtcatctctctctctgatcgctttggttcggtgagacttctatccgtgttccctcggtttagtttttaatctctcgtttttgtcgtcgagtagccgccgccgtgccacgcttagctactgccctagcgtcgccgctgcgctagccgcctagccgtcgctgtgccactccctgctacagccatgctgctactgctcgtgcgtgccaagtcgctgccgttccactaccatagccaccgtcgccatctgtcgccgccaccgggttcgcacggcggaggagcaccctgtccaccccttcgcagccgccgaagaccaccggagcgccgtcgccgtcggggacccgagccgagccgagccgccgtcgaacctcgtcgccggtcgtcgttcgtcgttatccgtcgttgttctttgtaccggtgagttcgcgtcgtcatcctcttcgcgttggtgtcctcggtgagcccggtcgagctctctatcgccggtggccgcgtcgtccagtgctaggccggcgatgacgtcatcgtgacgtcataaatcttttatttaattcgtaataattttctggattagatgaaaatcgattaaacttcggaaattcataactaaatcatcgtaactcggattcgagtggttcaagtcgctaaattcatctaaaatcgagatctacatgttaaaaatatccacatgtactgtttatgcttgtttttgtactgttttgttgattttgttcttttgctttagtttccgacgttccggaggagagcgtttttgttgaggaaggttcggaagcgtttgcggaagctcaaggcaagtcacacagatcccaaacaaccctttgagcatgttgaacctatttaaagctaatgttttatttcaactcatgcattattttcgaatgtcatcgggtggtgagcctttcccaattaattatggccgaagatgactttattttcctatgggtaataaatttattagcttggaccttatatattggattggttcagctaaatgctatatatataattgcttagccgtgcttagaaacattagttcattaatgggatgaatcatactacattattatttatggttatatttaatggtagctcacgatggtcaatcgtgttatgataattaattgataattaaaatatgattaatggtgagttgtgagcacatggttttgatggtcgtgctcatgacaattaaggactggttcacgagtttcggttgtgaaacattaaccgtgccaaccacaagccagcgtgggcaacggctttaccttttgtatagcatggttcattgcggggcaccagactgagaagtggcggagataagcccacgggggtcgctggggagtccatgccttgttttataagggagtgattatgatccaggaacggtgcgctgtggtggattgtgttatgcgaggggtactgtcacagctcctttccgaggtaccgtggtggtattgaggcgcatggtgacatgtcgtggagctgtgtcttgtgggtacagtggtacacctctggccagagtaaaactattcgaatagccgtgcccgcagttatgggcaggtctaacaatgtctttcgtgattagtttcacacttttcaccataataaatgatgctataactggtaataatttgattagctcctggtttggaatggtacatttctggtttggagatagatctatacagccgggtatggttgttcaggatggttgggcctgtgcagcatgggtgtgctgttcagtgttgattaatattgatgattaattactctactgttttacaaatctcaaatgtttgctaaatgctgcttttgcaaataagccctatattatgccattctttggtatccttgtgcacttgcatatttgttgtgtggcttgttgagtatgtcatatgctcaccttgcaataatcaatcaaacctcagtggaagacaagttgcgaaggagaagacgtttggcttataccccagttgagctgcctgtgggagtggagccggagcttcgctagaccgtaattccgctgttgttttcttttcttttataagtatgtaacgttattattatgatgaatatgtatattaaattgtcagtttgtgtacctcggctgattcctggacgaggatttcatgcacaaattagttcggaaattactagtgaatttctgggcgtgacattatccatccggagtggctggcgaacccggtggtcgtcccgaaggccaacggcaagctccggatgtgcatcgactacacggacctcaacaaggcatgccctaaagatcccttccctctaccacgcatagatcagatagtcgactccactacggggtgcgaccttttgtgttttctagatgcctactctgggtatcaccagatctgcatggctagggaagatgaggaaaaaactgccttcattactcctgtgggcactttttgttatacaactatgccttttgggttaaagaatgcaggccctacctttcagcgcatgactcgtattactttgagtaatcagatagggtgtaatatagaggcgtatgtcgatgacctggtggtaaagacgcgccaccaggacacgttgctgcaggatttggccgagactttcgacagtattaggtccacgcgcgtgaaactgaaccctgataagtgtgtgttcggtgtgccggcggacaaacttctcggttttctagtctcctcccgaggcatagaagctaatcccgagaaaatatgcgcgatagagaggatgcgcccccagcaagcttagggatgtgcagtgcgtcactggatgcatggccgccctaagtcgattcatatcgaggttgggagagagggcactacccctattcaagctcctcaagcgctctggcccgttcgtgtggacggaggaagctgagcaagctttcaaccaagcttgcctcaccttcccccccccatcttggtagccccggggccggaggaacagttgctgctctacttggccgcgaccccccatgtggtgagtgccgccctagtggtcgagtgcgaagaaagcggaccggaggtccctttaactcgcgatggcccttcgtcccccgaaggtccggtgcccgaagcccctagccaccaggaggaccccgaggcccccgtgggaggaggggaggcttttggcgagtggtcccgaggcctatgatcccgacatggctcgagaccccctcggggcccctgagtaagggagccccagatcatctgcccctgacaatacggaccggccccgccgaaaggtatagcggcccgtctactttgtcagcgaggcactccgagatgcgaagacccgatacccacaggcccagaaaatgctttatgcggttttaatggcctcaaggaaattgcgccactatttccaagcgcatcgggtttctatagtgacatcctaccccctcggccaaatcttgcacaaccgagagggcactggtcaggttgtaaagtgggccatcgagctggctgagttcgatttgcacttcgaaccacgacacgcgatcaaaagccaggtcctggctgacttcatcgcggagtggaccccagtggacgaacctgttccaccaaacgtcccatctcttctcggagatggggaggacccaaacgccgacattcgttgcgggcattgggttacgcatttcgatggttccctcaaccttcaaggtgcaggcgctggagtcacgctgacttcgccaagcggggacgtcctcaagtacgtcgttcggctcgacttctgagccacgaacaacatggcggaatacgaaggactccttgcgggattgagggcggcggccagaatgggcatccgccgtctcctggtcctaggcgactcccagctagtcatgaatcaagtatccaaagagtactagtgcaccgacccacaaatggacgcatatgtccgcgaagtgcggcgcatggaacgtcactttgacggactcgagctccggcacgtgccccgacgcgacaacacttttgctgatgagttgtcgcgtgttgcgtcggcacgagccccactccccccgaggaccttcgaggaaagactcgcgcagccatcggcgcaaccgaacccctcgagggaccccgacgacacgccctccgccccgacccttggcgacccgcggcccgagggggtcgaccccgacccccctcgtcaggtcggttggatgactgacatcctggcgtatctcgacagcaatactcttcctgaggatcgcgcagaagctgagaagctcgcgcgcatatccaagcggtacgtcctcgcagaagggaccctctaccagcgtgccaccaatgggatactcttgaagtgtgtttctcgagagcaaggcatcgagctcatagctgaaacccattagggtgagtgtggggcccattcggcctcacgaactttggtcggtaaagccttccgacaaggtttttactggccgactgtattgcaagatgcccaagaatgggtccggcggtgcaaggcatgccagttccacgccaagcaaacccactagctggcccaagccttgcaggtcatcccactatcttggccttttgcggtctgggggctagacatcctcggaccattcaaggcggcttgaggcgggtatcagcacatgtacgtcgccatcgactagttcaccaagtggcccgaagcttacctggtcgtcaagatcgacaagcattccgccctcaagttcatcaggggcatcacgtccctattcggagtgcccaaccgcaccattacagataacggcacccagttcaccagtgagctgttcggcgattattgcgacgacatgggcatcaaattgtgctttgcctcgcccgcccactccaagagcaacggccaagttgagcgagccaacgccaaaatcctcaaaggcctcaagaccaagacgtacaacgtcctgaaaaaacacggggatttgtggctcgaggaattacccgccgtgttgtgggcaaatcggaccactccaagccgcgccacgggggaaacgccctttttcctggtgtatggcgccgaggcggtcctaccttcggagctttccctaggatcgcctcgcgtcgcgctgtacaatgagaccaaccaggatggtcttcgccgcgatgacctcgactatcttcaagaacagaggaggcgtgcggccctgcgtaccgcgtgctaccagcaaagcctgcggcgctaccatcagcgccacgtccgggcccggtcactacaagttggcaacctcgtcctacgccgcgtgcaatcgcgcctggggctgagcaagctctcgccaatgtgggaagagccatacaaagtgatcggcgttccctggccaggctccattcgactaaccacggaggacggcacggagttgcctaacccctggaatatcgaacacctctgtcgcttctatccatagcgtcgagattttttgctttccaagagctcgggccaacccccgcacaacccctcggcttgtgcgggcttggccaggggctaccattgtgtatccttttccctttccaagcaataaatttttccatttaatgtggaggctgttacgcgccctttcttcttactctttcctctagcttgtcctggttcaaaggacagttcgggtttactccagaccctaagtgccgtggggcgacctaaaaaccgtcgaaagagagcccaaacacgggccgctccccgggttgcgccgaaccccgggggctcggaagggcctacacacggccgtccttgacccctggtcgttgtagcctcggtctggccagtcccgctgggcggctccctcggggcgatgatcttgcccctcaccacttaggtaccacggaccgagcacggatttgccttttcgctagaacgagcccgagggggggaggatggggtaagagcggcatttcgttcacagggaggttaattatatgcttttgctcttgtttcttcgtctttctgtgccgcaggcattcaatggggagcaaaggcgtacaaagtgtgaaaaggaagctttaattacagacaagataagacggcacgatggcctaaatacaagaagtgtccgttgcaggcacacaacaaaaggaaataaaaagcgcgaatgatcacggagtgcccgggcccccgaggccggcgccgctaacgacgtcgtcccagtcctcgccgccgacgtcgtcatcatcgtctccgctcctgctctcctcattcgaggcaagcccgaaggtgaaccggggggccgacccctcgaagttagagacaatcgcgtcggccgtctcccggacttgctcccgagcctttgcctcggtccccggggggaaatcctcgagtgcgcgccacgggacgaagtcggggttgcgcgcttggtggctcgcgaggaccagttccaccgcggcccatgccaaggaagctgacgacgatttcacggtctcgccaatctcctcctccagcctctccagatccactgccagcccgtccagccggagcgcgagtgctggctgtgtactcggcgccccgcgcgctccagctgatcgacggcatcggagagctgcccaggtccgatctcgttggtgaggcggagggccgcaatctccccagcctgatcttgcaccaagcgctctaggtcggcgagagtgctctgagccgtggtaggctggctcaccaactccgcgctgccgggctgcccgcccgccgctaggtccttttcccgggcctccagctcagaagccctcgccgctatcgccgcgcgtccggcaacggcctcctcgcgtttcgcgagttgctcgcccagccggtgtgaggccacctcatcgcggttcacatcggcttcacgctcggcgagtgcgacgtcccgttcccggcacgcctcttcccgaagccgtagctcctctgcgaggcggtccgctgaagctttcgcgacgagggtgacccggtcacgcttggctgcggcctcttcacgaaggcgaagggaggcctccacctccgccgccattctctcgtgggcggccaaggtggactcccgctgatccagcagacgcgctcgctcctccagcgcctgagcccgcctctccagctcctgggctcgctacgcctgctcctggctgcgcgcgttctgctcgcgctggctccggtcgaggacctcgattcgccgatgaatcgtggtctcgaactcctgcgcggagcgggaacgctcatccaaggccctgtgttcagcctcgagcgccgccgtccgggcccgcagcgacgtgtcggcctccgatacccgccgttcttgggcagcagctgcgtcgaggatactgcgggcatccttgaccctcttcaccaggtcctcggcatgggactcgtactgtaggcggatgtcgcccaacgcttcgtccaggacgcttgaggcgatcagtgccgcctgccgctcttcctccgtctcccgcatgacggagtccagcgtctcctcgcgcgcctgaatttcagccaattgggcttggcgcattttgcgtcccaccttcaccatgtcgtccacggcgcggcgcccctcgtcaacccgcgcgcggtccgcagcaagctgtgcccactctgcctccagggctgctcgctcttccgccagggcttgaacttgggcgttgagcccctcccggacggtggaatcggcggcggcgagcacctgcaggagcggttccatatttgccggagttggagaagaaaaggtcgtggtctgcccctgggacgacggagtgctgctggatcccccgcgagactgggggctgctctcggcccctcttctgcgcaaccagccccgagggcgccccaagtgcaagggggagcggccgtccctctcgccccccgtctcgggtcctcaggtagattcagcctcggcctcgggctcgggcccgcccccagtttcggtctcgacctcgagctcagggccgcctctggccgcggcttccgagccacgacctccctcgccccccggtcccgggtggcgctccgcatggaccctggtctcggagctgcccccgggaggggcatcaccaccgctatcgcccgctgcgagtcgagtcctggctggggttaactcggggtcggacccggtatgtggtctgtgggccccgccgagaggctgtgaaggccccgcggccttggatcggccaagcccgggccgctccgatcattcggatttggtcccctgcgaagggtcggaccctgagaccccctaggaaggaatctcgctacaagagaacccagatcgcgttaacgaagaaaaagaaaaggagggaacaacagaccgagctgggtaaaagcaccgaagtgggtgccggcaatcgtacctgcggggagggcgattgaaagtccacttcgggggctcaatgaagctcccccgacacggctccatttgtccttcttccggagccgcttctttttccgtccggcctcaggcccggcagggcgcttgtggcccgctggcggacggtctgccacgcgctcggcgccccctccacgtgggggagagggcagtcgagattcgggcatcttccgtttccctttcgggtcgctggtcgagtcgtccccgggtccgcggctcgggccgggtgccctggagctgccacccccgccgggtccgctcgtccgactcccgcctgtggtcgcgccactgccacccacgccggcagcgctaccatttgtgccgccccggctggaccggctcctgccggcgccgacgaccgacatcacggccaggatgctctcccgatcgcggtcgcaacagaggggaaggatcccgtctggaatcagtgtttgctcggcggagtctaggcccagcacccgccgaatcaccatcttcgcgtcctccttcccccagtcccagcgctcacccacatgcgtgcgtatggggtcgttgggacctgtgtactcccacgcgccacgggatcgatcctggagaggtgcgatgcggcggcggaaatagtcaccaaagaccattgcccctgtgaggcccaggcttcgcaggcccctaaggcgatcccacaccgcgtcgtactcctcgcccagctccgaaaccgccagccatgcggcggatctttcgagaggactagcgggaatccgaagtcgcgggtggtccggcagcgcggtgtagaaccagtcctcccatttcttgcggagatgactctcgatgtattgccccgccgtgcctggccggggctggaagtaacatccccccaccaccgcaccttgcagcagctgcgggatgaagaaagactggaacagccgcatcgtcagccgcaccccgatgaacatctcgcacagatgtgcgaagatagccagcgtcatcacggcgttgggtgcgagatgcaaggtgtggatttcatagaaatccaaaacctcatggaagaatccggagaacggtggaatcaaccccgccatagcgaaggacaagaggtgcacagatcgctccggataccgcggccgcggccgcaactccctcgccctcacgacggcgccgtccggcatgatcttgcgggggaggttaaggtgcctatccaccgtaatgcgtgctgccgggagcactgtgtcgccagcgtcttgagccatgatggccggcggagaaacggcgaagggcttggtgcgcggaatagtgcgaagtggcgagaatgttaggacttaaggagcgagaagacgagtgggcagttggcgaaaggaagggggcaaagttcctgcctccgtatccttttatcctcgcctcacccacgctcacctcctcgtttcacgccctcacgattgcccccacgattctcgcgcccgcggttgtctcttcgtttcctgcgtccactcatcacgtcgcccactgaatccgcgccccgcatttagtgcgcctatcagcggcacactcggagcagggcgcgcaacggtcacgggcgcaacctgagcgaaccgtcgccactaccgccgcatgagtagcgagcgagggaattgaggcgtagtctaaccgaccccccaattttcgcgccttagacatcctcatcgacagcgcggtcagtgacagccaaaccgctgctgtggttgatacgccagtctggccactcggcagttttcccttagattacctgccgagcctgcaaccctagcttgggaaatcgtgaggcaccacatcagaccgacctcaggaggccaatgtccgatatggtgccgggggctactgtcggagatatgggtctgggggtatgtgaagcgtggggaatctaccttcctgtcctgtcgcgtgtccctacagcctggtcttgcccccgcaacccgcggatcgctggagcgaccggagaggggtcggggcctcggggtgccacgtcatgcccctcgggcctttgcaccgcttcgccccgaggccctcgcccagccgccatgtggcagagggagctagcgaggagggggcccaggctgagcctccattaatgcacacaatgccccaactgccccctgccgcatttaatgcagtaaggcagacgtgcggcgtgcgaatctgacgcgccataatcaaagaatgaccggtttgtgaccggtcatgattctggtcacgtctgactagaccgacaaccgagctcccacgtcgcgtctgctcccggcgaagtgggggtaggtatgacccgtcccatcggagggtcattcggacggcggccaccacaagtcttcatccattaatgggggaatgacagggttgtcccccatgtcaagcgagggacggcgttgggccccactcaaggacaagctgtggctttgcttccaaacgaaggcacgggtcgagtcccggtcaagatagggtgggtccccacccgaaagaagagtaggtagaggcggtgtatgtggtatccacttgagatataaaaggaggaccttgcccaccgaaaaaggggacgactctcagaaaacctgaactctaggagaagaagagcgagagtgctctccggagttaaggaacccttgtaacactcaaccataatcccaaacacaggagtaaggtattacgctccacagcggcccgaacctgtataattcgattgtgtacaagctagctagcagccttaggggcggatacgtgatttctaagaggcgagcttcttcccccggccgaactcacaaaaggaggctctcacgacctcccgctatcgagggacttccctcgacagataacaatcctctaaataatataaatcaaacaggccttggtttgaaatatattattcaccaaattattgccacaaataatctagtttattctagagataaatattctaagacaaactgagcaaacaacataaaacaagtggtctatacaatacaaatagaagaaagttttttgagaaactacattttaggtgtacagtaaataatctgcggcaattagtagagtagatgaaaagaacagggcgacaattgttttatatataagctcaactagtgtgtttttttccccataattctacaaagaacgtgatttgcaaagagaatcaattaacgtgacacaaatattttatatacaactatatcacttaaactatataccgatatagtttggacctagcacaatcaaatgcaacaaatatattttcagtattgacatgttaatattttaagcttcacgatccaacgcctggctcccttttgctctactccgcatctcaataacaaaatagaacagaaaacagctttggacttgccctttctattcttgttcaacattttgtgcagctcccagaaacggttcccaactactgaacttacaggatcactcttcagtttctctatgatctacaattgcttattagtccagaacgtctaggattagtcaccataaagagttattcaccccaaaagaaatagaggaagaaacaaggaatacaatattgtgcccattctaaaatacatttactagcatttctttgtacataagtaacatctaaggtatcactaaagctaaaaatacaatgtccggtacatatacatgcatgacacaattgctcattcatgaaggaacacaagttcaacctttgctcattcagagtgaacacaagttcaacctcttcccaaggaacatacagttactggtaatcaactgacgattaacgccgtcaaacttccagcaaagtggatgtggcactcataccccaaatagaactattacttaaggttcttcaagaattgcacgcgcaaggtttgatgctagagctaatctgacggagttcaatgcatggcttggtaggtgaatgttggaaaagtcaggccgaagtttggccaatgacagttcttgtagcttgttgagcaacaaagtcgtttcagcaacatttaacaatgggcagggtttgcaattgagaagcctcacctgcagaaacaaccggggatagaaacagaatcaaaagcctgatacagattaaattattgaacaggggcaaaaagaagatttagctagctgctttgctgaacaccccaagtaaacatatgactagcttaccgagtcatgtaaaagtggtagccagaaacgttgaggtgtagaaggatttctcatcagctgcacagaaatagatattaagtttgatttatcaagagtcattcaaggtgcataagctattgacaggctgacagcactgtctgtgcggtgttaaattgaattgcaggacgacagcccagccaaggtgtaaatattttcacctgtataagaaactccacggtttgccgaacagactcgccagtccttccttcttgtgccatctgaagggaccttttgaaatctcggtacctgtgtgcaagcatatgttgaaacgaaatttagtactcatgaagagaagagatacagaaattgatggaaaggggactaatacctgtgaaggaactcaagaccacctgcactaccgatgtcagaacctagtaactcaagcagcccctcccattgctgaccatacaaaattataattagcaaatgtcataaacaaaaacattgtcgatatatctgcttgatgaaaaagatctcccttttgatcagatttcttggttactagtacactcagaactaactgcaggtgtacaaaagataggtcataaggaggagcagaaatcggcaccttaaaactatcatctgtgaccgacttgccaatatgttcgaataattgttgagcaattctgtcaagacgaactttatcattagcttgctggaaccagtaaactccagttcctttcctaccatgtttccaatgataaatgccagcaatctagaagaaaaaatagataggactcgtgagtcaaaacgacaggtgggtacaataaaatatgcatgctggtaagtttgaatatatagataataactaagccaggttaaaactccaagaaatcttcgttttgaaatcttggaaaagtacaggtgtacatgcattgggaagaacatcttaccttcatgatatttgtactaacattctccagctcatacaagcggcaaatttccaaagtctgctcacaacaacaatattaggtaacaaaaagcaaaggtgcagaaaaaattcaagggcatatcaatacaaagtaccttcaatacaacacgattatcttgtatgggttgcttcagaagcagaatctccaacagccctaggccttggtttagacatgaggacagataagttggtgcaatctgagaatcaaataggcaagccagccattaataacaattatcaaattataaaaatttgctatcattaacagataacagcacctgttcaaaagtagaggttctgcaacaaaaagctagacaatggataataacaaacagcatggtagtcatacgcaaaagaacgtcacagttatgcgtagcaagcaattcatacaggccaagtgtcatctcaagaaaatatctgcctagtacaatccacaaagctacaaaaaaatacctgccatgttaaagcatgagagcacaaaacttgagcataaacaagcctgtgcagctcctctatgcttataccaccgaagttaggcctctcttcatgcaacatcatatccgcatagtcattgtcagcagtcagcagctccatagcatgtgtgaccatcctgcatttacaaatggcaaaacacattaagatgcaatgtttcaaagttggcagcataaatcaaatggccaacaatacatcttaccaaggaccaaaattttttgtgcattcagccaagacaacctaatgttagaaaagaaaaaaaaatgtcacacaaacaagaaaagtggaaaggataagaaatttgggggcctatgtaatggatgatcacattgtgttccaacctctctattttctgaaaggataccagtaaggaggcctgtcaatccgctattgtcagcagacggtttaagctgtatgcacttttgtgctaactgatgcatcccttcaaaaccctggcaaacatatagattttagcagaacataacaagaggttttgattgttcaaatatatactccccttcaaaaaaattgttgccacatatatatattgactaactgtttacatcacacaagaaataagtgggtacgggtcagtaaggcaaacatctgccaacataaaaacatgttctattgtacaagacaactcaagatgaataaccataattactggataccttttacaggagataggagatggtaaaaatatctagcattctcttctatataatgggtaatttcatcatgtcacagattaaagaataacaaactaaaaatgaactctctagcgaggggattgctctaatagcagctgcaaaatgcaaaattgcggtgacaaataaatgaatcgacaagaaagcattataatgaagaacatattagcaaacacaataatatgggactaaccactgtgaatggccttatataaagtaaatgagaagcaaagagctccagccaatgtgaagtagaagcagtgaggttctttatgttccccaacataatatgaagcaaactcttcagaccatcacgagttttttggtgaccgcactgaatccagaatgcactgcactccagtttacttacttgacctcgccatttttccaatgcctgtaaaaaatacaatttggcaaatgcttttagctgacgtcaatggaggcaatacaatttctgtgtacctccaaacacttgggcaggaaactatacaagtttttacacaaattttcactgccctttccttcctttttttttttgaagtaaccattatgctactgagcttgagaggatataaacatataattattaatcacaaaagaacatattgtgcaaaattcaaagttcagccaacatagtcagtaactctcagcatagatgagcagtggaacaatggtggtgggtgcaaagccagcagcagcccgaggatgcagcagcaatcagtgacaaaagagcacagtagagcagct

SEQ ID NO: 16543 - DNA, 37278 bp, Oryza sativa
tgtctgatggaccaaaatgggggaaaagggtgatgttaaaaaagcaagtgtatataaatcaactggtgacataaaaatagcatatttgtcaaagctacaacgaaatataattgtatacaatcaggtacactataggaagatatagcacattttctttatttcaaaagattagtgcaacactgtaaatactactagaaaacataacaaattaagcccttgaagcaaataaaatgatttttatgtgaatgatagatgcaagtcatgaagaaataaagaatggtctcaaagcaacctaactacctcacggctgtccatctgatccaattggtatgatccatgaaaacgtagcatattcacctaaaagaaaaaaaaaacaacttctgattgtaggattcaatcaaaactgacatgtctataaaatagcgtgcaagaaaatagcttaccacaatatcaagccatccaaccgatagagctgctgataatccactccaataatcaggatcatcttcaacaacctatagagcatcactcattattcatttatactcattactgctattgaatcaatggttggaagtagcacaaatgaacattagtaaaatagactacaaaacaatcaactcaaagcatggagttgtagaagttttatagagaaaagaacaaataaaatgattgagaggtacaaatttgacgtctaatgctatatgctacaacaaatataatgagtcaaacctgcaggttgatgagctttttctggaaattgatcagcgtgcgatatatcgtgttctctgtcttggtcaagaggctgtcatagtcctaaaaccacaggaagcctgataagagacgcccctaggtattgtaacagcaaagtccgctcacaattgaaacaaagcaatagatcaaagaaagagcattacggctaaccaatcaacaagacgctctggaagccaagtttgcaactgtttatcaacaaagaatatctctagcaactcccacgcagcctttaaactagtaggcttctccttgacctgcaagataaaatataccaattactttctataggcaaaaaagtaaatttaacttcaaacaaaggcaaagcaagaaaacaggaaacaatgtgacacatagatatggtcaccttaaggatcatctttgggtcatcaatcatgtaagcagaaagagaatctgggttcccaaggagactaccgatggttttactgtattcaagcacatattgccacctgacaaaacatagtagaatcagaagcaagcacatggaaaaaatggatagcttatactaggcagaggtttgatctagattaactgtataaacagtgattataataccactttggcacagatgtttaaaatttaaccatatgtgtacttcagatatgtcgatttatccatttaggcggaagcctaagagctacaaattcagcttctacaatatgaaaaagggtatctgaatagttggatagctatcgaacacaaacaatataacaaagcattgctaaaacttaaaattctgagcgatatgtgacatgcctatcccagtacaagcatagcttgggcagtaatcctttctttctatatagttggaacccacttagtgcaattactactacaaagcagccaccaggttaagccacatcatcacaattatctcagccattagatataatcaagacgctaaacgattatcctcggaccagtccccttatctctgaatcctacaaattcttaattagtggatccaatccccttcacacctagcctgccgcatctacttctcccattacgatggaagcaattgtgcagcagaaactgcctctgataattatagcagcgagaccaaatgtcatggttaatcagatttattctcttccaaagcatctttgaaatcctcttgcagtcctgcagccacgcataccagcgctatctcttttgtagaccaaccggatatttgatcatcagctcttgcatggtgagtgatatatttgctatcatttttttctcattagatcttcatattaatttacagtattatctttttccccccaagggctattgctttttctatccaccaggtgataagtgaataagtgataacatatttgatttgatgatttgatcggttcatttgactcttacttttgattcgatgctgatcttaaaagcaattttgtacaacctgcagattattttgccttccgctgttctctcaaccgcaagatagctttttgatgatttgattggtttaagtcctttttttatttcactctgatttaaatattaatggttcttgggcaggtatagaaatatgttatggctgtgctccaagaaggatgagtcaatgatgtatgtgctaattcaaggacaaatttgtagcagataatagaacatcgaaggatgcttatatacaatgattaaaatgatatgttgtcaatggtctacagttttctttccggaaaagctatgcatgccctccttccaataaagttcccagtgtaagcatacaattagctatactgcttagttgttcgtcagttttgcttgtgaaattttcatagtttcgaattggaattcataagtatcctagcagttgtttatatttgtagtgatgtgtatttattcgtaaactacaattgttgtcatctttttcggactattccctcgcacaatgtagacattgttgctataagagctgactgttaaataagaacagttcctttcttttttttttctcaaccagtcaatgaatcgtaagtttacggtctgtcctgtgattggtgcgatgggtgattctacccatacaacgagaatagccatacttcttggatttatattctacctggacaagtttatctccaatatataggcattgccctgaaacaaagtcatcaccaatttgaattaatgctattatctacactccccatgattcatgaacaaaaccaaaagttgtctggtcttattgacttctatctcaatctttcacccatgcttcaaagttgtattcttcatttcccacagcagcgcgcagggtatcacctagttaacagtttatagacctctaaagtcttatacagcagccaaaatgccatattaatcatcagtccagactaaaaatactagcatttagcaaagtaggcggtccaaattccaatgtcttaccattctgcgtgctccgagactgagggcaagcgcgacataccggagccatctacgagcgcgttcttcctgctctgaagcagcgcaaacgccggtaccgacccgtactcgatcctccgcatttccgcctcatcgatctcctccgcatccgcgccgccaggcccgctaccgccacctccgaggtttacctccaccactctccccccggagacctcctccgccccacggtctccgccaccctccggattcggtgggcggaggcaggcgacctgcaggaggttgccgctagaaaaggaaacgtagacgcgggagatgggcggggccacgccgtggcggatgttccgcacgggcggggccgccgccaccgcgtggcctggttctcccgagaacggcacgatggcgccgccgccgtccatcagcatccctggcatccccgccgccggacgacgatgagctagggttttggaagcgggagacggcgggggtttgggggttcgggggcccgggtaactgaggtactgtacaagtctacaggttagccttcagactagaagcaaagccggcaggtctctcgagtctcgacttctcaagcttcagggcatgtttggcacagctccagctccagctccagctccacccttcctagagctgttgctcagctaaacaattttaactccactaaaactgggagtggagctgggtggagctctctcacaaaataaactagagttgtagagctgggtttaggcagctccacaactccactccagacccaactcctagagctaaatttaggagttgaagctgtatcaaacataccctcaattacagttctctggattcgtagtactagctttgaagcgttgaaattttgaatgatgcaaacatctgaaattaggcttttttaaataaattatattggtggtacacaattttatcaagtgatcagtgtaatctgatgcataaatttataaaaagcatgttttgatacacaagcttgtctacttcgaagaaattgctaaaaaccctatcgtaagttctaatttgataagtagtctaatatattgacgtgcaatttttttacgtgttcgagagaaaaaaatctaataataagtagtactaaaataccaaattatattgagtatgtattgtgaaaaggaatttttatctattttcatttcaaataccctatctcaaatcctgaacccaccctgttgtttggtgcgtgtaaaccaagaccaaaagaacacaataagactaatctcgctgatttaagctatgattaggatgcgacgcaaacacgaaaaaaaaaagatgccacacaaacatatatatacgctcaaccaaatggtaaaataaggcacacttattgtacagataaaagacataaaatactaaataatgatgcaagggtggaaatgaaaataagcgtaatgtagaaaccgagtttataaatatagcattctcactcccatctcttatatgcacatcacgtcctaatcaattttcaacttagtgaaattagtcttgttatgtcattttggccttggttcacaaacaccagacaaattcattaatcaaaacgaatgttttataagtttgtacgctatattatatccccctaacaagttcgtataccaccagtaatttacttttttttattaggctatgtctggtacaacatactactacttgaaatcaccgtggtattctggaacgaacaatctctggagaaatttagatgcgaaattttctgcatttttccatgtgtacctttttcaaattaagaaaaataagaactcttagaaatacattgaaattacgatacaagtgtctaatatgtggtgaatttggagaaaaatccagtatgagctctaggtttcttgcccctaaaattgtgaattttctaccagtaatgcgtgcttcaaaaatccagcttacccaattatctctgcattatatatctattgaaatcgtgaaacttatagttatagaatcttgaattcaactagtataggaccaacacaacgtatgtgtggatagaaatcaatccattctaattcaactaaatttcagtccgcagtgttaaaaataaaatgtagtccattttatttaactaaaaattggtcagttattacccacgtgtcgctccgtacttattcttagttaaagttttagctagaagccgagttatcatattcttgttttgtttcttagaatattccaattcctaaccatgtacattacctttttgggaaaatcaattttgttgttctctccaaatccaaacgactcaatcgagccaaaggtgacggtggtggtcggtatgatggacgagcaagtcctctctcaccacctccctctacaatccaaagccatgatgttagctgggaaccgttaacgtcaaaatttggtaaaattctttagtggattcggttaagaaaatagcacaatcgtccgatataaacttatccagaagagaccgagttcaagaaaaaatcgtgaatactatggcatggtggcataattatatctattaattaggcaggatttagtagtttgctttaatctttaggatagtatgtttagtgtctataaggactttatgttttccttttatcttcaggaaagtttctttcttgttcaacaaggactgatatctaaccatgggtacaaatatgttctatcaagaggtatgacttgatctcagcggtttgcgttggcggattagggcgtcgctttagatgttctaatctatcttctacaccgatcgatggttatcatatatcttagttaatctagcttaacatcttaatttgatcatatcgaccgagatttgttttagggtttatacaggtatcgactaaattatcttgctagattagattaactaaggtatacaccacccttaaaatcaatcatcaaaggcttgattgtctagacaccatgttttcttttatactttccgctgcattagccctagtcgtgtttagaactataatctctaccctactgtttgattttcaataaaggtttcatcggggtatcagccgatgagttatctgatgttgcatcggtttataaggattgcatacaggttgtttttagccaattgcaacaaagattttactgtttatctaatcatttggatttaatgatatcggacctctagtcgatgtatgctttaaccatcggatcacttattctatcatgacattgttagcagattggtttctattagattatattattgttttattatcatcaggcgattgtccttatatcactatctgcattggatatatagttgattgctcaaaacctatcgacatcggctggaatcgctctatcggcttgtcagccgatcgactctttggtgatcaacatatttgtctatcttgtcagtcgcaggatcaaactgactggcgcgccggcaccttatcaatattctggacttgcattggagttaagcagatctcccatgccgttgtgttcgtcgacttagttcgcgccaacacagttccagcaccatcggccgagcgcgattttttcgttaacaggagcctatgtgttcttgcggtggttggctttgtcagagcgggcgatgtggctctattgtagacctaaaggcaatcagtatcgcatgtggtggccaactcggcgctaggttcctttctcggactgagttcaggaggtggagttcctaactttaccttcccgcacggaaaacggtgttgcccataaacgcgtgattatttatgtatattagccttaaaaaacttgaaaaaacttgaaagattgattaatatgattttttaaagcaactatcctatataaaatttttgcataaaacaacatttagcagtttgaaatgcgtgtacggaaaaagagggaggtgagttattaggaaagaagggaggagaacacaacctcagtgatgtgttgtggtgttgtcagggcatggtcgcctcgtggttgagctggcacatggtggagttattttaatgttttttcttgattatagttctcagggctttagtcttttgcatttttttctattatgctgataaaaacttcgcactgtctagcaatgtttgggaaaaaaatcgaacattaaaatcaggtcactggacacacagaaattcacatttttacaggaacaatataaattatattactagaaagtaaaacattctaaaggactagcagcccacatatattctggaggccattcaatttggaaataagtccattttgcctccctcatctcttgcgcttaacatcccccaactggaaaaccggatataacgcctccttcgtctcttaaaaccagagcaaatcacctccctcggtggttttgctggtggtttcatccgacttggcatcgttgaccaggttgacagatgactcagcgtggtgggacccacctgtcagtgtgtaggcattacaaactcaccggcgctgagtcagcgtggaaatggggatagagaaagagaggtgcttggcgatggcgacgaggagaagggccggcgacgagcgacgggggaggggcacggccggcgacgggcggggagaaccagaggcgtgcggcggctagcggtggccctcgttggcggcagcggcgctcgcttgcgatggacgggaagggggtggcggctggcggggagaggcgcgcggtggcagggtccccacggtgaagacggcggccggtcgtcggggcggagaagggcgcggatacgagaaggagacgctgcagcggcacattccgccgctattcgatggggcgctcatcggcgtcgacgccgacaacggtagcaaggcgcatggctttcccgcggtggaggaggcacaagtgtcggcctcccttggaacccctttcgctggttctcgctgctcaacccctcggtgtctcggagcctgccgctgcaatgtacatccaatgtgaaataatgctacatgcaaggtttcttttttattttgagggaaaattgaacaagaaaaaactccggtgattagttcagacggaaatatagttgcaagaaatattagtttgcagaggagaggagggaagaggagtcagccggtgttgcgtatgccggcggcgatgccgttgatggtgatgagcagcgcgtcgcggagcttgcggttgtcgtggtggcgcaggacctcgacctgcagcatgttcatggggttgaggtacgtcagcctgctctcgatcagcttccgcaggctgtggtgttggcggacagcttcttgtggccgctcaccgccagcacgcagttctccgttcgcgccagctcctgccggagctccgcccccagcgcccgccgcccggcgtcgtgcaccagcacgtcgtcgtagtgcttcgccatgggcgcgtccgccttggccacaccatctcgatcaggtccaccgtggactggaagaagggccactccttgtacatggcgcggagctcgtcggtgtgccccttgtcgcaggcgtcctgcaggccgcgcccgacgccgagccacgccgggagcaccagtcgcgtctgcgtccacgcgaacacccacgagatggcggcggccggcggtggcccttgttggcggcagcggctatcgcccctcacctcctccgccgtcgccgccatcatcattgccgtaatggctgccgccgtcgtcctggcttcgctctccatcggcaggtggtcaacaaggccagctactgcaccatctacaaggccaagctggcggagggccgcggcagcatcgagctgcgcctcctccgtgagggctgctgcaaggacgccgagtcgtgcgcgccggcggtgcgctgcatcggccgtgcgcgccacgagaacctggttccgctgcgcgccttctaccatggtaccagaacagtagccgaccgccgcgatctacagccccgccgagcctaggaacgacgccggcacgcccaccgccgccgtcttctaattccattctcacaatctcattactctgttcgtccgaatctgaccaggggagagagagagctacacactgacatgtgagtcccaccacgctgagtcagcttattaccgggccaacaacaccacgtcggacgaaattgtcagcaaaaccaccgagggaggtgatttgctctggttttaagagatgaaggaggcgttatacccggttttccggatgggggatgttattcacagaaacgtaagagatgagggaggcaaaatagacttattccttcaatttgcacccacatcttttgggccgctctggtcgctgcacgctggttttgtgcaaacctggataggcgggtaacgggaaaaccatgtccgggggtagcggtctagcaaacctgtttgagaaaccaacacaaagcccggccatccgcaagcgcagaccgcgacatgacatgccttacatgaatcagcaacaacgactctcccaggagaaaaacagaaggactgcaagactgcaaggttcaacagatcaacaaaccgagatcagctctgaccaaacaaatttacttgaaggggaaatacgtagctctgatcaactgatgcccagatacatttcgatcgatatctacagacagcacaaccgcgagacataaggtcggcgttcataaagaagaaaatgtaaaggtcgaaatgtaacgtcgatcacttcgcaagttgctggtgtgttgttctaattttggtcagtgtgtgtagcatgtggatctcttgtcctacgaaatagtagtatctaatttactttcaacttggattagggtggcgagaagatgacctcgtgcgccttttatcatccaaaccacaaccgtgcgtcgcctgcgacaccacaggcaagcgaccacgaccacccgtgcattgattttgaccacgaaacaagtaacttagcctctattattgcacgcttatgcggatgtgcgtgtgtgcgcttaagcaattaattgctaattagacatgatgcatgtagcattataattcttctaaacaaatacatgtggcattagaaaaaacgagaagaattgctactgtgtatccaacggcccacacatacggtttcaacaaaaaaaaaaaaaacggcccacgcatatgtgagcagcgagagcacatatcgctttgcccgtcaaacgacgacggccgcgcgccatgtgcactcgtgcatgcagcactaacacatacgtggcctggtggcattttaattctcaacacgtactcctctctttcaaaatgtttaacaccgttgactttttagtatgtgtttaaccattcatcttattcaaaaaaatttaagtaattatttattttttttatatcatttgattcgtcgttaaatatactttcatgtacacatatagttttacttatttcaaaaataattaaataagacgaacggtcaaatatgtaattaaaaaaatcaacggtgtcaaacattttaaaacggagagaatactacatacgcttgcctgccgcgatatttatcgacaacacatgcaattattctagctagctctcgtagggtcttcctcttccacgtctaggggcaggtattctagcttgacgatgacgacaaagtgtgtcgtagtccggtgtgataaacatgaacatgacgacgcaccgcaccttgcttttcagtcatctcaaccgtacgagctagctggccggttacagtgcaaggtcgcatgcacacgagatcaatcatgcatataaaccatatcgatctccactagtactgctctaatgcaatattgtttactgctgtttgaaaagggatactcctatatcggttagtttccgacactgcaccatacctcttccctcccttaactatgcacgaacatcactttcaagctaatcacagttaaaccttctgcattggcacgtagctctaactcgctattcttttcctctggtatatttatataccactcgtatctgtgttagttctcaagccaaatctctgaagtctaaactaagattaagatcaagtgtatcagtcccgcacggctacagctacactacacgcacgcaaagcgtacgttagcacgatcgtttcacttcacgtgacccgcgcgactaccatgcacacgttagctcgctcccttccgacccgcacccatcggcacatgcggcgcgcgaaggcgaagcaacccggaacggaaagctagcctagcccagcgaggctcgccgaggagcgaggggtcaaaagacggggggaggaatctcgccacgtggcgttgaccaccgctcccacgcccgtgcggccccacctcacatgacgttcctggcgcgaccacgacggtcctactcctacgccttcgccgtcacgtgcctggtgggccccacgccgcttcgtattaaactgggccgagggctcgggggcgtggatcgcacataaaatattttggcccatcctggcactatccaaccggaatagtactaagaattttttttatttttaattttttttattaaaaattttacaaaaataatttttcattttgaaaattgacagaagtggtcgcctaccgccctctgggagggcgatttttaaaaatcgccatcccagagggcggcgaaagtgacgtggcagacggccgttcgctctcaggcgacggccgtcaacgaaatttgcaggcggcccccttgccgctctgggggaggacgattttatactgtgctttatattttttataaatatcaatagttatcaaatttttttatattgaaaactatacaagattaaaatctccaagactggtaaaatacaattttattattttttagggcctatttggaatgttaccgtataaatattttgttagtgccaaaatataagcaagttttggcactaccaaatatttggtaaggtaaaattgcatttgatcatatttggtttgctgccaaaatataaaattgtagtgaagaatgttctacataatctcaaatctagattacgtattaccaatgaataggcttcaatcgaaatcaaacacaagtactattcaaattaccaaaatattggtagggcatgtttttggtagcaatccaaataggcccttagtcttacgcatacaaaaaatcaccaccataattaaacattgtaatgataagatagataagaagtgccatcgatacacagtacaaatttgtcaatcccgacgaatcaagcatgcggtaacctatcggccccttctaggtcggtcagaatgcattgcattctcgtggtccttcaatcgttgatactctacttgtgtttctgactctgttatcttctggccatgatatgatggagtgacattgtcgatccatcgagtaaatccacccatccttggattgccctgtaaaaatagtaatgttattcagtttgggtagtaattttgtgcaaatcatagcggattttgtaaatggttagacatacaacgaaatcgttgtctacattggggcagacaaaatatctccttcgaaatgtttgttcagcaaaggatgtagccacctgccagcgatctctgcacccacactttggacgctcggaccatttaggtaaccctaatggattgttcctccagtctaagcttgcaatttccacccgacgttcgtactccatccaagcatgaatgaactgtatggtcggttcaggttgcgttatcggcccgccacttgaagtaactctgactgtgtcaatccattgtacgaattgacatttccttacatcctcctatgtacatccattttgggatagttaagttaatgatagtactgaggagtgatgaaaagaatagttgtaattaccacgaaatcatcgtcgacaatgtttggacacacgaaacacctttgtcctcgagtttggtgccttacggaccttatgacctgacaacggtcaccacaacgacactccggacgctcacgccacgtggggagtcctaggggatttacgtgccattctaaagcctcagcagcaattcgacgttcatgctcatccttccgccttaggtagtccgatcttgtttcactacgtgggtaagcacgggttccgtcgttttgtgggttctccatgtctacccactcgatgaagttgcacattggacgatatgtctgcgtaagatgttacaattgtgtacgaagaagttagtttttttatccatttgaacttcgaatagatgaagcatacctgatcaaagttcgcgcattggaagaatctcctgccccgagtttgtatcatgagggaagacttgagtatgcatccatccccacaatcgcacaaaggacggtcacaccatggtggaaaccaaccagcaaaaggatcgcttcgccagttgagacgctcaaggaatggcgcttccattttcgtgtgttgtgtgctagtgggaaagaagatatgaagaggttgccttcagattgtcaattatatagcgtcgttttcactgcaatatatgtgaactcaatgagatacattattcattagatgtgacaagacgatcacgcgtgggcgtgattcactttatgtcaacaggcagcgccgaaagttgatagtgacaactcgagctgccacttttcatgtgtgctgttgtggactgtgcgcgctactggatctgacactaccgtgaagcgccgaaagtgtgttgtcgtgagcataagttgttctagcaccatatgaatgaaaagaactatgtagacgagacaaacacaagtagtactgcagtagtaatagcaaaagtagtactgctttacaagtttgtaagccaaaagaaacggtcacataaggactgaagaggtagaacactactgacgaggcctcttacccctgtccctcctaccctgcgccctaatgtgcccctgggagtacgtgagtcggtccgggggtacggcacggccaacccgtcctgcctgtacaggtgtgacctctggctgctcctgagtgtgcgcctctggagctcctccaagctgagaggagcctagtacgtcgtggtggtgtgcaccgtgcaagtcgtcgtcgtagaactggctagtaggaccagtcctaccggcgtgagacgaagaggccccagtaccgaagatcccggctgcaaatcctgctggacaaggaccatcagtttcatacatgtatttaatagtattaataaaaagtaaactaccgtgtgggcgagggatcgacactccatgagaggaagagctggcgaacgcgcccgaagaggtggcgaacgcccctgcggagctcgcggaagcgccgatcgtgcctgcgaacgcgctcgaaggcatacgaggtcctgcgatgaggaaacgtgcagttaaaacatggtgacatattcgtgcaaaagctgaaacaaaaatgaactaatctctgggctgaactgtaccgtgcgaaaccggtgctgtaggtcgcactgctccgaagctaggggcgctcgaaggcaaacgaggtcctgcgaggatggaacatcaagttacgacaaggtgatgttttcgtacaaaaacataaacaaaacttaagaaacctctgggctgagcagtaccgtgcgaaacaggtgccgtaggtcgaggtcttgctccgacggtaggcgcgcgaggccgtggttgtaccggaccagctggaggtacgacgtccacgacgctgcgacaggagaagacgcgcatgaccgcacgcatcttctcctgcatccggtcgaaggtcaccctctgctcaacgtcagtcaagtgcaaacctctgttcaacctcacttggactgcggtgatatcggcactgatatcccgtgcggcatcagcctatgcaagatggaaataaaaaattcagtagttgtcctatattatgcaagataaatgaaataattgtaagaactaatacaaattcgacgtacccccacgaagtagtctcggtcacggtgcgtgggatacgcgtccgtgacagcggcaacgtgcggctctggggcgtctggagtgaaggtcacacgcgcacgagtgcgaggaaggtaccagcgaaggtagtcacggtagttctcctccgtgtgtgggaagagctcgttgatcacctcctctgtagctaacacccagtcgtcaatgtactgctgtacacgtggagcccaaagtgtgcctgctagctgtccccgtcgagtcaacctgtgaagagaggtaaattatatggctcgatgaagtaagtatcataaaaatttagaaatgaacaatccgaactcacgagtggtcggcagggaggacggtcggctgcacgttgcccggaaacacctgcctaagtccgaactgtctcatcacacgctgcgggcagtgaggctcaacgaaaatgtcgaacaccatcggcaggatggtgagccagtaagcctggtcgcgtgtgcacaaggacgaaagtcctagcggtgctctcgcagcgacggcctcttctgtgtacggctcccagatgacgtcgctcggctggagacggtcaaactcgaacacgaagtccgggtaacctcgtctcacctggacgtgagcgtaacgacgctgcaataaacatgatcggaattagacatgttatgtgaagaaaaaaaagaagacgactgataaacttataacgcagcgacgttgcactaaccccacgtcgacaccagtaagtccccatcgtgggaccgtcctctggccactgcgcgctgcgaccaaccccgtagggtgcgctgtccaccactggtcgacctatggcaaacctctcggctgcccaaagctgaagcaacatagggcagccagcgatgatcgctctcgcgtcagtcttcgtgcacgcctcacagagggcacggtacgtggctgctagcacggcagaaccccagctccactgcggcacgtcttgtggctgagcatccgcgatggaccgtgcgtagtggaccagccggaagtccacagcgtgcccgtgggtgctagtgaacatcacccacccgaacaaccacaacaggtacgccttaagggagcgtcggaccgagtaatcatcagcgtcagggtgcagaaggtccgcctacaattaagaatgaaatgttagtacaaaacactctgttgatcgcaaataagcatgtatgataataacaacttatttacttacagtgaactggagcaaccaagccttactaggcccgactgtagagtacggaggaagggtgttggccggtcctaggtgtggaaggcgcatcacctgctcgaagcgcgcagtgatatcctccttccacccaacaacactgtccacgggaccaactggtgctcccgccagcggtagcccgagcaggtacgacacgtcctgcagtgtcggagccatctccccacagggaaggtggaacgtgtgcgtctcaggtctccagcggtctaccaaagcggcaaggagtgaccggtctgcatcccaccgcttcgctgggtcacggtcgtccgccgccgcctcaacaagcctacaaagtggtagaaggcctgccgcacgcaacctgtatagagcaaacttcaaacataagtacaacacaaagcaaagttgagttgaaatgtgaacatacgcgtaccaaggaacgtgacgggggtcaacacgcaaccactcgcgcgacgtgcatggacggaaggtgccgagctgtgcaccctcgactgctgacaggaacgagcggtggttcctgtcaatcccacggttcaacagcgccggtgtgtcgtacgccatacctgcatcaaatagattggtcagaaacatataaataattagtcaacataagtaataaatgttcataagcgaattactaacacatattaaacaagagtacaaacaaacaaaagtgtcaccatacggaatatttctgattacaacaatagctgcagttacacgatatgagtacttagtccgaacactcatcacgataacattatgatacaacaccgaatagttcgcaatactactagtacaacaatagtcggaggtactcattacaacaacattcaattgaaattacacgatagaagtatttagtccgaacacacatcacatcacaacagcgttttatttcctaaatcgatagtattgttacaccatggaatcgcctgctgcgcgacgacgccttggccttgcgcgcctgcttgttgttccttcaccatgtggtcgcctaccatcacttgcctgtccagatggactagcatctgcgccgcttggaacttctgcattcttcgggcatttcttgtaagtatggccgcgcagattacacttgctgcagcgtaaagtcctcccacctgcttctgactcatccatatcatttctgatgagtctagtttggcgtcgaccctttttcacccttaacttagatggatctggaatataaaaaacttgggcactcagcgttgtgtaagatcctgagatcccgaacccatatatctcctcactccatgtatgaaagattgcttctttcctgaaataatttgagacgtacacattggaagatatgccacaatcaccggcagcagcaagaacgtgtgagcaaggaaggtgatgaagcttcggcttcatacaactgcaggtacatccaccatccgcctttaagacacattcctgcacggcttgcttgcgatagataccacgcctgctcctatcaacacacattatttcataccgatgcacttgtgtgccttgagcaacaactctatgtctccgtgcctttttgattttatcttccatgtactttgtcactacgttgccaaacactatgttgttatcggccatggacggaccaattttcttgtatcgatccctaaagtacgcttgcgtgccgtgaaggatgaattcaacaatagcaaccaatggaagtacccgaactcctcgcattacccagttgtacacctctgccaaattggttgtcattatgccataccgagatccatcggtgtcgaacaatagagaccacttctccttaggctcattctcaatccactgagtgaaatttctgatggacgaccctgacctccttctcattgttggtgggtcatcatgtaatgcaccaagaggtatgggaggctcgtcaccttcaacttgtggtctgcgagattgctcatttgtttgcttcgttgtcaactcatccaacttgtcccacaactcattaaatttcttctcttggttctgtacacagagcctcttaaagagcttcataagatgcttgttcttgaattgcttgtagaaatttgcacccatgtgacgcatgcaccaccgactccgaacatcatgccacttagctggaagtcccttctcatcccaaccgttctgcaagtagtcaatagcccgcaacatacccgcgtgacgatcatgtataaggcaaacgttgggcctcatacgcaccactgcaatgtgcactctctctaggaaccagtaccagctttcagtgttctcactctctacaaatgcaaaagccataggtagaacctggttgttcccatcacacccaattgctgtcaatatctgacctcggtatttacctgtcataaaagttccatctatgcatagaacaggtcgacaatgcacaaaagcattgatgcaagcacccaatgagaaaaaggctctttgcagcacactctttgttcgatcatcaaccgatgtaaatgtatgtaggtcatagtaagtattattattcctctgggcaatggtggctaacaaacgaggcaaattatcataagaagcttcaaatgtgccatacctcatctcaataatcttttgtttggctctccaggcctttgcatagcttatggtgtacttgaatttgttctcgatgtgcctaataattgattttggttcaaagcaaatgttaccaacaacactgctgtacatctcacttgccacaaaagctgaagtgatgtttcggtgatacttctccatcccttgtaagtagcacttgtgctcggtcacaatgctaactttccaataatcatttcatttacccttatatgcatggacacgtcacggacaatcttccttcatgcacctcacttcatacacataatttgttgacttgaccaccctaaactctctctgcaaggaaactgtccaatgcttcactgcctccttcatctcatccttatgagcatatcttgcactctcaattacctcgttctccttatactcccagggtacatgatcaccctctgatataacaagtccagagaagtcctcatttgcccaatcagtggccattacatcaccttcctcatcggatgatgcgtcatcgtccgcttcctcattatccgaatcttccctctccatttcatcaacaattataccgactctctccccctcatccgccatgcccatggcctgctcctcccttggttgattttcctcattttgcatcgatggtccaacaacatcccctgcattgataggaccctctacatcttcggtttgcattgaaacatttatatctttctcttgtaccgacacaaatataacgaggggccatgaccgttcaaaagccatttccacataccgtctccaagcagcagtgctgtccatcggcattagttcccaaaaataaccttctgttgcacgactcactacaactgatactgacattgtgtagacttcttggtctattctaaatcctctcaacaaccaactataaattgactgaaatgttttctccgcaggcctatcgatgcccttagatgtcattacaaaatctgacagatcaacaccatctggaccaaatctaatatttccttcaccgtgaactatctgaaatgtgaccttatttgacattgtgcctgatgaaaacaataactgcgttaacctcgcatttctgtactacgccctaagttacattctctacaatattgttctccaaaattctaaaagtaggttacattctccagatcaaactaaactacatcttacaattaacactactgtctatgtctcaattcatactattatattctatgctctggatctacacatatgtgctgtgtgctacagatatgctaaaatatatggaactaaaactaaaacgcaacatatatactcaaacataacatattagtacaaatgcaaaagatgtatgggagcaaacctgtgatgaagtgagcgaaccagcagggcttcgccgctccccttctgctgccctctcctctctctctttcgtttttttttggatttttagtgaatataatgaaatttcagagaggggggactgggctttatagggggaggcaaaaatcgccctcccccagggcggcaagggggccgcctgcaaaattccatgccccctcgccgcccatttgcaggcggccccccgcacagtacaaaatcgccctagcggagggcggcaagggggccgcctgcaaatttcattgacggccgtcgcccgagagcgaacggccgtctgccacgtcattttcgccgccctctgggatgacgatttttaaaaatcgccctcccagagggcggtaggcgactacttccgtcaattttcaaaatggaaaattattttttaaaacttttaataaaaaaaattaaaaataaaaaaaattcataatactaaccaggggcaaaagaataaaaaaaaaagctaaagagagaaaaaatatcataggcaaaagggaagaagattggtacagactacagagataaaaatacgtgacgtaaacctcctatccaagcaatcaatggtctccccggccttgggcgccctggctcagtggctcctgctctgttccccacagcacaggcctttcctttgaatccaagcaaaatttgacaaaagttgcaaagttgagctgccgccataatttttttgggaaggcaaatgtggtgccttgatgttcgtgtctagatatatatcgcggctgttccttttttcgaaaggtgtggtgcggccaccgtgcaagccgttgcagcttgactgagttttattgatgcgaatgccaccttttctgatgacatgggaacgacttgctcatttcgaaggatttctgagctagacctaggcatatatactgcacttccagttgatccatccagaagaaacacctaaaaattatactcttgcgaaaatacgagtactctctccgtttcacaatataaatcattttagcatttttcacattcattatgatgttaatgaatctatacatatatatctatgtaaattcattaacatcaatatgaatgtgagaatgctaaaatgacttacactgtgaaactgaggaagtaattcagattgcctgggtaaagtacagtatcaccaacttgagctcgagaacaaattacggtagaagtgctcactccgtgcccttctgcgagagcaatgaaccggaacaaaagcgttgcgatttatttacagaaagaaaagaaagctgcagaagaagaatcccattccccgaggccaatctacatcgggatcgtagtacatcgtagagctcgcgacgtcctcccggccggcggccggggccaccctctgacgcacgcagtcacccctgccgctctgatgccaaggtgccggtcgacgagtccacgtccgaacgatcgggatccgacggcgcaggatgccctcgcgtcggtgccccccacgtggtacgtacgtggacgcgcggcagggtgcccgtgacgtgggcgccctcctccgcgaaggctactcaccgtgtgaccgggctacgtgtcaagatcgcatacgtcactgctgtccccgtcgagccgtgacgacggcacgacgcgccggatcgatggccggcccggcgtgacatgaacacccttcagttgcgtggaccaagcctgtcccgagagaacgacaaatctatagtataggagtacaaactaaaccgagattttcgttatgtagctagtgacctatggttttagatcagatagctaggccggtttaagtcaccggaatgttttttacatggacgaaacaaaattcactgtgagcataggaaatgatggcgaaaacgacttgcatgttgctagtctcgtggtagaaagtgattttgccaccaagagtaattgcaccgaatgatgaacaacatatagcaatgcaaacataacgtcgtcatcgggctcaacatggtatgtctagctgcttgtcatgcgatatcatcccagatctctacagcaatagaccggctagtgcgagtgaccgtgacacccgatcatctcgcgacgattatcataccgtacgtcgtccgttcacatgttaatcgtaattaaactagcgcctgtccatgcctcctatatacttgtaaagacatggcaagacacttcgtagaatggactgcactttctctccgtccgtgtttacatgtatgttctttgaggtggatatgcttcaatgcatttacctgaaaatctgtaatttatttatctttaaaggaatatcgtaaaagatttgtcatgtatatattaatagagatgaaaacattatgaaaaaaaatatttacaagacaactttaaaataaacatgtctgcaaaaggttttaaaaaaatctgctacaagacgaccgccaaactaacgaattcctagagccttacagctcccgttttcacccaggtcattgcttctctttgattttggctatggttgtagccggggttacggcgacatggtatagaatatttgcatcgcgttcgtgaaaataaaatatttgcattgcgctccaactagagtgcacacaagaagacgatgatcatcaacctaagcggttttttaggccatatagaatcaatagcatctgttgcccaccagtctagcttcttaagcggtttcttcaggccatgtagaatcgatagcatctactgcaaatagccttccagtgagtcagagtctttccacctcttgtatgtggaggtctaggcctacccacttctagattgagtgtctagattctctgtcagcctacgcttgaccagaaggtggagtgttgttttccacgctgcgcagtacaacagacatatctgttggtttgatcagcctattctcttaagtatgtctactaaccagactgttttgtttgataggacatgaagatttacattccagtggcgcccgaagcttctaggttgtttgtttgctagttgagctgattatactcgcaaagtacggtctatatgtcaagttcaccatatactccctgttggccgtgagcttccaggtcatgatgtcataaactatgaacctagtggcgcctatagctgttttaaccacattcaaatatcaacgaaatgccatatatgattagcttttgtgatttgacgaatatttgaatccaggtgtcttcctctaggctgtcccacactaaacattctttcgttttgaggccataaagattgcagaggccaagagcctcggtgttttgttgtctaggcaatgtgagtcctagaacctcaccgtgtttccgttctcaagagtgatgatggtcgcaaacgcaaaatgatctgtgtatccagctggttaccagatccggcatgcctacccaaggtatctccaatgccttccaatattcaaaccaaagccatcgcaaacttaaaaaacgctcttgtgaagcgacgcgacgcatatttaggactcatcaaccacaaagttctttcggtttgcacacttttttttccaattcaactgcaagttttattctcgcatatttttaaacttagttataaaaagacatggtacgaaatataggtcaagattcattggcatacagtcactagcaagaattttagttctctctctagtctctactggtaaaaataagtatatagctcgctggccgctgcttgagctaaaaaagaatagttggcaactgctgctaatgttcaccatttctgaaatcttttgacctccaacatttgagatgccacctgtaaaaatgcgagttaaattttgatcttcggaacatgcagtggactatcccaattaaggacccagcaagtgttatcctctccgtttgaataatcggcggtgaaaaaaaaaattgaagcttcgtggcagcctcgactctgaacagaaacggccaacatggacaacgtgcggtgccactgcgatccctcgtgcaggcgtgcacggtgcagcaagctagctagcgatcccgtgggtctcgtacttacctcttcacgacgaacggtaatccagaacaaccgcggcccgggatagcattcgagacttgcgcctcgcggaatttaccagctgcttccacgtgacagagcctcacaaaatccacctgcctcgtcagactggtttgttgtcacgcgtacgtacgtaaatttgttctcacgcgcacgtaaaagacaacaggaatccaccgtgacttgcttcaccaccaccctgcatgcatattccattttccagagggaaaaaaggtgttcactgatctccagctgttcgcatggttggtgcccctctccttcccgggtagttggggaatgaaatgacgctgggattgcacggttagtaaagtgtttaaactggagttcttactgcttgcttggtttaaccacaacccggtccctctggtgtgcgggctgggctagctggtggccggctcagtggccctcgctttatttactccttaagaatcgttcgcttcagctgacctctctccgccccgcctccccttccgtctctccgcgctccagctccacgccaattaaaccctactcctcttgcgttgcgttatctgcggttccgtctcccactactcgcgcacacgtagaaacggaaggagaaacaaacaaaaggcgccgagtaacgcagatagagagttgtttccgcaccgagcgcgtccgcggcagtgtgtgtgtgtagcggtagcgcacgcgcggctcgcgggcgcgccggttgcaccagctgtgcgttgcggcgacgatggaggtgacggccgagttcggcggcgcctactacggcggcgcggcgggccgcgagaagaaggcgctgcagcaggggtgcggggaccacttcgccgtggacgacctcctcgtgttgccctacggcgaggaggatgaaacaacaagggagggtgaggccaccggcggtaaggaggaggctgccggctttgggaacgcgtcggcggactcgtcgaccataacggccctggatagctgcagcaattccttcggcctagccgacggcgacttccccggcgagctgtgcgagccggtaaattctttggccaccttttgtcttgttaattaccttggattttgcagtagaggtgccaatcatttctggcagctcctgcatatcacttcttctgaaattgtcgtccctttcatttgctgaactgatctaaactagagctatgtattttatcatcttgttttacgcctcgagagaatttgaatgcattattagaaaaagaaaaattcgcagctgtttgttggctcggctgttacgctgtcccataataactcccgttaaaccacacaaaatttgtcgcctataattatgcagctccaattcgaacttttctcccagataacaaaaatggaagaaaaaacccgttaatgtacttgaactaacgataccaaaacggtagccttttaaactgaagcagttgactgccatgtactctggaacaaacgagaattccattatcaaaattgtttagcttacgaaagcatatagcacaataataggacgctgaatttactgtcggattttctgcagtacgatcaactcgcggagctggaatggctatccaactatatgaacgagggagacgacgcattcgccaccgaggacctccagaagctgcagctcatctccggcatcccctccggtgggttctcgacggcgagcgtcccgtcggctcaagctcaagctgcgtcggcggctgcctccatggcagtgcagcccggcggcttcctgccggaggcccctgtccccgccaaggcacgaagcaagcgctcccgcgctgcgcctggcaactggtcgtcccgcctgctcgtgctgccgccgcctccggcctccccgccgtccccggcatccatggccatctcgccggcggagtctggcgtgtcggcgcatgcgttccctattaagaagccgtcgaagccggctaagaagaaagacgcgccggcgccaccggcgcaggcgcagctctcgagcgtgccggtgcactcgggcggctcggcgccagcggccgcggccggggaagggaggcggtgcctgcactgcgagactgacaagacgccacagtggaggacggggccgatggggcccaagacactgtgcaacgcgtgcggggtgcggtacaagtccgggcgactggtgccggagtaccggccggcggcgagccccaccttcatggtatcgaagcactccaactcccaccgcaaggtgctggagctgcgccggcagaaggagatgcaccagcagacgccgcatcatcaccagccgcaggtggccgccgccggtggagtggggagcctaatgcacatgcagagctccatgctgttcgacggagtgtcgcccgtcgtgagcggcgacgacttcttgatccaccaccacctaaggacagacttccggccgcccatctagagatgagtcgtgtgctagaattgatcaattagcccatgaataatctaaaagaaacccttgaaccaaaaaaaaaacagaagaactgatattttcttaggagtttccccagtttttgtctcttttcccttcgtttagtttgtgcgcttttgctcagctcgtcgaatttttcgtgtcaattttgtttatgatgctctttaagtttaccaccttttctagccgggagttgatttctctagcttctacttatcttcctctctatcttgccatttaatttgtaacgcatttcaaggtacttaaatctcttcttccatttcttcctcccttctaccagaagatgaaaacaaacctgtttttctttttcttttttttttttggctcattgctttggcctaaaactaatcatcatgccatgccgttgcaagaccacttcacgatggttgtgtgggcaaccgaacatacaatacaagcaggcatgcaggatgcaaaggccaaaggaggcgagggcgccattgcccacctgtcgtgcgtcgcagctctagcacgtgaccatttgcacacctcgcgtgagaaagatgccctccttatggcagcacagaataaatggtggctggggctgggcgggcgggcggatgggcggaggcatggagcccctctcctcgctgtaaaacttttggccccgccctgctgctgccggccggcaagccttttgctgctgctgtgttagtgtggttgcgtttcatcattgctgtacctcgcgccggtaccacctggggcttggcttggccgcaattccggataagcaatcagtgacatgccctgcccggctggctgctggcgaagtgaaagctccgttttactcctacctttggcgtacgtacgtactcctcgaactggctgtcagaaagtcagcagctcagaacaatataaatggcaggcaggcagcctaccgtacgataggccacttaacctgccggccgcatctgacatacctgccagcacccgctaaaaatatgtacagtactcctaactgtggaccttgggtggttattggttactccgatcctacccagctgtgaagctagtcctgttaaacttgatcatttggttgcaggtcagtcatttggtaacagtagtagccagcaagtagaaaattaaccatgagctacgtagtagcttgtggggggcactgtgaactgagcgcatgtgggctctcactaccccgaggggggggggggacaagtggaggagtataaaaaccggcgtcgtgctcggtcagggcggcagctacccccggccggtgacgggcggaggcgcgcgcccgagccgcatgctcacatgggaggtggcaatagataaacccgagatagaggagagagagggaggatactagtagtactacgattacagtactagaggccggacggagctctggattctgacgacggactacgtgctgggtcgggatagaatagtattcctaccagcatattgcgagcggtaagtcgccttggcccctgcgccccctcgtgatcccagacacgcagggtcgcaggcgttggtgatccagatggaacgatgaattaacggccaatatactagtaccccctccgggtacggtgcttacgttactgcatgcgtttaattatgctcgatgtgatagcaggagtgtaaaaacaatttttggcaccgaatatgctcctggtcatggtggcatttctcgctggttctacgtgctccggcctcggtagcacaagcttgtgcgccttgaccaccggcaggaggtgcacgggcgcggcctgggaaccgtcgcttgctgctgcgagcacgtacacacccgtgtacatgccagcatctgcgtggtaaatttgccaccgtagtaccagcattgcagcgcgtacaccatgtttaataatttcagcgtggctcgatcgctgttaattgtatatatagtatctgctagctgcacgtactggttgttagtccttcctgggtacatgatcatatcacatagtcaaagccacgggctctctgataactaatcaaacagaggtactgctgattagttagctgtactctggaaaagggagatcggttgatcagggatcacatcggcttactagatttgttacgggttaagtaaagtgggggcgggcatgcgagccgggaaaggcctagtgggctgtgggcggtgtcacatgcatgaatcctgatgcgtcgtaaccgagcgagcgcgcggtgctgggaggtaacatgatggagtacgtagctagggaggccggtcgatcggcgcactcaccgtttgcggttagctcgagtgctcgatgggtcgggacggtggctgtgggcgaacccgaatcggggtggtgatgaacagtgtggctcacgtctccgggcacgtgaaagcacgtgcgcgtgtgtgcgtgagagagcacccgcgccaccgccgggtccggcttttggtggacatggagggtgacgagacggcgatgcgcggccttgccccgcccggcaggcaagaaccccggccgcgcgcggccatctgcgctaggcacgcacgcatgcatcaccacctgcagcttcttgatttactcgcgtcggtcgatctgcttcgaggcgctgctgcctaacctgccgcagcaatatattgcaatgcatgcatgcatgcctgccctgcctgatcgatcggagatattttcttcagcgctttcgtgccatcaaggccatgcatgattgcatgttgtgctgttaggttaggtaccggtactgatgtgtagtagtagggcacttttcattcgtccgtttagtttcaggacccgtgtcgtgaaacatatagcccgtgtggtttctgaattcaattctgacgctgactgtgtgtgggacatgtcatttgtgtgcaagtccttcagtttgtactttgtacgtggtagtctctaaaagaatgagttggtcttcatcaggtgctgctcccgagtgtagaggaaaaaaaaaaggtcgtctctcttctcccttttctgggacttactatgcaacacgtacgtacgcttatcagtccacatgcttcatttttatcatgaccactggccagtggcttgcttgtgtcctttcgttccgacttcagattcgtcaggacgtataaatgaaaggaaactaattcatgtcattcagacttacgaatattttcgtcagacttaagatctagtatccggccggggtccttcaacatgaagaaactgagtttttgtgttcgcaatatcagaccgcaaggggacaaactaaaggaagttgatcctaattaatcttgcaaagcgaaagggcctgtagcctaatgattacaagaaccttgtcacgccccgaactagtcccgaccggaactagcccgtgacgctccaaattaacctgttaatcgataccagtcccagaaaacagtgctggtatcacaggaagacagaatatcacagcaacagaggtctctttattatagagtaggagtacagtcttgttgggctgcggacagaccccgagctcacaactgcattacaaaaggaaagcggaagccaagacttggaccaaacatcacaggcgcgacttgggaactaggccgaaaccctaaaactcatcgtaaccggcttgctcctggaagaactcctcatcagcaggatccgcttcatcttcttcagcagctggggaaataagtgtttaatgcaggcttcaaggaaagactattgcttttgcagttgattttatttgaactcttttctaaaaacgactaagtgagtgcttctcaaacgacacggatgagacagtgcgtctcgtccggtcggagtatgtgcaatgtatcagtctttagaaatgattcaaggttggcacccagccaatagcttttcaaacggccacccgggcctagctgatcccgtcagctacagatttttcaaacatcgaaccccttccacaacagcaatttcacaagcagtagtcaaacaaaactacgctaggaatcacctcacatccgcccatgaccgtgggcacggctgttcgaacagtttgttaacctctgcagagggggtacactttacccacacgacattactaacccggatcacccagcctgtgggaatcagccacgtcgggagacctccaagctttcatgacaaggcatttccaaagccgacacaggtttaccatatgccgacgagaggggtcacagaccaacaacaggttaggtcccagaccatactgcgccaggaagcccaggggtcctccccgacaccaccccggcgaatccacatgtctctcggcatcaaggctcccttgataagctagttactcagccaggggtgtcccattccacccatgtggtcgtacttgtcttatgtttggatgaaattccaaggaaacggtccttaagtgcgagagcgggaaaccgtacacccggtacgttccccggtccgcggttttggaaattcatttagttcgcaagcaccgacccaggtgtcgggttttccaagtcttttataaaacccaagttttacccaagaagtttttcagattttaagtttgaaggcgtccgtcgatactcgcacagggtgcatgaatatcgagacgcaactagatggttacaaggggacacgatataacaattatcaaatgaaggatcaaatgcaacaatttaggtaggtccgccaatctgccttgcagacgggacaacagattaagtgcgatcctatcaatgcataatattttgcaagcaatataattaagttcaaatataggctcaagatgttcaaaggtggcttgccttgctcgagatctggagcttgatcctcgaaatccacgcactgcgggtctttgggctccgaaactacacgcgaaacgggacaactcaacaaacggcaaaaaataaagccctattaatgacctctaagcgtgccattagatagatctcgagatttggggaattttggaagttgaacggagtcaaatggatttacggttgggaagatattgaatttctaagattattggatttttggtctaaaggaaaaaggatttaattaaatcctttttgaaaaagaaaagaaaagaaaaggaaagagggagggaaaatagacttccctcgggcggctagggcgcggcccgagagaaagggcagctcggccgagcttaatgggccggccggaccaagaaggcggcccagagcggcccaaggcacgcgcgcgcgggagggaaggagagagagagccggtggaccgggctcaccacgcgtggtcccgggtgggacccacttgtcggtgacacggttcaccgtgcggagcgagcacgcggcgcacgcgcgcgggcggggaagggatgcggtgcacgcgcgtggttcgcggaggaacggatgcggcgggcccacgcgcagcctcacggctcgcggtggaacgcgcgcacgggaggggctgaccggggtcggcccgacccgatctcggccgagctggcgccgacgtggcgcctacgtggcgccaggttgctgccacgcgggctggcgggaggtagacgacgacgccggccggaacggacggcggacgacagcgacgagcggcggagcgaaccacggcgatacaggcgagagcgagcataccgggtggttgctcaggacgaggggagacgagctaacggctcggattcgccggagggagtccgtcggcggtggattgcggcggcggcaaccggcggagagaaaaggggaaaacggcgacgaggtcacgaggggccaattcccggcggcgagagcatctacgcggctacgggaatccgttgctagcgtcggattgggcggagctacgccgagcgaggccggcgacgagcggcgcttcggagctcgggcggcggcgagcacacggcgagcggcggcaatggacggggcggcgccggctagctacggggaggctactcgtgctaccaccgaaaactaagggggggagatggagcgaggaggaggaacggagggaggcactaccgagatgaggagcggagggggagggagagagggagagagagagagagagagagagcgccgggagggagggggagatgggccaagagagattcggcccatcgaacccgggggaggcaaaatagacttttgcggagggaacgatttggaaggatttggattcgggattgaactcgacgatagatcggggatttgagatctgagatggcacggacactagacaacaagcgaagaaacaaatttcgcaattagggtttttaagagataattttcccgctaggcgccacgacggaacgggcgctacaaacctcaatagcaccttaggtccggggttcgactcctcgtgagagcgaattttccaggatttaacggtattatatatagattaataactttagggttcaactcttcttgggagcgaattttctacccatgggatgtttttcgcccctaacggaaaggggccggggaaaatgcggaaaatgcgttcgcccctaacggaaagaggccggggaaatgcagagcaaattttccaggatttaactgtattatatatagattaataactttagggttcgactgggctggggaaaatgcggagcgaattttccaggatttaacgatattatatatagattaataactttagggttcgattcttcatgggagcgaattttctaccatgggatgtggaaaatgcggagcgaatttttcaggatttaacggtattatatatagattaataactttagggttcgactcttcatgggagcgaattttctacccatgggatgtttttcgcccctgacggaaaggggccggggaaaatgcgttgttggttggcattatatatagattgataacttttcgactccttttgggagcgaattttctaggatttaacggcattatatatagattgataacttctaatgatgatatgtataacataccagacccatgggatgtttttcgcccctaacggaaaggggtcgggggtcgggggatgaaaatgccgagggaaaatgcgttgttggttggcattatatatagattgataacttctgatgatatgtataacataccaaacccatgggacgtttttcgcccctgacggcgttatatatagattgataacttttgatgatatgtatagaataccagacccatgggacgtttttcgcccctgatggaaaagggcggcgcaaaatgtgttgttggtttcactgtgcgttagttaatcttcttaaattaaaactgttactccctccgtttcataatatatatctacattcataacatcttgttaacgaccaaatttggtaatctaagtatcggagatgaagaaggaatcgaagcgaagttcgagagggagatcgcttcggaaacagagtaagaatcggctggggtctgagttggctgcgatcaggatcgacagagtccgagttggacagggttagccgattgagccgaatccgacaatgtgtcacagcgtacgttgtcgggttgggttgatgtgcttcatgaggattgccgcgtatggatagagtcctgagaaggcaattgtatctattacttaggatattttatgtaattttcttagagatatgttcgggcaaaagtttgctgtaaagacttgtggtattttagagtttgttagagataagagtcatgtcctaaatggacatattttgtaatctcgggtataaaatagaccccgagccccatgtaataaaactaacacacgctcaatacaatctcggcgcatcgccacccttttactttcgttttgttttcgacgaattcttgcttttgggttgagttgcatcggtttcgatcttcaacaagaggtaaaacttattatggcggcttgcgttctcaggattagtgcttacatctttatgatactctaatcctatttatgtaattcgtcgagttatcatatatcttacataatctccggcaatatcgctatctattcatcaatcggctaacgtctgccactagagggcagccgattaagttaaataccgatgttgacctagattatataagatatctaccaccctatgaaacatccagcgacttgattgtctagatattatcattcttttcatacttatagctgcatcagttgagtttgatcttatgagtcgtgattagaatctcaatctctagcctacctttggttggcgattagagtagcatcggggtttcagccgatcttacctgatttaactatatttatcttatatgcttgattgacatgttaaatctgccctttatgctaagatcttgtcgcatttaagttattaggattttgtttggtatattttacttgctttgatatcttaatatagagtggtatcggagtattagccgatacatgctagatctatctgatcggctatgctatgaacatatataatctcattgttagtatatatttcgatctaggtgatttatactgtctcggcatggcgaccgatctatcccaatcacttgatttaagcatatatcaacataaggattatatattgttaatatctacagccgatcgagtagatttagtcctttcttacttattcatgattaccgatcgattcacatatgacatcggcttgaagataaatgatatgtcatcggcaactagccgatcggctatcgtttatggatttaaccgcggtttcttcgtctttgtttcttgttgattgcaggatcaaatcaactgacacgctcatacatctaaaggcaagcttttggacctgcactggagttaagcagatctcctagacctcgtgttttcacgtcaacacatctatacgaatgtggataatactaaaaagtcggacgtttttcgcctctgacggaaaggggccgggggataatgcgttgttggtttcactgtgcgttagttaatcttcttgaattaaaactgttactccctccgtttcataatatatgtctaggttcattaacatctatatgaatgtggataattaaaaaaagtcttacataatgaaacggaggaagtattattgcggttatcagattatgagatatcccattagcctatagtcttcggtgtctaaacgcctatcatgaagacatgaagcccactcaaactgccccaagtatcgggcctctttttggggctacaggtgatgtgtggatactctcatggaataagttcatctaaggtccctaaattttacactgaatctaattttcgtccttaaaccccaaaaccagatacaaccagtccccgaattgtcaaaactggtacaaatgaggtcctttggcggtttggaaggcggttttggctgacgtggcgtctacgtggctggtttgactaggtctccatcccacgtggcattgacgtggcgcttacgtggcaataatagctctgaaaaataataaaaaactgtgggcccacatgtcagctacacataaaaaataatttaaaaatggtaggacccatgtggccccacatgttagccacacaaagcccatgtgggacccacatgtcattccctctcccccactcggctcttattcttcttcctcatcccgtcgcggcgccgccccacagccttaaagccgcggccggagcggcggggcccgccgcgccaatcaaccgccgtcggccaccggaaagccggccgccaccgccgccgctcttcccacttagcccgcatcgcaacgccacaaggggacgcgaccgccgcctccccacacctccggcaacgccgcccggagtcgcggccgcatcagccgctcgctgccgggggcgccaatggcgacgatttcggagacactgcccaactcggaggccgtctcccacgcctacaagttcgcctccacctgggagaaggtcggtttcctcgcttcgctgcgtggtcgggtgggtgtgtggtccagtggtagcactggtggatctggtggatctgatctgatctaatggtgatccagtgtgtttgatccatagtccctgttgcttgcgatgactaaatgttgtgaactgatgctaccatggtttggtttagtttagtttgtcgtgctatgctcgggatagactaacccgtcaatcgtatttgaaggatttgagatatttcattagttgcaacacagcatacatactccatttggtagttccttattcctcctcttgtttcttcctgtgctctgcttcctctgcctgcgccatggccgcaccaggaagtagcctcgcgccgactacctaatcgtcggcacgctgccacacttggtcaagaatcaacaccatctcgtcgagtggtcggccggcattgtatgttctcgacaccggatttggcacaacccccgctgctcgaagcgcagggggcctggagctcggggagctgagggctgaggcacctctccgtgatttcaacagcgcagctcaccgggagagggaatgacatgtagggccatgtgggttccacaatttttctttaactgacatgtgggctcatggtttttattatttttctgaaatatgattgccacgtaagcgccacgtcaatgccatgtgggacgaatacctagtcaaaccagccacgtaggtgccacgtcaaccaaaactgcctcccaaaccg

SEQ ID NO: 16544 - DNA, 5777 bp, Oryza sativa
  unsure (1)..(5777): unsure at all n locations
gtttgcactggttttgacaatagttgaactagccaactaggcctttatgcgcaagcatttacagtatatgcctatgggctttcagtttcagcgaagagtaagcattaacggggttcggttggtgggcatatatcaggactgcatgtctgtatatacagccatacatgtcaattgaatacctggattcctatctctcccaaaaaaaaattgtattggttaaaattttggtacgccaaccgtgtttgaattggttataagttgttcgtatctaattcgacgtgaatgtaaaacaacaattatacacccctcccaacctaacccaatcgactcacgccatcccgatgccccgtctcgcacacccctccctcgaccggcgtatttttttctttccctttttttcattttctttttcccctaatcatccttatcttctcccgatccttccaatctcctctcttctctcttttttttcttccaaatttctttccgcaaattataattatttaaggtgtgtatgcgatatgtttgctactttccaaatgctttccatctatagtaaaagaaaatttcactaattgataaaatttcaatctttgatagatgaggtgtagctaaatacacatgcatcaacttatggaatagccacctatcactactggagagggagagactcccgagtgtcaaaaacactcggcaatgcatgaaaaacactctgtaacagtgttacctagcgcaacactccgtaatcttcgcctgggagtgatttctccttcccgtgcatagttggcgtgtgtcctaggtggatacaccccgtaacagtgtgataattgccgtgtgctctaggcactcggtaacattttcaccccaccgtccaacagaattccacgtgcaacggcgacagagacggaacggtcacggcacagttgcgtagtggagagaaagttaccgtgtgtttttcaatcggacacacccggtaaaccttctcttgttatcgggtgttgacatcgcatgacacacgttaactttccaagaaacacacaccaacagtgccctcgttaccgtgtgttcagtttaggacactgtaatgtgacacacaggaactctacttgagggcaaactaaaatgggtttgctgattcatttatattatttacttccatcagaatagtaggatcctaataacacatcacagatgatcacaaatacaatggtagaatggatttcaatgcattgacatccacgtacaattaatcagtttggcaacaatctaatatgaaacaatagcaatgtcaatctcatcagctacatctgagatgtaatttgaatattaattcttaagcttagataaccaaagaggtagtgcaactagaaaagagttgacgaatggcattgcaggcagtccgacaacaccttaaataatatgcagatgagccagttgactagcagatcctgagatttcaaataaagaggtaagattaattaggtaggtcagctttactttaaaacaacattttatgtacatgtatctaaaacagtgatagcacatttatatgaaatagcattagcagaaagtttatataaatgatctatgcaaataaaaaaactacctgaacttattcatgctttcttcaagaattgtttaggtttattacaaaattcaggtatagcaaaagtaattgatattggaaacttttattgatatggcacatgccaagaagcgctatgcacccaagtgactggtcaagtgctcatagaagttctttctttatactagccaagtgcccatgtattgcactgaaatccaaataaatgattgcacatgttcaaaatagggggaaatgcaaaattgaaatcaaacctctcttatagaacttcatgattcctggtatataatgttatttaggataaaaatgattatgatcctaactcaaacaattcttgctcatctatcaaaaagtttatcttactatcaacaatttatgggatttgtacaaacaaactcatcaatttgctagcaccaaaattgtaaatcatgtaatcagatgacatgagttaattagggttacccctactaatttttctgtgttattttctcatattcagaaatccaatggtatgagaagaatcaattaagagaatatacaatagtaaattcaatattcagacattgtagtaaacggaactttgcttgtagtacctgctttggtgttggtcatttacattctttatttgtcactcttcacctagtagacagagcaccaattgattgagaatctactgccttggctatcccaatgcttgtcattgtcctgaaatgaatacacagagtgaccttaggtgggtaaaattgttgtggcttatgtcagcaaatcccctgttttactcacgcgagactgtggctatcctataactctgaccttttcagacgagaaacagtttactgaaaaacagagcaaaacgagataacagagtttttgtgctgcgcaatacttgcagttttttcgtcactcctctttatctatttattatcctccttataaactggagtttgttacatgcatatgaccacgtaaacactcgatccatacattgcgccatcccacaacagaatcaagataggtcaccgatctgaaaatgcagctaactgaaaaaaaaaactaactgaaaactaactatgcaggaactagtctaagcaacaacttaaaatacgaatcacaagattacaaatttagtcaacagcttattccatgataattaagttgggcctgttaatttatgatttaactaagaaaaaggaaacatgccaacctgagagagagaaatggctccctggctttgcagcgagtagaatgtctgaggtggtgcctatgatggcttgaaatggagccgagctagattggttcagtactggaacaaacattgcaatgacttcttggaacatgcctccaatcttctgaaaaaagggaataataatttcacacaagtaaattttaggcatctctaaatcaaactacagatatatgtacagttggttcatactccatatgattttagttgtgttgtactggctggctcatggaagcaatcctcaagaaaaggaattgcatcatatagataaaacaagaattttatctccacttaattccagtaacttgcacaaaagcacaattgtttcttctcactaacactaataaaatgaaaaaaaattgataattgtaaatagctacactttgtcattatgaaagatgaaaaaaatagtttcattatcagaaatatgtttaaaccctgaaaacaaatgagcactgaagaaaggtgctataaaaaagtactcctacacgacaaattgaatataagtatatcttacaagtagttactagctacacgagaaatcaaatctgagctccaagttctccaccagaaaccaaaatgcgtagttctatatttagagggaaaaaataatattctagaaaaaagccctttgcagctgtccaggtgaaaagtaaaatgcttctcttcacaaatcaaatccacaagggcccttctccatgcgtgcaggagggaagaaagagacatggggtgggaagagagagatcataccatggagaggtagcttgcctgtaagtcttgcccgggtccttcttcacctaacttctgtattaacctataaaaaatccccaattagaaaaatcttgaataaaccagataacttagggaatagcccagatattatagatctgggacaaaggagcttgtgggaaggaattgacctgaggagggcagcgcggcccctggccatcgtcgcgccggagcaactgccatgggtgaggtggcnnnnnnnnnnnnnnnnnnnnnnnnnnnnccggcagtctggtatccccattgctccggcgagtagggcaaaggagaggatgttgcggagggagggctagagctggagcagcaggaagagggggagagccgcaagtacggcggcagcaccgaagtggggaacatgacctccagacgtggcggcagggctcgtaagtggaatattcgggggagtatggagcaggtggcgctggatctagctgacccgcgtttgtcggcgtcagagccggtggatccgttgctccggcgaggagttcaaggggaggaggagcgggaggatttggacgcgccgacgcggagaaagggaaaagggatgtgtgaaaggtgttactctgggaggaggataaggttggagaggcgccctagtaagataaagatggggaaattgcattcccgcgcgcgccactagaaattgtaaattttgggagagattttcttttcgtttgtacattaagcaaataattttctatttgttataactggtttctttctacatcaaaaatattcattgataaccatcaaattgaagaaacatctccgttttttaattgaaactaccatgatttttctgaaattgaaatttgaatgctacctagttttttaagctaactgaacacgaatttggaccggtttatgtcaaactctgatggagtttcattaaaagcaccgagacaagcatcccccatgagttttgagaaaataaaatagttttacgaaaaaataaatttcagtttaaatgtgatgaaatttgaaaataaataaaggaaaattgtaggaatgtgtggaaatgtttggggaaatggtgggccggcggagtggagcggggtagcagcggcggtggacgagcgcgcggcaggcggcagctagcggcggcgagcgagcgcgcaataggagcagccgcggcgggcggctagcgagagtggcgtgcaccccacggcgacgacgatggcgacgcaagctcccatgtcagctgatctctccggcggcggcggtagcggcgtcgggctagcggctgggctcgccgggcaagtggcggctgtgccgtcctgagagtgagaagacgaggtgggcgggcgcttccgacgcttcttctcgtaggcgatgccgcgcaccttggcctggctgtcacagacctcgcggaggtagaggcggacaacgcgggcgccgaacgggttggcctcggggtggcctccgtgctcgtcgaaggcggtgcggaggcggccgacgagcacgtcgaggctgccccacgcctggcggagcgggcacggccatggcgccggcgatgaggggtggctccggcggccacacgctcgtccaccgcggccaccgccacgctcaactctgccggccgctgtcctcgccatctaagagagaaaagagagagagagaaaagagagagatgaggagagagacaggagatagagctgacatgtgggcccaagggcatttttgacatttcacgcgatttctctctcctccctaaccggaaaatattattttaattggcgcggtgtccactggcaaattatcacgtttatggagtgttttccccaaaagtgagtttggccaatgtcctagggctaaaaccacacataacaagtgtcctgtagcaaaatttgccattaatataatgtataaaatatatttaatataggatttaataaaattaatttggtagatgttatttttttataaacttgatcaaacttaaaaaaaatgagttcaaaaaatcaaaacaacttacgttctactccctctatcccaaataagtgcagccacgagtttctgtgtccaattttaatcgtccatcttatttaattttttttttaaaaaaactaaaaaaacataagtcacgcataatgtactagtaatgttttataatctaataacaatagaaatattaatcataaa

SEQ ID NO: 16545 - DNA, 11625 bp, Oryza sativa
ttttttttacttacagaactgccagggtaatagagggagtagtcaccgaaatataaatgcttattttaagaatgacgactattttatttagcaaaaaaaaccccaagagaaacgggatgttcagatttaaaaagtcacgtagcaaattaaacaaatcaatttttttataactctccaactaacggaaatatttctcaatgttcattgacatgtggcccccaccaggccaccaacatctcctccgttacatttgttatggttgccgagtgatgtacaatagctctttgtaaatatcagacgccgtcacgttttccgctacttttctgtttccgccgcatgggattcgctcctgcgccgtcccctccacagcaaatgcacggacgccaaaagaaacagccgttccccaccaatgaaacgtgctgtactgagggacgggggactcacattcgctagtgtaatactccaatatcctggtgttccccagtgttctaaatgaacactccgtaacagaagttgttgcagagtgttcccctgaaacacccggtaatttacggagtgatagaagcacactacataaactttctgctcatacccgggagtgtctcccatcctggtagtgtatgtaaggctatgaaaagatgtacatgaagcattcttcatgtgatgatgcatgaagcgagcgtaatcgggctcaaatgatataaatgatttccgagtatgttttgccattgttttatttgtcttatttcagtttgtcgtttaaattggcagggtttttttttatcaatcgtaaaaattgtcttcacctgttgcaatcactaaatagaagcagggtgacaaaggagtaaggggtagcgactgacgtgacttttgaaaaacacagggatgataaggttaagtccttcaaagtcctaagacatgcaatgaaataactatttaacaaattttaatcaaaagtatatgtaaaaaaaaggtacatgccttacatcatgggacgaagggagtatagttttgtatgggtgcttgcctcgcagttgcgggagccaccagctagtttaatgaatatattaaaacgaataaaacagcctgttataatggcttctctaagttcatgtctttaaaccaacagttgagcataaataattactgtatggcctacattagattgtgagcagaataaaatgaaaaagggtattaactgcttttttttagacatataacatcgtttactctccgatacaaagattaccacttgacttatcagaaaagactttccaagtgttatttgtttaatttacttgttttattattaacgttattttaatatagccttttcatttacactatattttaatacacatgaaacattatgtaccacgaagaaagtataagtgctactccctccgagctgataatacttgtcgttttagataaagatgaggtcaaactttagaatctttgattataaattatttttaaaatatttatctttcaaatatggtgattacgtgcatagattagtcttaaaaagtattttaataaaattatatatttgttaatatttttatacatattataatagaaaataacggtcaaagttgtttttggagaccgtgctcttgtccaaacgacaagtgttatcaacctcagagagaacatttggattaaaagtcacggaatattcagtttgaaaaaggttggccagcaaaagtacggcacggctacaccaaaattttttgtgatcaaccccggaaacatcgattgtggctatcattgcgtaatcacggccgcaatagcggaataaccccggagtacagacgtgtcaggccttgaatgctgtcaagtgtgatcgaaaagttttttttgtcgccatgcataaagagatacaggtggtgaggcaacatccgtctacaatgcaacgataaacacccaaaggctcaaaacttattataaaccataacggttaatagctataaaaagttctgtatatagaatttatatatttttcttaggaacttaaaatgtaaggctgaaaaaaagcaacgttaaaaatatattaaaattaaaaattaaattttataatataaggttagactttggcttattccttttagaacaaaggatgaggctcccatctgccatctgccatttagccaaagtattttttttcactcgagtgtatatccacatgttccatacatgccacttaaaagttatcaaaaaatttaaaacaaattaatataataggtcaatatatgatatattattccacaaacatataaatttattaagttcgatttaaataattaaaaaaaactggctataaaatgttaaatttgaacttacatgcatgtggaatgatatattcatatatacatgttaatctatcgtacactactacaaactcgatttttcatagtatcaccctatttttttctctagtggttatacgtggaaaccaccagcgaaaatgaatcttcacttgcggccgggttaagagagccgctagcaaaaattatagatattttcgctggcggatcacttaaataaccgccagcaattttcgctagcgaatgcttaggagcactgcctaagaatttattttcgagatataaatcctacccacctctcttcgcctctcccacccaaccaactttctctgcctctcccacctccagcctccctcctctctctccgtctttctcgatattcctccggcctccctcctctctccaccgctgtcggctactgtcgctttcgtcgtcgccgctgcatctgtcctcgggaaggcgagagtgaggaggacggatccgcagccgtcggagggcggggagcgtggatcagctgccgccgggccgcggggcctcgtcgtcagtagcgtcgcagatctcgtcgtcacaaccgtcaccgctgggccacggggagcgcggagccgccgccgccgggccgcggggagcgcagagctgatgcagccaggccacggacagtggtgctcggctggtggtcggtcgacgacggcgacaatgagcggtagcggcttaaaatttctatggatttgtgtttggattttctgtcgatttgtgcaactatccaatccggttaatgtgtttaaagatgggaatggaaattgctgtgattttgaatggaaagtttttactgtaaattgttgatgtaaatttctgtggatctgtggattaaggagtggatttgggaataatttgaacgccacgttgatggagcggtgtcgctccgtcatttttttttagccttgtccagtattaagactggcggctgatatagtgtaccgcccgtgaaaattcagctaccgccaatcactggcctttagtcgctgacggcgctgttggacgccagcaaaaattcattttggccgccggcaaaaaacgatttttctagtagcgctaccaaatctttctacaaaattgatgaatttttagaactagctgggtagcacgcgcaattgcgcggctagcacccaaacaaaatcattttttttatgattttacttcaaatttattgaatagttatctcgttgtctttaaaactttgaaagattaaacattttcatccccgtgtttctaattatatagtttttaaaagtcacaccagttgctaccccttacttctgtcatctccttttttatttgcttgctcgatctaccattatttctattcattctccttggaacctttaaaaattggagcttatagtttttatagtttattgtcaaacgatgctactatgctcctctacggctcgtccgccgcctactcttcattgtcattgggattctaaaaatcaaacataactatcattggaattcattttttattttctagaagtctcgccaaccgtcggcggctctacaactttacacctatacaccccgctcgttgcttctcctttttattatcattgagattttaaaaaacgaatatatcaatggggtttatttctttactttctagaagtcccggcaaccgtcttacccatttgcttcacggcctgtctgtcgtcccctcttttaattgttattaggattatatttggtgttttattaacagcttttatatgttgtatcaaccgccacctttctactcctttctatgccttttacataatttatctcgtcatgtgttttagatgatcttttcttccaatattctttattttttatcaccaattttagctatttataaattgtattcctaattaaaatcttttttctttttctaatttcagaatttattttattgtttcaaattttaattaatatcgtattgtgttctttaaatatttttattttttattttcaattttatttgtttcaaaattgtattcctacttaaactctcttttactttttctaatttttaatattattttattttttattctaaattttaattaatctcgtattgggttcttaaatgtattcttctttcaatattacttattaatttcagttacttttaaattgtattcctacttgaactcttcttttgttttcttttttgctaatttcggattttatttttatttttattccggatattaattaatcttgtattgggctcttatatggactcttctttcattattccttatttttaattcctaatttcggttatttttaaattgtatgcttacttggactctccttttattttataatgtcagattttattttatttttaattctaaattttgattaatctcgtattgagttcttatatggactcttcttttccttttctccgattaatgtgggaatttctagccccacagcgaacgtggtgcctcctttcaaggctgttttaatagataatagatagatagatagatatgcatggaacaagtatatacccacgcgagtgaaaaaaaaaacacttccaactctttatttctgttcttgctcacagttttcatgctctcactgtcatagtgtcatgattccctcaagataataatacacttaagaaaatgatatcagtgccaatattaatttgaactagttagcaatatatttattttttctgcaccactcgagagcaatatgctgcagacgtgacctgccaagtaggcatcctcaaccacgaacactgtaatgatgataagaccatgcaatctgccgatacgcatcccgtgagtccgctcgcaactggcgaccgagcggagggatgtatcacgacgctggtcggatgtgcctgtgcgcgcaactgacaacgcaaatggaccggggtgaaaacctcggactactgatcggtgcattgcatctcgttcgacgttttattaataacctcagtcaacagtgcgcactctgcagtctcagaaactgaggagatgctttgtagtctgtagtctgtacacttggccgccttttgtctctggcaggggcgtgatccgaacacaagttgcattgcacctgtgtgcatcattacatcggtccatcccccttgcagcaacccaaccctgccggccggttctagggacggtatctggtaggcttgcccgcttcctcattctgcctatatatacgcgtccgcccgcgccggataagcaacaaaaacttcattttagttcagggtatcacggtatcattacctaaacttcattttagtccatggcgttcatgagttcagctagcgaagaggaatccgctggtctcaaggcccccacggtaatctcccctcctgagtcctccaatatacacgctacgtgcaatcgtgcacagcacagtgcagaccacacacgtacgcctgaaatggaattaactgtttaattatcgactaatctttgaaactcacgcacgcctgaaatggcatgtactaacgaatgggccaacaatctactagtcttgcaactcattctttgaaactcactcacgtacgtcgtcatttcttcgtctaatctttgaaactcactcacgtcgtcatttcttcgtctatggattgtcaggatgcgcgcgtgattcgtcagcgctatgaaggcgacgggccgatactctcggacgacgcgctactgccagctgatccaggcgcggccgccggcgcagcggcggaacaacagcagcagcaggatgaggcacggagcgtgcggtgcgagtgctgcggggtggcggaggactgcaccccgacgtacatcggccgcgtgcgggagcggttcgacggcaggtgggtgtgcggcatatgcgcggaggcggtgagcgagctgcggaggcgcgacccggcgctggcggtgcgcgaggccgtggcgtcccacgcggcgctgtgcgccgagttcaacgccaccgtgcgcgtcaacccggcgctctgcctcgtgcgcggcatgcgcgacatcgtcaggatcagctgccgcggccggagcggtgactccgcctcgccgtctgcagctcccggcggcggcgccggcgccaggatcggcaggacacgaagttgcgcgctgccgtacgtttgatcgcgtcgcaggttgccacgtaagcgatacgtgcgtgacagaccgacgacagccagtatcgcgccagatgttctctgatgaatgatgctactaacagtctaattaacacgaagtacagtctactgatcgacgtgaacttaagttgtgaattgtgatagcctatatatatatcgggattagaccattgaaccgctttcaggttaactcaaaagtatctctaattaatattgtaaggttactggcggtctggcggatcgtgaaatcgtgatatatatcgacaaaagacatcttgatagctcaagtgcgtgtcaccaatgtaataattagtttgtcaacatctcgatcgatcggtatgtcagataacaataattttgtagattctcgttaaccatagaatgatgtttagtctttgaggacgtactaggtattaaaagataccaaacatgatccattaatctctgaaaatcggatgagctaaggaaagtcggtaccagtaagcatcccttcccacctgtaccactatctttttttgttcaagggggaaaagactactttctttagtctcttgaccgatcgatagcagctccggttgcgtgcaacaaccaccccacaatgagatctgacagccggctagctgtcgccgtcggggcaatagattcgggcgagggcagcagtggaaggcctcctcgagcctgtagacgaattggaaacaagcacgacgaggaggaggccacgatgataagctcaacgcgtcggatgccacggccttatggacggcggcgaactcggaggaggtgggctgatgggggccggaatccattcctaatacttcccgacctcctcgaagactgtgggaacaggcggcgactgcgttcgggtcatgatggcgcccttcctagttccctcctgatggcgcccttcctagttccctcctgatggtgccattgcttcctccctcttttccagtctattcttggcaatgtcgctcctcgttcatcctcttcgatccgctctcgctgccaccgcctcctccctactcccaacgacgttgtctcccctttgctctctcactcgggcgcgctgcctccccttcacccccaccaccaaggccatcatgcagtagcaaccgcggattcaggacctacctagacacttccaatggcggccggggttgtggcagctgtcgaagaggagaaagggatgcatcctggcatccattagatattttttgcagctgtctatgacagacaggtccactttttgtttacttcccatgacagacagggcccacttgtcggatccatcttcctcgtttcctcttcttcgtcagctgatctaccaagctacccagggccaggcctaggccaatgccataggtgggaaatcctttcatctcttgcaccacgcacatccttatccaactattttttattctctttccactcttcctaatctcatcatctatcaatcccaaagccataatctcgagcgttcggcgagttccatagtgccactgtctgtgtctcttctctaaccctataacccacctgcacaggatagcactctagtgcaccgcctcaccctacatatatccatgcatgattggaagtagagtatgcaaaaaagtataaaagcatggcaacttcgcttggttgagcaattggactacaggccggagaaacgaaacgaactgcaaggaagagcggcggcatggtgacctcatatctgtctccaccacaatgagaggagggaggagacaagacaacaaatggtgacgcctacgacgaatggaatcaaccgagaaaggagcgttgtgacctcgatgcaacggacgaatggatgatacttcgatttccaatcacactcctaacagattgacggccatatgtgaatggtatttggtagtacctcctcaagaatgataaaaatgttcttattaatacatgctatatctataatagtattctaggtagttttttttcctaatcaaactagtatgattttgtaagaagatactacctagctgtttattaagattttggagtctatatatatcacacagtttttttaagtttcaacctttgaacaaggatccaatgtatatgagcaactactactacttttgggcctcaatttgaccggaccaacccaatagtgctcacatgggctgcaaagaaaaaaatcataacggaccatatttagttttttttttatcatcttgtagttacgaccataactatagcgtaattgcactaaggttacaaccgtaactagtaactagaatgcagtattttggctatgtaagcctgtaaccaacgttgttggcttgctcagttggtgaagtaatatgtacagtattattgtagctcgatctcaatgcaatcctacaatcaagaaatcgaaaatttcgtagcacgaatctcaacacaatcctatgataagaaatcgatatgtttctaataaataatcttgcggcaggtttatagcgaaaccgtttggagaaagttgtagcatgaactcaacacaatcctacaataaggaaatctacaaatttctaacaaaaagaaatttgcaatagatttatagcaaaactgttttgtaattggcagtcatttgacatgcaacctctaaaatatttgcctataacattttttaaggaaaggtcgtcgaaataaatttcattatctattatatactaaaagttcattaaacttcgtacaaacactcttaagctgccatgtggcatcctataatcaatcgctcttgagccaccacatgccactctaataaaacagaaaaaaatttgaccatcaattttcatttaaattggtggacccactaattttgatcggtagatttatctttgcatgaaaacataatctccgtccgtccaacgtaccaatgtacgtatgatccctccgcggcttacgtactgacccccgtttccttttttttcttttttttcatccccataaaaattgaaataaaaaaaattatgggcctaaaaagcccatcaatctactagatatagctagctcttcctctatcctctcctaataaatagtccattaaacatcatatataaatttctaaccatccatatagcactcttaaattagagaaaatctaaaaagaaataaaacatttgaccatcaatttactttattttaggttattagatatatctttttcttaagaaaagcatcccaaacctccctcgtgctcataaatgtttctaaaccactccgtgacacttctaaattagaaaaaaccataaaagtttaagaacaaaccatccaatcattgatttcaccttaaatcgacgaacatatcatataggttgttattagacttatattttaagaaaaactaccaaacctcctatattttaagaaaaactaccaaacctcctttcctccctccacgcccctacaatgttaaagacttaaagtatattaaacatcctataaatatttctaagccactacgggtttttcttaagttaaaaaaatcatacaaaattataagaaaaaacaaaacatccgattgttggtttcgacttaaacatccaacacattattttagatcattaaataaaatatttttttaaaagaaaaaagcattccaccctccctgtccccatgcggtgtgcgtcgttcgaatttctcttatttttctatttatgacaagagaaaagataattgaaattaaaattatctttatgggaaaaaccacaaatggacctccacatatcaggtctagccagttgtcccactgccccttttcttctctttctcctcttgctagcacttataggaacaatataaataaaataataataaccttttaagtcatacaacttatgatatgtttaaactattatatttttttagtgaaatcaatacttcaatatctatattgactatatttaaatgctaacaaaaaaatatatattctggacccacatccattctgaggcctccactaaataaaaaaatattaaaattcgttactaaaaatcaaaatatcccatcttaatttttaataaagccggtagacccattacttatatcccattagacaactaacaactttctatcaacttaattaatttctctcaacatgtatatgggactatttaccaatacaatttcatttggatgcttttatcaataaatgatcgttttaggagaccacattatatatatgatttatgaagtcactaataaattagagaaaaatctttgaatgatatcaatttttatgtcataatgcgtaccccatctagtgttaatttgttatagacaacattttaaagattaaaacgtgctcagttgaacatcataatggaatcttagcagtgaaacaaccataatgtgtccttaccaatatagtgagtcaattccatatggaaattaaagaccatgttcatttatttctttttggtaaaacttgctatgctacatcgtaaattcttaacttttagcgtagaatagtctagcaatgtgtatttattattgttaacagcggaatttgaattatatgacctctattttaatatttcttactcatttgaagagagataatttagaatatatgacttttacccatgttaggttgtaggctcaacccacatatatttttaacccaaattgaagagatcaaatcatttcaaagatgcttcatagagtggaattctccaaaattttaaaaaatggctagaaaaaagaattcaaaatttatgtagttttttaaaaataatcgttgggtttaaaacccattctaaatataaatattcaaatattttagtaggactaatagaatgaccatatctaaaatttcaaatagaatgtaacagaaaaattggactttttggcagggataagatatccccgtggggagtcgaaatactcaaaattttctcatagaaactacatctattgtttcgacataatattttcttataaattgaaaactatacagtttcaagtaattttactttagaatttatgtgctgcaagggtaattagaagaaaaccataaccaatgtttctagcacattaaataagttcaattataatttggatatggtaaaagaatattttaatataaagtcacccatacatgaacattcgtaattatattaaaga

SEQ ID NO: 16546 - DNA, 12089 bp, Oryza sativa
aagtcagctgagatgcatggccggcgcgtacacacacagtaatcgatacacgagactgcgagatcgaggtcgaaagattttttttttttcaagatttcttacgtagattgtgcagacggtgccggcggagtctccctcgatgagcttgatctcgacgtcgatctggacgtagaggtacttctccctggagcggaagcaggagccctgcgactggtcgagggagagcgccagcgcctcggagtcgccatccatgaagaagtaggtgcggctcgcgccccagatgagctcgatctcatcgaagatgcccgccgtgctccggtccacggccgcgaggaaggctaggcacaggatcagcaagctgcatagctttgaggagctagaagcaagcggcattggcgccatcgatgcctgcctgcttctagctagctagccctgcagctagccgggctaggatcttagtttgaagtgtgtggctgcttgttgtttccacggtagaagggtcagcggtttgtgtgtatatatagcagaggtaatggaatgagattggagacgaaggtggtgaggaaaatgagggcggcaaggcaagtgaggaatcgaatgtcaggctggccgagacgaggggaaaccaagtctacccttggaatccaatccctcgtcctgttagctagtgctagtacactggaactgtgcacaggtgatcattggtgttagtctccgtttctacgtatataagcattttacaagtgcaggtcgtctcatcatgcgagtttgatcgatctgtgcacatggaagcacgatagattatactgaggttgaggaggatcagggggtacctagctagatggagaactgaactaagatttgtttcttatgtcaaaggtagggaagccttagatctcggtaaactgttatcttattatgctgccgaccttgctacagctatatacacgtacagtacacaacttaaaattcagatttgcttcttgtcaaacaaatttgagggtcatagtttagggcttcgctatacatgccaatatgccatactagtactgcaccgagctgtatatctcactatgctacgttaattgatctctggaactgaaagagtactgtttgacttccctgatggatctctcactgcacggcgagtaaggttggacgaagagtgactcgcaaagattcaagcagtgctcctcgcacgcaagcccaagcttagtttctctcctactgggcatcgggaaaaatgcagatcacaccgcttaaaaaacacgcttacaggagcagttctatatcaggaatgcgttttcgcaagaacatcaaggcatctttcggctcggttggttggttctaaaatatccctccgcggcttagagaagcgcgcgacacggtttccatcggccaatcacaaactcatatcaacggagcgcgcgcgagatatttaccgtctcggtcggagggacgaggtggtgaccttctcggttttctcacgcagggccccgcgcctcgcggttcgcatgtgcgaagtgcgaacgagcaggagcagcctcccggcagcgttgcatcgcagccaagctagctagaaacctagaagcaggcagccggctcgttcagttccagccttccaggtaacatgcatggggtcagcaccaaggaatagcagacgtgcgctaatttactagccagggcatacatataatctttcacgatgtggtcggttctaattgataaattaaattagtagcgagcccagcgacatgcattggtacggttctgacgttctgtcattagatcggtgtttctcgctcttccattttacggcgccagtaacaagtcttcagtggaaacatacttgaggtaggtagctagcaccatccaacaaaaaactcaatggaaaaagaaaaaggaagaaggaaatctgcttctgttttgaagctggacgaaacgtgtgtccctgactttttttgtactacgagtttattcaagttgacccgatcgactatccattgcctggccggtagtactctctactactactagctagacatacgtacgcgtaggcgtagacctgtaaaacgaagcaacttgtggagatggttaaaggtgacttgacaaaccaaaagaaacaagatacaagtgggagtatatagtagaggcgtgagcccccttcttatgcgtttcgtttggatcaggcttaatttgcagtggagatagagaacgtagatagaagtatacgtgttgtaatactgaaacttcactctttgtacatatgtactgacgtatgatcagagttcagattttcgaaatgtttttttctattttacttgcaactgatttttagactcctatatttttagactcctatctttcactattttatctgtatgatcttaggttcgtgttcttgtatccaacttacagatacactcagttatattgcaattacacttaattatagtgcactaaaattatatttttagaatagttttctttttctagatttatgatttttgacgtgattgtctttttttggttatttcatttaaaacggactatctccattggataaaaattctgcaagatttgaagttataaatctatcacaactaggccgtgtttagttcccctctaccaacttcaaacttccaactttccatcacatcaaaaacttttctacacacataaacttccaaacttttctttcaaactttcaactttttccaccaactaaacacaaccctagttagtcccttattttttttcccacgtaggacgaaaccgtttccgagactaccgaaggagtccatttgcgatagtgggaggagattcaactagtggtaagacatgagggttacaaaatagacttattcccaatccggttgatccacaggcaaaacgacgccatcaggcccaaaactggggccttctccggcccgattagctaggctggccgtagtgctgtaagtaggcctattaagccaggcccagttactcctactcgcctcgacgccgcctgctcgcttcggcgcggcggcgccccacctcccctcctccgacacgacggcgcggcgcccttctgcggtcgacgcctccgtcctccaccctccctctcctccatcttcccgccatcctcaactacaagacgacactgcggtggcgatcgcatcgatccctctacctcatcacgacccggcgggggcgaccgagcggcggcggcggcagcggcgacggcggccggatcatgggactaggaagggaggtgtggggggtggttccgccccggcgaccgaggtcgaagcggcgctgttctgagcaggtgacccaagaacgtacgcccattttcttgaactcggtcaaaagaaaggtgccgattatattggttaaatctagccttgatttctttaattcgaactccgttgtggcacgcaagatgtgtggtctgaatgtgtatgtaatgcggctcagttacttgttttgtttggacgatgcttaatgagcttaaggattacgctagctgtttactggtaataattaccttgccaggttcttttagtatattttaatttcgctttcatgcatataggtcattaactgcgcaaataattaggttcatggatgatacctctgtggacgcaagtagttcaaggacaatggacatataagctctgggactgggagttggagccattgtctaagtgatgcttttagaagatctactcaagcagatatatggctatcacgtcacgtgcagagattcttccaaatgtgctaatgaattagcatttcacttcatagaagcactgacaaagaatcttcaactcttccacaagatagactggtacaacatggatgtatttactttcaagaagtgcaaattactgaatgttaacagttcatatctagtatataatgcatgctttgacataacagggataatatggtgacatgataaaattgattaatttcaagctgatgcttttccagtgtgctttcatggatcatgctctacttcaaataatggaacgctttgctcaagccagtccaaataagcaaaacccttcttcgttgtttcacttgtacatatagctctttgctatcttgcaaaaggatttctagatcctgatattaaatctacatggcagtccaattcatgatttgcatattccaattcatgccatgaatatggttcttgtatcaatcttgtagtgcggtgtatttgcaactttcaagaagtcttatcctccttaaacatgtcctgggtactttttgacagcctaaactctatttgctgggttattctagataagtatttgttttttttggtactttctaggttccatagttccacccatgcaacaaattgaatgctatagctgtcattgtggggctgtgggcacctaaacttaatttctgatttactgtcatcccatgacccctctatcaacctccagaatatgttactgtggcctttgctacttaagtgcattttataatttctaaattgaatgtctcaggaaaatgtctggaacatgccaggtgttatggttttcattgtgcaacacataattggtttaatagtttctaaatatgattgtgcacttaaccatctgttgattcaacttgccagcataaatagttccaactgaaacgcagtttatgctcaaaacgaatgaccaaacatggggtgaattcttttgtcgaactatcctatcttggtctacaggtaccaaatccttaccattgctcatgtgatatgcccccatcagcatacatttaaaccagcatgatgtttaattaattaatcactattgttattgttgatgaatctattgatgatgtgcaggctgtttataactcaaaccggtgcgctaaacttgtgaagtaaaactgcttggactactaacagctaaagtttcaaaggcatcctgcaaaaggacctattggtctgaactttgaagggtatttttcaaacatttttgttcgtttgttcacaacttcacatgaatatacccaagttctttttgcatgtagtatttggatgttacaagcatgtccacattttcggtgctgcaaacaaccagacagggtccctgtggttgctggtgttgtacagaattgctgaacacatcatttactttgctggctgtcaatctgtcatgtatttggatatacacccgtatatctagataaagttagaaattacttggaagaaagcactaacttagtactcgtatatgccatttgtgacagccttttttttctttcacgggaaacggggactttgtatttttattattatactcctgttctgtaccgtgtacagtgcattgtataagaggacttttaaatacagccgattcggctgtgctgtgctccttaaataattcattaattaattcattgttgtattcgctggtactactagctgccatcttttgaattggcatcttgtacactgctagtactccactactattgcctgttgcttgtaaccattgcctaccacacatacatcttctttacatctgtgtcttcttcaacaaccagacctccattactccacaaagctgctttctccccctccttccctaggtatcctcaatggaagctgcttcctagatccagccccaatccacccttccttccaagtccccatatccacaaatcaacacaccatgtcttcttgttcttcctcctctccccagaaagccatagatgctagttatcaactatcaactccatggatcttgttcttcccagcttcaaagcccctccaacaccaaagttcagatctgtcctccttcccttcacctagctctatattagaagcttgtgagggctaagatggccatggaggacaatgaatcaggggcaagatgaactctaagatggctggccatggatgaagattgaagctgctattggtctatgaatcaaggtaaagagaatcccttcatcttaagtagagatatgcaccatgttgctggctttagtttcaaaagaagttcaccgagggaggtccgtttatgcttgtccatcttctgctttggattggaagcgagaacggcgaattacaaaagaatttgcagcaaaaatctctcgatatctttgcctgcgccgcagccaccgaaatctcttccttgccgggccggcccagctgagctcgatccgccccccccccccccccccacaatatcttccagagacatccattccccggctcgatgagattctacgtcgcatacataaaccacagtctaaaccctaagtgaacccctcgtcccattcgactcgccacgcccccgcctccgccgccgcctccgcctcgtcttcctccgcgtcggcgatggcgaggagaggtgactcttgtctcttgccgccgtgggttcgccgcggttgagttgtatctagcctaacgtgcgcttcgttttgcaggggatgatgaactggatcagacgtatcatcttctgtatcgcccgcgcgcgatctggggccgccgtccccgccccaacggtggccgacgccgccctcgccccatccaagggttgttccgcgtgagccatccggcggtgaaccctacagccgagcccatcaggcggcaggtacgcctctccccttcccttacttcccctctctcccctcacttatttccccgatgggatgcaatcctatgcgaatcctgacctgtgatctgtctgattatgctgttctcttcaaatggtatgcccttgtcctgaaaatgctgaaaagtacaccatcacttatgttttgaaattcaattttgctattaaggaactgttgatatggtaatcttcacaccaacttgaaattatcatccattagcgtatttctgaacttagctgtttattaagggaactgttgatgtcgtcatcttcagaccaacttgaaattatcatccattagcgtagttctagaatttgctgtttaaaggaacttttcggaccaacttgaaattatcatcgattagcatgaaatttgagaagctaatgttgcttgtgcctgaaaatggagaaacaacttgaatgcctgaaacttactctaatttgtttgcttagctgtaaacatggagaatctaatatcgcgttgcctgaaaatgcttattagggccagttcttttttttgttgtacctactagattatcgtgggcattacagctggtatatccacgaccttctcctccttaatctttagttctcttctgaaattgcctgaaagcacaaaattactgatgtaagttctgaatgttgctgtggcagggatgcattgtatgctcattgtgtatcttgattttttttttatttatcttcttgtaatgaagagtgagccttttatcattgcatctttgcagttcctggagcagctggattaccctttaccaactatcactggttctgctctgttggatgagacaaacctgattcttcatgatttttacaagaatatatctgacatcaggtctcagatctacaaccagcaaggtctgtgacttgcaaagatgaatgttgtcaaggaacaagctctatgggaagaagctgaagagctcgtatgcatttccaagaagatcttcgattccactaatcttgataagaagctgctttaccccttccctagttggtttaactcaaggtatgatgttatgatgttgttttgtgtttttttgttgttttgaatttggttagcattgattaacaggggagctgatgattgtttttgttttttctagggagactaggaagaagaattatctagatcttacatcttgggttagtttgcttgagacgtatgctaatgagaggagtgctagccctgaagctgatggtgaggcatatgatgtgggtcttcttgatgacaagactggagacgccagtgctgatcttgactatgaaaagagtgcctgctctggagagacaagtgatgctgcctttgatgaagagagtgctagccctggagacgctaccaaagaggctgatattgatgaaccgattgctatcctggggacgccaatggtggcaagatctgtagagtggaggcctatggcttgagttcttcagtgaaggaaaagtacttggataaatgcttcctaacgttgtcatatattcctgatattgtcatgtgtcatctaggtatcatctaggaaagtacttggataaatgcttcctaacgttgtcatatattcctgatattgtcatgtctcatctaggagaagttcagaagcccctgaggcaatctaacatcggctacttatgccgtgataaaagactttgcatggaagtattatctatttcagaatcttgtatgcaatcaaacaactactacttattatggtcttatggataccttgcttgcttatcttatctacagctacggtcattgtttcgttatccaaaaatgtttacagctgaagccgcttgaatggccatgctgctactgcgctgtgaacgtggcgtggcacatgttttgtaaaacatgaccatatggagtgggctatccaggtttgcaaaaccaccggtaaccgtgctcttaccgcggggtactgtggtaaccttcttaaattcaaataaatttaaaaagtaatttgaaattttgataaattttacatagttttgtacgttttgccgcagctaccgtgtagtaaccgtgggaaaccctggtgctgcccccgctgcaccgtacattcccgttcgtcctcaccgtcgcaatttcttcttcgcagcctcagccacctcggtttggtgagcgcggccgtctgttaatagccccccgcaggaaggacatcgtgttagtgcactcttcattcaggattggggaaataaggtagaaagatgaatgtgcaattctggcactttggggatctgtcacaggactaaaattgaatccaaattaagtagggtgttaatcgtattggacttggcgtccggaagatgtttggctgtgttctttggacaattttcgtaacatcactttctcgattttctatgcacgtttttgcaaactgttaaacgttgtgttttttttaaaaaatatttctatagaaaagttgctttaaaaaatatattatctattttttatttttataatacttaattaatcatacgctaataaggtattttgcttttcacgtggaaggaatgagttcccaacataaggaattaggtattgttgttggtggtgaactctggtagttgataatggtatttagactggactgctttcgttagttgaaaaaaaatgcagaaaagcattcccttggtttagcagccccatcttctcgattatacttatactctctccgtccaaaaaaaaaaactcaatttagaaggggataactaatcaaccaaaatttgaattttcaatctagaatttggagttgattttgacgtttttgtttgtagtttatttctcagcatttgcttttatatcgctaagaacacgtattttatttataaattattttcgtttgtaaatatgccgtttggcttattcgggtttcttctgtactttgttaaatcctttagtacttcgatggtccaggagtgtatggttcttttagcttctagaaagttttagtactgcatgaagtgtttcaaggtgtcagatttctgttactatattccaacagctaacaatcgtgttaaccttccacaatgaggatggagaatttataaatccatgatataagttaagtttttttagtgtacttattttcaaattttaatgcttgagaaaattcaccttttgtcgttgaaatgatttatgagttacttcctccgttttatattataagtcgctttgaattttttcttaatcaaacttaaaaatgatcaaatttgtaaaaaaatatagcaacatttttaacacaaaataaatatattattaaaatatattcaatgttacatttaattgaactaatttagtgttatagatgtgctttaatcattcaatgtgtatatatatatatatatagcttcagttataactgttggatgcactttccaagttcaagtaaattgtcaatgaaaggcttaaatggatgtatagaactcaatgcatgtgaaagggcatggaataattttcgcgtctcaaatgaataacagacaaacgatcatcaaatgctcatcatcataaccaagcagccctctatactgaaatttaagtgaggtgcagtcattatttataaagccaactgtaaggtgcatatagtaatctgttcttttcccacgtaatgggtggtttatgtttcttgatgttctctgtaaattttgctgctttggctgtaaatgttctttgtcataattcacatcatgtagtaatctgggtccagtggatccactgtctgtggttaggcttagtcaatctcttggggccaagatcactcatacccattttactttgaatgaatttggtggtttttgaggcagtttgtcggtgtatttgtattgtaaactgagtggaaatcagcagtgtttcatctgcggatcaattacaaagttttcaaggaaaattgatgttatggtctgccaagtataaaaaaaacatgtggtatctcttactatcgaaatccgtgcaagttatcgagcgattagcgatgccacgtggcacagcgtggttcgtgcgtgcgctccaaaacgcgaaaagaactaaaatataaaagacaatcttacgttggagtataatgaaaaagtgcaaagccacctgatttctccgaaagggccacgactcttcgtcttccttgattgactcttcttcttctctgtatatatattcattctccatcattcctctttcctctcgtcattgtctcacattccttcttgccgttccaccatccacattcaccggcaccaaacaccaccatcaacatccaccggcaatacatctgatccaccgagggataaagaagcaacgacctccagccggtacctctgcggcaagcacatcctgcgccgtgcgcgacaacacaacgacgaggaggaaccttcgaggcggtggcctccggccggtagctctgcggcgagcaggtccggcgacaccaggacgaggttagtgaactgaatcacatgtattagtgaacacgaggacgaggtcaggtacacgatcgcctgcattaccttgcacgatcacgaaagcccccaaattagcccagatccagtagtattttgcattttgatcgattgatttataccgaatcaaagaacatcaacaccagcctactgcaacttgccctgatcctgatgatgtgcacgatggacaacaagatatactatatctgttacttctctgacactatataggagtattagactatttgttataatataagtcactgggaacggaagcaatcggaaagaaatcttacgtccagccacgtcttattctgtcacctaaatctccaatgacaacttagtagagaggacatatggatgtgttccttttgatttctgtttgatctttgctaacaagtcaagctttcgtgtactcctaataaattaactcatagtatattacgatgaccaccattccaaactaactgttttcaattaaactttttaaaagttattcaaaatacattgatttatatagtggtactatacaatgtagctgtagcctccacttctgatccaaacaaacccttaattgacaaacctaggtacttacatgtaattatactaacttcaatcccgtaaatcaattagtcacaaagtctaatcttttcctctaaataatttgcagcaagttacagcaaattttactttctatttagaaaagctatagcacaaccaatcagctgtgaataacatttcgtgtagtatggatatttaccagaaaaaaaaacattgtctattctttttagtatttttcatcattgtacattgatcatctgcaatgatattagtaaatgtttattttacaggggataaaagaataaggaaaagaaaaggagataaacaggagcaagacactgaagctaggaagtacaaaaaggtaaaaaacaataacgagctggaaaattttatatatatatgtgtatatatatatatatatgtgtatatatatatatatatgtgtgtgtc

SEQ ID NO: 16547 - DNA, 48512 bp, Oryza sativa
atggtggctttttcttactgaatattttattttggttgttaattctagtttgtaacattttcgacttggttgaaggaacataaagcactggtaattccctccactgtgcctttttttatcccgctgctacatgcgatgggaacatcttctcttcaattctgttattgctctaaatgagcatatttttttttattgaaaccatcaacaagagatcaatcttaaatgtaacgtttgaacctttagttggaaatacaggtttgtctagatttaactattcttttctcaggtcatacaattttgcaaagattcaaatataaagtatacaattcataatcatcataattacgatgcatatttattataaatggcttttatacgggaattcaaagtcatgcaatacacgactaagtggctagtggtaatgtatgacaatttatttagtgttatgataatattcttactcctacttatcaatgtaataaatatgttagcgctttgcctgtacaattatatataccgtcaatataattttaagctaattattataaacaataagtaaacgagagagattacagtcgcgccttcgcgcgacttaataaacttgtatagatgatctctggtgcatggtgggaggggtagagagggttaagctgtttatcgtgtcagccatgtgctgggcactgtggttgaaaagtgattaccttgttctgttttcctgtagctgtactctggacaactttgtttctctgggtaggtgtgaacttgatgtgaaattctaggggtttaccgagttgatgaagatttcaatagctaaattatgtggcttcatcattttctaaaaaaaaaagttatgtggcttcaaaatttaataattcataactgattctcttgtatagatatagaaaatcagaacagagcatgatacctacattatgtctgctagtaattgcctttgacctggttagcaatgaatgcgacgctaaccttgtttcgtacactgagataaacatcattggatacttgcagaattttaacatttactattctgaaaaggcttcacttaattccaaatgaggccttgttctttatagaactatctgtttacttctgtgtttgtaccactaagtctgcatcgaaattctacataataatagtttctaatgtgtgggaatttatctcattgtaaaattagatttaattttcagctagagttaaaagaacttttttttttgactcctctgtatgattcacaacattccataatcgcagagtgaatatttgcttatagtatgatcagcccctagataaagagagtaaagaactatgcacacggtaagtcggtaatagtaccatctagcaatcctataaaccaaaaccaaataaaaaaggttacttgaacactcgatcactagatgttttgttattagacaatatatataagctcccgagcagctcgggagcataggtattctctaagccgggaaaatttattcatcggttattaaagtttcttagttcctccggtatgcttcttggtgacccctggtcgacccctcctccttcccggcgccggagctcgggatcgagtggctgcttggtcctcgtcgtcggtgatccagtactcggcatagcctttctcattgtactccttgcgaatcctctcctgctcctccaggatgggtttcgcgccctcgtcatgtatcttgttctttctagcccagtagtcgtccagctgatcgacgggcacggggaaacaagccagtagctccttggagaagttcttgtatccaggtggcatggtgaggggcctgtgcttgtacgacatgattctgtccacctcgtgctgtggcatcctcaccttcttcatcttcttctccttttgcttcttcttcgtctcttctccggccgccgctgccgacgccttcttttctccagccgtctccgtcgctgccggcgagattacgcccttctcttcctcttctgcaaccgccttctccttcgattcctccgaggaactcgccatggtccgccgcgatgtcacggtagtaactgcaatttgcaattggtagtgttggttttagattggggggagaagcctgccgggtgcaaggattttatatcgctataagcagatcgatcgacccggttcgccatcggaatcggcgagagaacaacggcaccgaatcgaagtcccattgccatgaatagacctcttaccaaccgacaaaagaatcaaccaccaacaatcaatcgtatcagggcaagagtaggagaaggaaagtacctcgagtcagtcacggatgagcgacggcggtggtgggggaggcgccgccggagaaccaaggtaggagacgggagaattttttttatttataattttttttattaaaagttttacaaaaataatttttcattttgaaaattgacggaagtagtcgcctaccgccctctgggaaaaatcgccctctcgggcgacggccgtcaacgaaatttgcaggcggccctcttgccgccctccgctagggcgagtttatactgtgcggggggccgcctgcaaatgggcggcgaggggggcatggaattttgcaggcggcccccttgccgctctccgctagggcgattttgtactgtgggggggccgcctgcaaatgggcggcgagggggcatggaattttgcaggcggcccccttgccgccctgggggagggcgattttatactgtgctctatatttttgtataaatatcaatagttatcaaatttttttatattgaaaactatacaagattaaaatctccaagactggtaaaatacaattttattattttttagggcatatttggattgttaccgtacaaatattttgttagtgccaaaatataagcaagttttggcactaccaaatatttggtaaggtaaaattgcatttgatcatatttggtttgctgccaaaatgtaaaattatagtgaagaatgttctacataatctcaaatctagattacgtattaccaatgaataggcttccattttcgtgtgtggtgtgctagtgggaaagaagatatgaagaggttgccttcagattgtcaattatatagcgtcgttttcactgcaatatatgtgaactcaatgagatacattattcattagatgtgacaagacgatcacgcgtgggcgtgattcactttatgtcaacaggcagcgccgaaagttgatagtgatagctcgagctgccgcttttcatgtgtgctgttgtggactgtgcgcgctactggatctgacactaccgtgaagcgccgaaagtgtgttgtcgtgagcataagttgttctagcaccatatgaatgaaaagaactatgtagacgagacaaacacaagtagtactgcagtagtaatagcaaaagtagtactgctttacaagtttgtaagccaaaagaaacggtcacataaggactgaagaggtagaacactactgacgaggcctcttacccctgtccctcctaccctgcgccctaatgtgcccctgggagtacgtgagtcggtccgggggtacggcacggccaacccgtcctgcctgtacaggtgtgacctctggctgctcctgagtgtgcgcctctggagctcctccaagctgagaggagcctagtacgtcgtggtggtgtgcaccgtgcaagtcgtcgtcgtagaactggctagtaggaccagtcctaccggcgtgagacgaagaggctccagtaccgaagatcccggctgcaaatcctgctggacaaggaccatcagtttcgtacaagtatttaacagtagtaataaaaagtaaagtaccgtgtgggcgagggatcgacgctccgtgagaggaagagctggcgaacgcgcccgaagaggtggcgaacgcccctgcggagctcgcggaagcgccggtcgtgcctgcgaacgcgctcgaaggcagacgaggtcctgcgatgaggaaacgtgcagttaaaacatggtgacatattcgtgcaaaagccaaaacaaaaatgaactaatatctgggctgaactgtaccgtgcgaaaccggtgctgtaggtcgcactgctccgaagctaggggcgctcgaaggcaaacgaggtcctacgaggatggaacatcaagttacgacggggtgatgttttcgtagaaaaacagaaacaaaacttaagaaacctctgggctgagcagtaccgtgcgaaacaggtgccgtaggtcgaggtcctgctccgacggaaggcgcgcgaggccgtggttgtaccggaccagctggaggtacgacgtccacggcgctgcgacaggagaagacgcgcatgaccgcacgcatcttctcctgcatccggtcgaaggtcaccctctgctcaacgtcagtcaagtgcaaacctctgttcaacctcacttggactgcggtgatatcggcactgatatcccgtgcggcatcagcctatgcaagatggaaataaaaaattcagtagttgtcctatattatgcaagataaatgaaataattgtaagaagtaatacaaattggacgtaccgccacgaagtagtctcggtcacggtgcgtgggatatgcgtccgtgacagcggcaacgtgcggctctggggcgtctggagtgaaggtcacacgcgcacgagtgcgaggaaggtaccagcgaaggtagtcacggtagttctcctccgtgtgtgggaagagctcgttgatcacctcctctgtagctaacacccagtcgtcaacgtactgctgtacacgtggagcccaaagtgcgcctgctagctgtccccgtcgagtcaacctgtgaagagaggtaaattatatggctcgatgaagtaattatcataaaaatttagaaatgaacaatccgaactcacgagtggtcggcagggaggacggtcggctgcacgttgcccggaaacacctgcctaagtccgaactgtctcatcacacgctgcgggcagtgaggctcaacgaaaatgtcgaacaccatcggcaggatggtgagccagtaagcctggtcgcgtgtgcacaaggacgaaagtcctagcggtgctctcgcagcgacggcctcttctgtgtacggctcccagatgacgtcgctcggctggagacggtcaaactcgaacacgaagtccgggtaaccacgtctcacctggacgtgagcgtaacgatgctgcaataaacatgatcggaattagacatgttatgtgaagaaaaaaaaagaagacgactgataaacttataacgcagcgaagttgcactaaccccacgtcgacaccagtaagtccccatcgtgggaccgtcctctggccactgcgcgctgcgaccaaccccgtagggtgcgctgtccaccactggtcgacctatggcaaacctctcggctgcccaaagctgaagcaacatagggcagccagcgatgatcgctcccgcgtcagtattcgtgcacgcctcacagagggcacggtacgtggctgctagcacggcagaaccccagctccactgcggcacgtcctgtggctgagcatccgcgatggaccgtgcgtagtggaccagccagaagtccacagcgtgcccgtgggtgctagtgaacatcacccacccgaacaaccacaacaggtacgcctcaagggagcgtcggaccgagtaatcatcagcgtcagggtgcagaaggtccgcctacaattaagaatgaaatgttagtacaaaacactcatccggtcgcaaataagcatgtatgataataacaacttatttacttacagtgaactggagcaaccaagccttgctaggcccgactgtagagtacggaggaagggtgttggccggtcctaggtgtggaaggcgcatcacctgctcgaagcgcgcagtgatatcctccttccacccaaaaacaccgtccacgggaccaactggtgctcccgccagcggtagcccgagcaggtacgacacgtcctgcagtgtcggagccatctccccacagggaaggtggaacgtgtgcgtctcaggtctccagcggtctacaagagcggcaaggagtgaccggtctgcatcccaccgcttcgctgggtcacggtcgtccgccgccgcctcaacaagcctacaaagtggtagaaggcctgccgcacgcaacctgtatagagcaaacttcaaacataagtacaacacaaagcaaagttgagttgaaatgtgaacatacgcgtaccaaggaacgtgacgggggtcgacacgcaaccactcgcgcgacgtgcgtggacggaaggtgccgagctgtgcaccctcgactgctgacaggaacgagcggtggttcctgttaatcccacggttcaacagcgccggtgtgtcgtacgccatacctgcatcaaataggttggtcagaaacatataaataattagttcaacataagtaataaatgttcataagcgaattactaacacatattaaacaagagtacaaacaaacaaaagtgtttagtccgaacactcatcacgataacattatgatacaacaccgaatagttcgcaatactactagtacaacaatagtcggaggtactcattacaacaacattgaattgaaattacacgatagaagtatttagtccgaacactcattacatcacaacagcattttatttcctaaatcgaaagcattgttacaccatggaatcgcctgctgcgcgacgacgccttggccttgcgcgcctgcttgttgttccttcaccaggtggtcgcctaccatcacttgcctgtccagatggactagcatctgcgccgcttggaacttctgcattcttcaggcatttcttgtaagtatggccacgcagatcacacttgctgcagcgtaaagtcctcccacctgcttctgactcatccatatcatttctgatgcgtctagtttggcgtcgaccctttttcacccttaacttagatggatctggaatataaaaaacttgggcactcagcgttgtgtaagatcctgagatcccgaacccatatatctcctcactccatgtatgaaagattgcttctttcctgaaataatttgagacgtacacattgggagatatgccacaatcaccggcagcagcaagaacgtgtgagcaaggaaggtgatgaagcttcggcttcatacaactgcaggtacatccaccatccgccttcaagacacattcctgcacggcttgcttgcgatagataccacgcctgctcctatcaacacacattatttcataccgatgcacttgtgtaccttgagcaacaactcgatgtctccgtgcctttttgattttatcttccatgtactttgtcactacgttgccaaacactatgttgttatcggccatggacggaccaattttcttgtatcgatccctaaagtacgcttgcgtgccgtgaaggatgaattcaacaatagcaaccaatggaagtacccgaactcctcgcattacccagttgtacacctctgccaaattggttgtcattatgccataccgagatccatcggtgtcgaacaatagagacaacttctccttaggctcattctcaatccactgagtgaaatttctgatggacgaccctgacctccttctcattgttggtgggtcatcatgtaatgcaccaagaggtatgggaggctcgtcaccttcaactagtggtctgcgagattgctcatctgtttgcttcgttgtcaactcatccaacttgtcccacaactcattaaatttcttctcttggttctgtgcacagagcctcttaaagagctccataagatgcttgttcttgaattgcttgtagaaatttgcacccatgtgacgcatgcaccaccgactccgaacatcaggccacttagctggaagtcccttctcatcccaaccgttctgcaagtagtcaatagcccgcaacatacccgcatgacgatcatgtataaggcaaacgttgggcctcatacgcaccactgcaatgtgcactctctctaggaaccagtaccagctttcagtgttctcactctctacaaatgcaaaagccataggtagaacctggttgttaccatcacacccaattgctgtcaatatctgtgtcggtgacatgggaccgggagtatcatgactagaggcttgaggcagacacaatcgcccacgtggcctggcaccctcgggggacgtcgggcccgagggtgatgtgtgcgcccacctcttggtctccccgaggggggggtcggaccactcctgcctcgcccccgagggccgaggcgccccgacccctcgcgggttctactccgcgtgtatgggttaggtgagcacagcggggctcacctaaccgcatttattgcgcctcggctaaaacgtgtcacactgcacgaagtgcagcgcagagcactcgtttatccggtctgtgaccagtcacagaccggtcagatcacgggttaggtggcgacaggcggtctgacgcacgcttcgccccatcccgtcaagacgagagcttctaggcactcgtccccggctggagctagcgtgttacatcctagagatgacacgttagccccggtcagatacgtgccaggcttcatcctaaccattacaagcaagatgttgtgtgaagaagggcaaacatgcacgttgctaagctgacgcgtggtggacaagaatgaccgatttgtgaccggtctgacactgctcatgtcgtcagcagacagccacattcccacgacgcgcctgcccccggcggaagtggaggtaggtgtgtgccgtcccgtcagaaggatgttcggaggacaaccgtgcaaatctccgtccatttatgaagagaagaaaagtccagtttggaaggagggggtgcatgtggtatccccttgaaatataaaaggaggaccttgcccatagagaaggggaacgatcttttccagattcggaacctagaactagggagaggttggctcacactttgtagctccttcatacacagatccaccaaaacacaggagtagggtattacgcttctcagcggcccgaacctgtatacatcgcttgtgcttcatgctcttttgagaggtcgcgatctttccacatacacagagagcttgggatctcaccctgagcccccggccgaaccggcaaaggggggcctgtgcggtctcccggtgaggagccccgcgctccgtcaatctgacctcggtatttacctgtcataaaagttccatctatgcatagaacaggtcgacaatgcacaaaagcattgatgcaagcacccaatgagaaaaaggctctttgcagcacactctttgttcgatcatcaaccgatgtaaatgtatgtaggtcatagtacgtattattattcctctgggcaatggtggctaataaacgaggcaaattatcataagaagcttcaaatgtgccatacctcatctcaatgatcttttgtttggctctccaggcctttgcatagcttatggtgtacttgaatttgttctcgatgtgcctaataattgattttggttcaaagccaatgttaccaacaacactgctgtacatctcacttgccacaaaagctgaagtgatgtttcggtgatacttctccaccccttgtaagtagcacttgtgctcggtcacaatgctaactttccaataatcattccatttacccttatatgcatggacacgccacggacaatcttccttcatgcacctcacttcatacacataatttgttgacttgaccaccctaaactctctctgcaaggaaactgcccaatgcttcaccgcctccttcatctcatccttatgagcataccttgcaccctcaattacctcgttctccttatactcccagggtacatgatcaccctctgatataacaagtccagagaagtcctcatttgcccaatcagtggccattacatcaccttcctcatcggatgatgcgtcgtcgtccgcttcctcattatacgaatcttccctctccatttcatcaacaattataccaactctctccccctcatccgccatgcccatagcctgctcctcccttggttgattttcctcattttgcatcgatggtccaacaacatcccctgcattgataggaccctctatatcttcggtttgcattgaaacatttatatctttctcttgtaccgacacaaatataacgaggggccatgaccgttcaaaagccatttccacataccgtctccaagcatcagtgctgtccatcggcattagttcccaaaaataaccttctgttgcacgactcactacaactgacactgacattgtgtagacttcttggtctattctaaatcctctcaacaaccaactataaattgactgaaatgttctctccgcaggcctatcgatgcccttagatgtcattacaaaatctgacagatcaacaccatctggaccaaatctaatatttccttcaccgtgaactatctgaaatgtgaccttacttgacattgtgcctgatgaaaacaataactgcgttaacctcgcatttctgtactacgccctaagttacattctctacaatattgttctctaaatttctaaaattacgttacattctccagatcaaactaaactacatcttacaattaacactactgtctatgtctcaattcatactattatattctatgctctggatctacacatatgtgctgtgtgctacagatgtgctaaaatatatggaactaaaactaaaacgcaacatatatactcaaacataacatattagtacaaatgcaaaagatgtatgggagcatacctgtgatgaattgagcgaaccagcagggcttcgccgctccccttctgctgccctcccctctctctctttcgttttttttggatttttagtgaatataatgaaatttcacagaggagggactgggctttataggggggaggcaaaaatcgccctcccccagggcggcaagggggccgcctgcaaaattccatgccccctcgccgcccatttgcaggcggccccccccacagtacaaaatcgccctccccagggcggcaagggggccgcctgcaaaattccatgccccccctcgccgcccatttgcaggcggccccctgcacagtataaaatcgtcctagcggagggcggcaagggggccgcctgcaaatttcgttgacggccgtcgcccgagagcgaacggccgtctgccacgtcattttagccgccctctgagagggcgatttttaaaaatcgtcctcccagagggcggtaggcgactacttccgttaattttcaaaatggaaaattatttttgtaaaacttttaataaaaaaaattcggagacgggaagcctctcccgtgtgtatttatcctcaaaatttgggcctgacctagagatgtggtctttcgcggcaggctgggcccaaagaagaaaggtggtggagaaggccacgcaaggaataagtccacttcacatcctttatttttccgtcgatttaattcgctgaaccgtaataccggaaatctggatctcgcccttcgacttgtaaaaaccgggttatcacacaccttcagccctcaaaatcggatttgctgatcctgtgacagccaaatgtgatttggccggcaagattcggcacatcaccaagcctccaattgtcagttccaaccgatagatatatgggtcaattggatccatcccattataaatttgcacgtttaaaaaaagtcattactattcatttattagtaaccatgcatctgcaactaggcctgcaacactctcaaaattgattccatcccatcctgtacactatatacacattttaaatcattttagaatatcaagtgtatcaagtgtacaattaatactccgctttgtctgctctggccgcccactgctgctgccgctatgtgggaagaacgaaagagaggaaaaaagagaaaaaggaagaaagaaaagagaaaggaataagatgatgctggcatgtggacatcatttttttccttctcacgtacatgtggacctcacatatttatttatttatttatttattgctaactagaatgccatgtcaacgaaaccaggcatattatacgtcttgggaccttttttggacagtcttacatagtttagtagtatacatttatgatattacggttagggcatctcaaacagacttggcgtacaatttgagggacgctaggtgaacttattccttaatccgagccctaaaaatggccataaagggagccggttagcccagttactccagtccaggcaagtgacggtggcaggatgtaagtggcccaacatacgtttctcgctgaatggccttatcctcctctaccaaaaagaaaaaaacttctgtacctaaatccggtatgttgatcatctaaaagaacgctttgatgatcccatgagagcaagtctaataggacagcccactactagctccaattcatctatagctaatcaaatagtcaattcatataatagttgcttgctatactattaatatatggtcccacatgtcatacacacagtgtatcttggagtctgtgctgcagctggctacagatctgtagcccgctgctcttctctctcatcgtttatctcattaaaatatgtttagagctggctaatagcttagcctgctattgtacctgctctgacagtgcaaatgtgatttttttttgggagaacagtgcaaatgtgatttggccggccagaaccgggacagaaccaagccaccaatttgtcagttccaaccgatcgatgatactcctatgtcgtacctcaaccgtaacctggacctgagaccacatgatcgtatcgcccacaatccaatagaaaatacacaacgctagtactccgtattacctaccgcctggcgcctggagcgcctgaacaatttcctacgcgtttcgccgcgcatgggagcagatcacgcgcgcggtgtgccggtgtgcgtccagttggcatccggccaccgtcttcaatccggtggttggggccggccggtcggccaggcgccccgggttgggttgccgctgcatgtccccgttagaacaagtataatagtaggctataagccggctaaatgctgatgtggaggagagaagagagaggagaaacgggctgtaaacttacagcaggctcggacacaagaaactctatgagagaggtaagtggaccctatattaattgtaaagagttatctattatatgggtagattgagagaagactataaaaaatcttatagccaacatatcggctatattattaaccttgatcttaggccggtggatgccctaacggctcttgccgttgccgcagtggccggaaatggaacgcagatgcgcgtcgcgttactcgctttccgcttgctgcgcgcagcgcgagaaaaaagcacacgaccagaattccacaaaaccgtgtcccactctcagtctccccaccttttgtcgtgtctccccatcttcacttgttttctcgccaaatcctacgtgagtcgctctctcgagcagtcgagcgcgcacagggcgccccgctgtcctccgcgcatcgccagcccacgcccccgcgaacctgacacgaacatgcgcctcgccactgcagcctgcactgtactacacccctcatcctcctcgatcaattcgtacacactctcccaaccacctccgtcaccctcacgcttaactcctaccccacgcccagcaaaaacatcgtctatggctgtgtttagttggggaaaaggaaatttttgggtgtcacatcagacgtttgaccggatgtcagaaggggttttcggacacgaatgaaaaaactaatttcagaactcgcctggaaaccgcgagacgaatcttttgagcctacttaagccgtcattagcacatgtgggttactgtagcacttatggctaatcatggcctaattagtctcaaaagattcgtctcgcgatttatagctaaactgtgcaattggtttttctttttgtccacatttaatgctccatgcatatgtccaaagattcgatgtgataggtgaaggggaaaatttttgagaactaaactggccctatataaaccctgcgaggcacgcaccgatcgatcactacaccttcactttctcttctcatcatctatatcacgatcgatcacaaagaggttaacagtaacacatggggttcggctcgagggagatggcctgcgcgctcgtggcgctggtgctcgggctctgctgcgtcggcggcgcacgggcgacggggaggatcgacgaggggctggaggtgatgtggggcgacggccgggggagcgtctcgccggacgggcaggtgatggcgctgtcgctcgaccacacctccggctccgggtggaggtccaagaacacgtacctgttcgcgcgcgtcgacctgcagatcaagctcgtcgccaacaactccgccggcacggtcaccacctgctacgtaagccagcactcgcactgacacattctttgtgtgatcggatcttttttttttcttggctcgtgttcgagctcacgtacggtggattccatgcagttcatgtcggaaggggagtgggatatccacgatgaggtggacctggagttcctcggcaacgtcaccgggcagccgtacacgctgcacaccaacgtcttcgccaatggcaccggcggcaaagagcagcagttccacctctggttcgaccccaccaccgacttccacacctactccatcgtctggacctcgcagcacatcctgtaagctcatgcaattcactcatcaaccaaatgcacattctcagtttataatcactcactcgctcgccgccatggatgccgatcgagctgacaaataatgtatacgtttatcgcagtgtgctggtggacgggacgccgatccgggagatgaagaaccacgcggacaaggggatcgcctacccgtcgtcgcagcggatgcggctgtacgggagcctgtggaacgccgacgactgggccacgcagggcgggcgcgtcaagacggactggtcgcaggcgccgttcgtcgcgcggtaccgcaacttcaccgccacggaagccgcgtcgtcgtcgtcgccggcagggtacgaccagcagatggacgccacggcgcagcaggcgatgaagtgggcgcgcgacaactacatggtgtacgactactgcgccgacagcaagcggttcccgcagggcttcccgcccgagtgctccatgccgtagagtggagtggagacgcgccaaagcctcggtgcactttgatgaacgcggactcgatcgaactcacgcagggcacgcattgacctcgtttttttatttttacttctcttgattgaattgattcattctttctatgtaaagtagatatatatatatatatatatatatatatatatatatatatatatatatatatatatatatatatatagatacaaatagttggcattggacccacgagcagctcgcgcgagggagcgcgtacgcacacgtacgcccacagagcatggagcgccgaggggcgcgtccgtgtatggacgcgcccgcgcctccacgaaacatggactcgcgcgcgcacactggctcaggctgagagaggaagaggtagtgactttacgtgcttgcaattctgccaactcatacgagtaaaacgggctcatgtttcgtaagacgttatgacgtcagaagggtctgaattatatcggcaatgaaaactcaacagcctggatcgaaacacgcaggagactaatggagatgatgcctcaattgctgctgttacttgcgtttcgatcagagcagaattgtagaaacactcaaacagagcatcccagtgaacggcgttacggcaggtcaggccgaaatacagagcacagctcagacttggctgccccaacgcgtttcctgtggaccaggcaggacatctagcttacgagcccatgtaggatatggcccagccggccggtggcccatccaaaatcccaaattagaacagtgcagaacatgatcgtcgagtttacgcttcttacagttttttgtctcgaccgtgtctgctctaagtcggcagagtatgccgcaagctcgctaccagtgtattttttatctccaaaattactatctaacgaacatgggttttgggtgtacacttcgtgcggaagttttttatatgaagtttttagaaagaaactttttaaattaaggttttcggagaaaagttttaagagatacacatgtgtgctaagtagcaatctccgctcttctctcagttactttttctagcatcaagcatcagaagcaacactcagtcagattaatccaatcatttacactttagatgcattatcataaacaaatctagaaactaaaaaagaaatccatctcgtcgattaccaatcctagatacaattggactgcattatctcctggcagtagaccaaggacccgttccacttcgatgaagataaagatttttcagcgcacgattactcaagcattaattgttataaacttaaaaaatatatttattaatattttaaagaaacgtttatatagaacatttttacatgaaatatattatttagcaatttaaaaaatatgctaacaaaaaccaatgtaaaatctgtatataaaaaacgaacggatcctgactagctgtgtaggactacgcactgcatatgtatcgtgtgcaatgcggctcaacttctctaaagtatctacaatactatctccgtttcaatttataaaactttctagccactactagaaaatgcattttttccaacgtgggggtctttttttcgcaggcggacatgactcttggagcaaaataaccgcctacaaaaatataaatcaaggtgaagttcgttgtcgccctgcgaaaaatataaatatattttcacaggcagaccacttaagcgacgcttgtgaaaatcattttcgcattgcaaaaatcgtacctaccctaaaaaaatataagtcttatcttctcatccaccccctccccaccactcatttccctcaacacttctccaatccctcccctcccctccctccctccaccggcggcagcgtggacggctcgacggcggcggcggcgacgacggcgcgcgcggggcggcggcgatgcacgtgggggcggcggcgaggcgtgtggcactatttttgtttgtttgtttattggattttcgcaggcgagccatggccccaactgcgaaaatcgcagtcgttgggctgcagtcggtccttccccgtgccagtaaaatatacttttggccgcctgtaaaaatgctttttctagtagtgagcattgcccatatttatatatatgttaatgaatctagacatatatgtgtgcctagattcattaacatttatatgaactagcaaaatgcccgtgcttcgctacggtgactaaaactaaaactatttgtttttaaccaaagttatttccacactactttggtacttttgctcgctagaaaaagtcttaaatgacagagagaaatatagtagctcataataaattatttttcaaaaaaaaaaaatcgaagaaagggagataaaaaagacaaagccggcttgatttccacctttacacggtccaagttaacatggactctgaagatatgggtagatctaccgggtcgctcagcagcacgattggccagcgagcaacctcagaccaatcgacgaccgtagcaccgtaggtagcagccgtgtctggccttctgcgacagcgatgactatgagtctgtgctattattatttcaatatttcttatttttaattatggccttcgtccgtcttgtgatgaagagaaagttacgaatcttttaattaggtaagattaagatatagaattaaacttcttttctttggtcgagggacctagaacatactttttcccggcctggccggtcagcccacgacctcttatacgcacgtgcgggcgctccccccaccctgggccacaacctgggcctgggccggggaagccaccctgtgcgcgcctccacttgggccggtgtcggttgtccgatcgtagggtttcgatcggacagccgggtgctgacgtcggatggacaaaaccccatccctctcggctgtcggcgaaaaccctagtttctcctcctctccctctcgcctccctcccgtagtggatacaacggcggtggtagagggttggaggtggtcgcgggcgaatccagggtggtggcggtggctctctccaccctctcttgcctccctcccgcaccagatctggcgtggtggcggcggccgcgggcagatccggcagcagcggctccctctgccccctcttgtctccctccagcggcagatccggcggcagccgcgagtggatctggcggcggtggtggcgtcggcgacggtcgcgggtggatttggcagcgtggtgccagtcgagggtggatccggcggcagtcggcggtggtggtgtcaacaacggccgctggtggatccggcggcggccgagggtggatccggcggcagttagctatggtggcatcgatgacggccacgagtggattcggcggcggctgatggcagatccggcggcattccgcggtaggggagtgaaagttatgtgattatgttgttgttgttgttcttggatgtgaatgtgaataatgtgatgtttgatgttcttggatgattattatgtgattttgtgttgattgtggttgattttgggggcaaagagtggttgattttttttttggcaaagcgggaaaattgcgtgggcaaagaaaaatcacgcggacggactaaatcggattgtgaaaaaatcgcgcggacggacaaaataaactgtgatgaaagaaaaattatgaatattttaattagttaagattggatggctagatgacaaatccgacctcaccttctgccatcgatcgctaggcaagaagctaagctagctacccttccaaacaagagagagcttgtttgaagtaaaccgaagggcatgttatatgcgctggttttcttaaaaaaaaaacgaaaccaacaaatgtgctggtctttggagcgccgcacagcaaagaaaaatatccagcgtggaccccacctctcgaacattatctcctcgtgattctccttctctggaatcctccgtctccccgtctctcgttcgctttctccactcccagcgacggcggcatgccttctccacttcttttctcaccactcccagcaatggcggcgcaccttctccctctccgcgccttcttcactcctcacgacggctgcacgctttctctccccgcgacggcggcgcatcttctccattccccagctcgtcactcctcagcgacggcggctcgccttctctactccccgactcgtctctcccctgcggtgaaaccaacggctcaccactccccggcgacatgatggtgcggcctccacagatctggagccgcctcttccttgtctccatcacaacaccaggcacgcgtcatccccgacaccgatgccaaaggtcagtttcccccctcatcttctcccttcccccatcctctatacctctaatgtcgtcggaagcggttgtctgcagggtagcgagtggccagaattctccacggtgagcaacggccacaagtggtcttgaatttccaaatccgtgtgataaattttgtaatattgattatgtgatgtgtgatcgattatttaatgtgtatattatgtgatttgttttgttggaatcatccatttgttttatgaactttgtgattctttttctctcttttctatttattttctatggatttggagcgtttgagccgagcctgctttttttttcttttgcaaatcatatcaccaccaaagaccggttcccaaccggcaataatgtctatttttgtagtagggtagtgattgggttttgatttggattttgtttccgatttcggattgagcgattttgttctttgttcgtcgtgtgatacatgcgagggcggagggcgtcacttgggcggagggcgtcacttgtggacgaaaacgtaaaaaataggaaagttactcacgcagcgtggcgtaaacggattggcggacccgaaaattttggtgacgattaaaaaaatccaaatatttatattagttatagatatgaaagtgttaacctgaaacggaggaagtagtcactaccatataggccctagagctagtgggacccacgtgttacgatctcgttcccgtgcaatgctccggccgagcagattccatcggtcctcggtcccagcaacgctcatgtgcctggacatatggaaaagccgaaataaatggctcgggttgatcatgcatcggcctcgccgttgttgctacatgatgccggcggaacggaacaaccaccacagaatttcaggctgcgtggaaactgatggacgccgtgcaacgcgtacacttccacatgcttttgcacgctcggtgcagctcatggctctcgcgtgcccttctttttttaactgcagcacagggctaaaaacatgttaccgtcatgctgcaggcgtgattgtgagatcgagtcgtcgatccaagtttgcagtcaatgcaaagtcaggcctggtttagttttctaaaaatatcacatcgaatctttagatatatacatgaagcatttatttattatattattaaaggaatagaaaaaagagcctccacgttcgctctcatggtctagaatttctcacattaattagagaaaaagaaaatacagagtccatatagaaatacaatttagaaatagttgaaattcggaattaaaaaataaggaatattagaagaggagactagagtccatatagaaatacaattatgaaataactgaaattcagaattaaaaataaggaatattagaagtagagtatagagtcaatatagaaatacaattaggaaataactgaaattcggaattaaaaataaggaatattagaagtagagaatagagtccatatagaaatacaattaggaaataactgaaattcggaattaaaaataaggaatattagaagtagagtatagagtccatatagaaatacaattaagaaagaaaatagaaattcagaattaagaaaataaggaatattagaagtagagtatagagtccatataggaatttaaaactaactaaaatttagaataaacataataaaatcaaaagtagagtttagagtccatataaaaatacaatttacaaataacaaaaattcgaaattaagaaaaacatgggaagaagagtttaaaatcaatataggaatgcaatttagaagtaactgaaattcgaaattaaaaattagtctagagtctacatagaaatacaattagaaataataaaaattcagaaataaaaataaataatattggaagaagagcatagaatctatatagaaatacaatttatagaaaatttggaattcaaaaaaaaaagaaatactaaaaaatgagtcaatatatataatttacaaataactaaaatttgatattaaaaataattaataactaacacgtatataaaatacaatatgaatattacacattagtagttttgtaaagttattgcaaaatttaaaattatgttgtcattttaatatatttaaataatataatgagaaaacatactatatgcttttatatgagagaaaatataatgatattagccacgcaatctgcgcgggccaccatgctagttaaatataaatgaagaaaaactaattgcacagttagaggggaaatcgcgagacgaatctttaagcctaattggtccatacttagccatacgtgctacagtaacccacatgtactaatgacatattaattaggcttcaaaaatccgtctcgcggtttacatgtgagttatgaaattagtttttttattcgtgtccaaaaaccctttccgacatctgatgtgacaccaatttttttttcgtactaaacaggccggccctcagtattacgcgcacgtacgcacagagattgaagaagacagaagtctgtacggtgaacagtgtatgcacatgagcaacgctaaatgctatactgagctgcatgaaaaatactggggccgtacttctctaatctctaggattgtaagtgcatccatgtgttcagaacaattgcaggcttggcagaggcttagagctagtgatgctctactgaaacggtgaaatgtgaaaatagtattgcactctgcaatgaaatcaagacaaaatatgcagttgtgttcgtaatatgtcaacagatgtgaactaataattggagaaagcacgacaattctcggttatcgggtattccttttcttctgagagttaggccatcagaaattgggtaaaccaacctatgttaccactccatgcgaaacacagaattctgaaaaatacatggcgcagctctcccactggagtaatggacatgtgacgaacacttaatcaggtcaacttcttgcttgttttcccagctctgctcacctttagctacatactcttccatcattttctatgcctaggtcttcactagccagcccataatccaaacttctttacatcttccaagaaaccaaatatctaatgcatccatcgccgagttcgatgagatcgatctgaaagtcttttgaccctggtgctattgttctgcatatagcctgcacttgaccatggcctcactgcccctcacacacagcagtacatcactcactcactcacttcacagtttacaccaccggccggaagccatggcgccggctagggcgcaccacctcctagcctgcctgttggcttctgcgctgctcgccgccgccacgccggtgaccggcggtgggctcatgacggaccagctcgaggtactgtttggccagacgcagctgctcaacgacagcaatggcgaccagacaattgcgctgacgctagaccgcgagatggggtcggcgttcaagtccaagacctcgtacctctttgcaaggatcgacatggacatcaagctcgtcgccgacgactccgccggcaccgtcaccacgatatacgtaagtgaccatgaaacagcagctgcacctgcacagtgacatgcatgtgccaaatcgtcagttatatagttctgcattcttgagtagcttgtgatacattgcgtggtgcagttgatatccgagaaggattggaacacccacgacgagatcgacctggagttcctgggcaacgtcaccgggcaaccgtacaccctgcataccaacatctttgccaacggcgaaggcggcagggaggtgcagtaccggctctggtttgatcctacccaggatttccacacctactccgtcatctggaacccagacgagatcctgtaagctgcatttcaagatagtatgttaatggtgtaaaaataggcttgttgcgttagaaccggtaaaaaagcattgagccaaatgtgtatgccagtgtcactaaagtcggtgaattgcaggatcctggttgacaacatgccgatccggcaattcaagaaccacttggactccggcgtgccgttcccgatctaccagccgatgaggctgtttggctgcctgtgggacgccgacgactgggcgacggagggtggccgcatcaagaccgactggtcgcaggcgcctttcgtggcatacttccggaactacaccgccgacggctgcgtgccgagctcttatgcgtgggtatgcggccagggcccggccagcagcagtgactggttcgaccgggggctggacgacgtcaagcagcagcagcagctgagggaggcccaggacaagtacatgatctacaactactgcaacgaccccgagaggttccccgatggttatccaaaagagtgtgggttgcagtaggatagaggtggctcggtatgcatgtgagaagtgcgtgaaatgtaccgaatcaatattccttttttgaagattttactggaatattgagattgtttcattctttgccccgaggaggaaaaagagagcagaaagtttcagaaaaaattgaaggttttcgatttgagtgtttcggtctgaatgaaaattttcaaaagcatttggaacttttctattgttttgaaagtttttgttatgctcagacactcctcctgccccagatcagttgggtatcatgagatacctcaagaacatgggcccagaatgaagtaaactaattctgtaatgaatatatgaaaataatggtgacaaacaattcattacaggagaaaaggttgataaaactcatgacaagagttttggttcttatccattccatcagttgactgtcaatctttcatgaggacatattctagtttaggaatcctactagcacctattttcctagtcttgatagttttaggattagtctatttacaacaatttttgcagttccaatgtataatggggggggggggggtgattttgcaggtctgaacatcatttggaagaaaaggtaaaagtatgaatggcgcatgcccctgctatatatagcaaatccacaaacaacccacttccccatccgcttaccacactaagtgcatgcactcacaaatttaccttttctttgccttaacccgttttgcgcggatggccctttacttttcccctcttgtcctctctccggactctgggtcgtcgcttctctccccacaaggattttctaaatttcattgccatcaagaacacacaggcttcaggtaagagggtctatctgcatttgtgttcttttatttttcattcaatgacattttttatgttcctatgatccttttgtgttctcgggtgtaatttgttgccaactatatcataatgagcttttgttggtgtttgggtgaccattgtgatgtttgaactatgatcatatcattcatctttttcttaaaaaaaaaaacttgtttgcagttccagcatgatgttagcgtcgttttgagacaaaatcaggaaaggctctttcacaacatcaagcatgtcaatttctatgaaagatgtagatccggctttccgtggagttggacaaaaggagtatcctcactgcattctatttccaatatttattatggcttggacacttgatctcacagaaaatacattttgtgaccaaaggattattactgactcacacacaaaaaatgtcaacatatgtaatcatggatggaatgattgttaactgttcttggcaacaaaatcatccaacacaagaggctaagcataattgttcctggatagtctaaaaaaataggcaaagctggaacaaaaggctatcatgaatttataatctattgcatctataagaaaaagtagttccatagcatcatagggtgactaaaccaaacaaaaacaatgatgaagttaaagtaaataccagtcaaataaaactaaggttaagggctgctgatttatcctcacaaagttagacttggtcatcaacccccatgagaattgtagccctccactatgtcgatcagaggagtcttttgtacatgtattgtactccttaattaccttacagtggtttggaggtatggcgtattgaaaacttcaagcctgttcccgtgccaacatcttcacacggaaaattttacatgggtgattcatatatcatcttgaaggtatggtagtattcattccttgttattccttttcaacattattggtgcataatcgcaaacatagatgatgtaattcatcttgaaacaaacattacatgacattataaactattttctttctttatcttttaccacactagataatgcaatacttaagtcattttggtgaaccacatgcttcactaaccataccattgtcgtcttgatgccacaatttgtatagtatatggcttcaagtttgttcatgcattatatgcttactgcaccatgtgttttgaacctcatattcatctttcttcctatagacgacagccttgaaaaatggttcatttcgccatgatctccactactggcttggaaaggatactagtcaggtagactctcaaataatctggcagcacctcacttgacttagctctcccaagctaactattaatacacaaatgcctaatatttgaaaggacgaagctggaactgctgcaattctaactgtggagcttgatgctgcccttggagggcgtgctgtccagtacagggaagtacaaggcggtgaaactgaaaagcttctctcctattttagaccatgcatcatgccacagccaggaggggtagcttctgggttcaatcatgtagaggtcaatcagcaagatcatgttacccgcttatatgtgtgccaaggaaagcatgttgttcatgttaaagaggtaatctattgaagttgatcactgcctttgtttatgcaaaggcttgctgggttttttattcttatgctgcttgtcatacaaaccaggttccttttgttcgttcatcccttaatcacgaggacatattcattttggataccgcgaacaaaattttccagttcaatggctctaactcatgcattcaagagagagcaaaagctcttgaagttgtgcaatatatcaaagatactttccatgagggcaagtgcgaagttgcagctgttggtaagcttttttttttttgtttatgtgcttttgctttgaatattcaaagtcacatttaaagcatttgacaatctggattcctctcatagaggatggaaagttgatggccgatactgaagctggtgaattttggggtttgtttggtggttttgctcctctcccaaagaagacatcttcagaggacaatggggatgataaggaaactgtgaccaaattgctatggtaatactcaagtcaaatcactatcaatattccaatacccgcatcaagaaagtgttagttttgaatgagaataatttgcagtcaaatgatgctattttgagatcaattctcttaaaatttatgaaactgaattagtgatttctattacttcctcccagttttaaccaaggaacgctggagcatattagttttgaatctttggagcatgagttacttgagacaaacaaatgctacttgttggactgtggagctgaaatgtatgtttggatgggcagaggtacttctttgcaagtgagaaagggtgcaagtgaagctgctgaggtaatttcttattggccatatgtgtatgaaggttctgattattggaagctgatttttttttcattggtactctccattcaattatagtgttatgaaacaaaaagggaacatcaaggtagaacttggctacagcaatacaacttttgtaaaagtccattcatttccatcttacaaataaaaaaaaaactatttggcatgtattccagtactcagcaaatgtaccaccttactgatataccatgctgacttttttaaaaaatatatatattcttatgaccaaaacacaggcacatttcacatttcactttgctgtgtgtgtttctcttacttatttacagaaattgctcattgatgagaaccgaaaaggatcaaatgttatcaaagtgattgagggattcgaaacaatcatgttcaagtcaaaatttaacaagtggccgcctactcctgatttgaagctgtcatctgaggatggccgaggcaaagtggcaggtgattgcctacagactcattagttcaagcgtgaagtattgctaaaagagtatcaaatgtacacattcatcatgtatattcttactacagctctactcagaagtcaaggattggatgttaaaggattgatgaaggctgctcctgaagaagaagaaccccaaccttatattgattgcactggtcatttacaggttttttttcgatagctgttatgaatctgtattgctgtgagcaacaatccttttaaatttgtttgtctacacatcatttagggtgctagctaggttttgaagttgagacctgaagcctctcaaacgccaatgtactcatgcaaaaataaattaatagagggtaatcaacaaacactataggtgtgtttggtttggggaccaagtgggatgggttagaccaatcccagttttttaggatgggatggttccagttgtgtgtttggtttgtggtatgggatggttatagttttttgtttggtaaaaatgattgagatgggatgggatggacaatgttgcggacgaggcggcgactggtcgtggaggtgaggagaggcgaggcgaggcgcggactagtgacggcggtcggccctggaggcggtcgcggacgagccggcgaccggtcgtggaggcgaggcaaggcgcagacgagcggcggccggtccctgaggcgacgaggcgcggacgagcaacgtcggccggtcgcggaggcgaacgtggacgagcgacggcggtcagtcgcagacgaggcgccggccggtcgtgaaggcgaggcgaggtggagggagcaggcggaggaggacggagcggcaccgggggagggagcggtgccgggggagggacgggtggccgtggcggtgccgcggcggagctgagtgggaggctgtgggagctgacgacgagcggcggcggtcggtcgtggaggcggtcgcggacgaggtgacggccggtcgcggaggcggaggtcgacgcggatgaggcggcggcgctgcggcggagccgagcgggaggctacaggagctaaagccgtgggctccattgaagtgggatggattggtccggccgattttggcggaccgtttcatcttggatctgagaggaatattcctctccagggaccatcccgtcccactcacctctcaaccaaacacccctaaaagtgggttcatcccatcccatcccatcccatccttgcaaccaaacactacctatatgtatgcaaaggcatctaactaaatcatgcaatcgatctacacccctctatctttgacagtttgatgtccatccttgaactaacatttttacattgcagtcaaccaatttattttagtgaagtttgatggtgattgtacaggtctggcgagtaaatggcgatggcaagactcttctttcatcttctgatcaatcaaaactttacaccggagattgctacatttttcaatacacatacactggagatgataaggaggaatgtcttattggaacttggtttgggaagaagagtgttgaggtaatatctacgcactaactctagttatgaaaaaattgaaataaacatacacatagatttataggacatatgtgctaggaactaattaaatatttgttgtgaagtcattagcaaggactaaggataaagttagcagtctgatgctgttagctgattttttctagattgataggacaacagagaggtttgcgtaatgtggtaactgtttaacttctgtatgataaattcaagtttctgcatgtgggcgatcttaattactttcaggaggacagaacatcggcaatttcactagctagcaagatgtttcaggctgcaaaattccaggctgcccaggtaacctgtccattgtccatatatgacatattacatcacattatcactctaattcattggtgcttccatgcaggctcgcctctatgaagggaaagaaccgattcaatttttcgtcatatttcagagtcttcaagtttttaaggtttttcttctactcagtagataagtcaatatccttgagtggatctgacagagtgactgttagatatatataacaatttgacacttaatccctctccccctcacaccggctttctaatgtagggtggacttagctctggatacaagaactttattgctgtaaatggtaccgatgacgacacttacgttgaaggtgggcttgctctcttccggattcaaggctcaggatcagaaaacatgcaagcaattcaagttgatgcagtaagtgcaaaggcatctgtttggtccagacatatgcgagagcgtaattcttatattgttatcaatggtttcatctctatgatccttttttactaggtgtcttcgtcattaaattcatcctactgctacattctacacaatggaaacactgtgttcacatggactgggaaccttacaacctcactggataatgacttggttgagagacagctagatgtaattaaggtgtgaatcacttattgcggaaaatattaatctttatacccatgcagttttcctgacacttggtatgctcctatacatttaaatccttgattgaaatcttacagtaggttttcatattaattagcaaaatgcagtttgaatatcgtagaaaagaagagaaggctatatagttgatcatgatgcgaccagattataaccatgtagatttattagatacatattaactatatgagagatacaactataatttagttaattgtgaatcacttattgtggaaaatattaatctttatacccatgcagttttcctgacacttggtatgctcctatacatttaaatccttaatcgaaatcttacagtaggttttgatattaatcagcaaaatgcagtttgaatatggtagaaaagaagagaaggctatatagttgatcatgatgcgaccaaattataaccatgtagatttattagatactccctccgtccctaaatgtttgacgccgttgattttttaaaacatgtttgaccgttcgtattattcaaaaaaaattaagtaattataaattattttcctatcacttgattcattgttaaatatacttttatatatacatataattttacatatttcataaaatttttgaataagacgaatggtcaaacatatttaaaaaagtcaatggcgtcaaacatttagggatggagggagtacatattaactatataagagatacaactataattttagaaataaaagcaagaattttgcgaggcgttcatctagcttgttgtaactttatgtgcatgtggatatatacaagtctagtagttatgtatggttattggatgcttgtcatcctcacaagtcataatcattcttcttgatatcatggcttatttggcttatgttttttgcctatgttctgaaacaatcttagctttgatatacgggtaattttaccatccttgagaaggtaacaggaggtaccaccatttctggtgtaaaactgggtatctctaggtataaggtacctgggtaccaaaatttttagcgtaaaatttaggtaccttgaggtactttctcaaggaccgtaaaatttctcgtggtatacatgtccactgaacattgatacaacttcttttttgtgcttctcttttacatgatacagccagatctgccatccaggtcacaaaaggaggggagagaaaccgaccaattctgggaactcttaggtggaaaatgcaagtattcaaacaaaaaaataggaaaagaaaatgaaagcgaccctcatcttttctcatgtatcttatccaagggtaatcaaaaacaaattattgaatgttttgatatggtctacttagtgggattaccatttcaacatctattgacatttttgtttttttctgcacttcaaatgttttgctggtggggtttcatgaagaaaatctaaaggtcagaaaaaaaaactgacgcatagctttttccccccctaagcgtgctctccatgtgtctaatgccagtccttcctttgaaatctacatgatcaggtcaaggaaatacaccactttactcaggatgacctgatggcagaagatattttcgttctagactgccgcaccgacttgtttgtttgggttggacaggaggtggatgccaaattgagatcacaagcgatggacatcggtgaggtattaactaaagttacttgatccgtctattctaattagaaatcacgttttctgtttggcatcttaattcattttctcactgtaactatgctagaaatttcttctacatgatttccttatggaaaatctctcgcaagacacaccaatttttattgttacagaaggaagtgagccacagttttttactaggttcttcacttgggactcagcaaaatcgctggtaagtaattatatttagattcaagatcagtttttgttctatggtgattagatgagcgcccaaacataccccccattttggttttctcacatctactctttctttcttttttttttgtcgcagatgcatggcagttcataccagaggaagcttgcaatagtaaagggtggagcaactccatcgcttgatgtaagtctcaacatagtgctcaagtagcatattgatagaatgcggtccttattgcttgtaaaaagtcactctcttcatcatttttgctatttgttgatacttgtgattagctgtgcacatatgcatgtgataattacttggttgtaccaatgagccattgttaaactcttggtcatctgattaacaaaccaaactgccatgttgagtgtaagtttgaaatatgggttccaagtggctaacatttgatgagatttcatttttcttgtccagttgtatatatagttgcatcatttatatacagttcatgtttggtgatgtactgtcctaccaatgcctttcaaccagggaaatttggcctctgtttcaatctttggggttttacacttaatggcctctctttcaatctatattgtgatttacacttaatggcctctctttcaatccatatagattaccttacatatatatattctttatgcgttgccagaaacctaaaaggcgaacaccagcgttttcaggaaggaacgcaggacaagataaatctcagcagcgcacaagaagtatgtcccacagcccagaacgtcaccgtattcgaggaagatctccagctttcaccgcaatagcttctgcctttgagaacccaagtacccggtatctttccacccctccccctgctgtcaagaagcttttcccaagatccggagggtctgaattgccaaagacatcatccaaacaatcagctatcaatgctctcaccagtgctttcgagggtcctacgaaaagtacaatacctaagtctgtaaaaggtactctatcacctattatgctagaatacggaaggcaagtgttcagttgtcttataattttcctttatgaatttctgcaaaattaagcgagccccgaggcagagaaggcaatacaggaggaaggctcaacgatcggtgaaagtgaaaacgagccagaagatgatgagaacagcacaatctacccatatgaacgtttgaccaccacatctgatgatcctgctcctgacattgatgttaccaagcgagaggtgatcaactaatttttccacttggtattttctcctgatgttgtaagatgaacacaataatatgtactattttcaactgaatgcaggtctacttatcatcagttgagttcacagagaagtttggcatgacaagggcatcattcaaaaaccttccaaaatggaagcaaaacaggctaaagtctgatctccagctcttttagctcaactctgaggaacagccccttgtcctcgccttgaaggcatcacccatttttgagggcacgcaatttccgtgccattctcgagttcttctcttcacctattttggtctgctattgctctaggatcaccctgctctttctgcagtagcaagtaggtcttttggtagtgtttttcttttccctttattgatatagagtgctcatgaatgtttctgttgtgagcctcgcatttttgtgccgctacaaaatttttttaagaaaaggtctatttattgtctctcaactctcatcatcatctctcaactaatggggagagagcaagggcatcactattctctaattccacaaattcacaagttctactgacaacaacgccattccacagttcaacaagttcatcgatatggcacgaaattccgttgctaaacggaatagatacgcgcaggagcagaaccacaatcaaataacgcagtccacttcacgcatgcaagcaacggaaattagggtgaatagaggggatcgagttctgaccttcaaccggttggctgccgagtgccgaggcagtcctggttgcaggagttcggcggcggggcgaaggactccgatggttgcggcaacgccagcggagaagccccgggcggagaggggagctcgactcgagcgagctgcttgccgttgccgtactgacggaccgcgcccacggcacccgtgtcagaaccacaccaaaacacccccgaaatggaattgacgaacacgctctctctcagatttgtggccaccgcaagacaagaaaaactagggttctaagctaagtactagggttaatgatcttcgatagcttttccattcatcacaccgggttatatacccccaggcatctcaggttttttttacagagcagcgagtgagacagaggaagcagagtaaaagcagcgtcgcgcgcaggcgacgacaaacagaaacggtaaatagtacaacaaagcgatcacagccgtaaatgcaccatggtaatttggaatagcctcatctctaccgttcatcttcattaaacgacgtcacccaaccggtatcccactctaactctgaacttctgaatttttaactgaaacttctgaaactcttctccatttcttctctgaaatctccatctctaacaatccaatccccttgagcacgaccttgtcctcaaggtcgaaaatgtggaaacgttgcttgaataaaagcagagtcctcccaagtagcatcctcaggagatagattttcccagtgaacaagccattgagtgaccggctcatttcttcttggaactacccttcttgctagtacagcgacaggttcagtcttgatgttaccatcttcatccaccaatggaagattaggaagtggtacaaccaaatttcccacatgtttcttcagctggcttacgtggaacactggatgtattccagcttcctccggtaactgcagatggtaagccactttcccaattcttttcaggattctaaatggcccatagaactttgcacgaagcttcagtgatcccctcaagccaaaagcgttctgtctataaggttgcatctttagatacaccatgtctccctcctgaaaacttctttcagacctaagtctgtctgcaaatttcctgattcgattctgagccctcaacaagttatctttcaatctcaacatcaactcttctctctgttgagcagtgattctgatttcttcagttacatttccagggatagcttgctccccattctgaggtggatgtacaccatatagtgcttcatacggtgtgacctgtagagaggtgtgataagaagtgttataccaccactcagcagtaggcaaccacttgtgccagtctctaggttcttggaacaccatgcatctcagatatgcctccacacattgatttacccgttctgtctacccgtcagattgtggatggtaagaagtgctgaacctcaaagtagttcccatggatttgaagacattctgaaagagatcactagtgaatattttgtccctgtcgaaaacaatcaccagtggcatgccatgcaacctataaacattttccataaagatctgcacaacatcttgggtatcatagggatgagacattgcaataggcatatttggtcaacctatccaccactactaggattacatctttgccttgagactttggcagcccttcaataaaatccatagaaatatgtgtccaagccatttcaggtatttgcagaggatctagaagaccaggagaatgaacatgctcagcttttgtaatctggcaagtggggcattcagagacaattttctccacttccttcttaagctgtggccaatagaaaatcttcttgattcggtggtaagtgactttaactccagaatgacccccaaaagctgatttgtggaaagcttgtatcagtttgttcctgatattagtagtactgccaacatatatcctgtttttgtatcttagtattccagcacccaaagaaaaattgctagattcttcatttagttcctccccatccaccaatttcatatattgggcatcatttagataactgctcttcacatcctctatccattcaggatagaccaatgtgattgcatagcatttttccttctcttccacttctttggtgtctctccttgataatgcatcagctgctgcattttctttcccttttttatattcaatgttatagtcaagctccaggagtttcagcaataatttgtgttgtattccttctgaaagtttatgtgtagccatatacttaagactctgctgatcaattcttataatcacttgattacccagcaaataatgcctccattttttaagtgcttccaaaatggcaattgcttctttttcataagtggatgaccctgctgctctctgccccagagctttgctataataagctattggtctgccctcttgaattagtactgccccaatgcttgaaccacaagcatctgtttccaatacaaacggtttgctgaaatcaggaagagctaatactggacaagtagtcataatcttctttagttggtcaaaagccttctgctgttcaggaccccaatggaaattatccttctttaataaatcatgtagtggtctacagatagcaccatacccctgaacaaatcttctgtagtaacctgtcaatctcaaaaagccccttaacttagttatattcactgggactgcccattctagaacatctttaattttgctgggcttggttgccactccttctcctgatactatatgccccagatattctacacttggtgctgcaaatgtgcatttactcctcttagcatataacttgtgggatctcaaaatagataggacacactgcaattgtttttcatgctcttccagatttttgctgtaaatcaatatgtcatcgaagaataccagtacacattttctcaccagcttttcaaaaatttgattcatttagagcttaaaaggtgacgggtgcatttgttagcccaaatggcataaccaagtactcaaaatgacccatatgagttttaaaggcagttttaggtatatcactttccaccatcctgatttgatggtaccctgatctcagatccagtttggagaataccttagcaccattcaactcatctagcaagtcctctacaattggcataggaaacttgttcttaatagttcttgcattcaattgtctatagtccacacacattctccagctgccatccctttttctgaccataacagctggtgaagagtaaggactcaaattgggcctaatctcttcagactccaggagttcctttataatttcctccattgcattcttctgctggtgtggtactctatatggtctctgattagggggttcagctcccatcttaagtgggatagcatgatcacattctcttctgggtggtaaccccttgggctcagcaaaaacctctgcaaatccagctaggatagttgctacagaatcagggactggcacattctccatctccaaagtcttgagagtatgtacttcaattacaaaccccataacatttttgtccagcattttgttcatcttttaaaacttgatcaacacttttccaccaggtgcagtatagtctttgaattaatattttgccctttgtaggttactgtcagagttctctgcttcaagtccaaattaattggactgtgctcatatatccagtctgcccccaaaacaatatcatacccctttaaaggaatcaactggaatgctttaccgaaaagatatccctggaccttgtactggatcacctcggttttagctgtggaattaagtattcctcccccagctaccatgactctattgtggtcaaattctatgatttcacacccacttctcaatgcaaattcataattcatgaaggtattagtgctaccactgtcaaccaatgccacaactttccttcctttaacataggtaatcaaagagaatgtattgattccatatgtaccctgtattgcatgagtagaaatctgcatcagttgttcttcattatcatcttctttcttagcaggacttccaggtgctgtttgatattccccttcctggttttcttcaggacttcctgattcctcttcttcatcctctacttcttccatcatatgtatcaccttccctgtcctgcacttatgctggtaagaccatggttctttgcagtaccaacaagttttcttttccctctctcctccagtatttgccccccttctgtcctacattcttgttattattgaaacctcctgattgaaactggggtttactcttgttaaatcccccttgagcatttcccctttttgcaagactggccttctcataaacttttgcatactagtaccctgctaacaaactttgtggtttttgcccacacacatcatgtttgatatcagctctaagacccccaataaagcagctcaaaatataatactcaatcagatagggatgatcccttttaaccaatgcaacactatcctcaaatttatcaatataatgcatgacagaaccagtctgcctcacattctgcaactgctccacagcttcgtgtgcatttgcctcagtaaatctatctgaaatcatcaagtaaaattggggccaattaatataatgccatggtatcccaagatttctaaaccacttcccagctcttcctaccaagtgcccagtggctaaattcacccattgctctactggtgttcctgtcatttcaaagaacttctcgcattgttgtaaccacccaatagcatcttctccattaaatattgttaactccaacctctggcttcttagtgtcatgtcagcatatggattaggcatcccaccaaacagatgtctgggtccttctggccaaacaggtcctcctccatttgccatatgtatccctgtagcattcagatgaggtctggctgttggctgcatctgcggatacctccatggctggtttgtttctattccataatgattcattcccacatcctcctgagactccactccatgtatatttaaccccccaggtaaatgaccagcctgagttctagtagctgaagtgaatattggtgctgaggtgaatattggtgcaaaatttgggttaacagtgtttggctcaatagaaaaattcacatgtccaacagaaggaacagcaccagacatgtgtattggaaaaattggtggaagacttgttgatggaaaaacacttcccataccagcatgtatctgactggaaggaattgcattagttgagtttacctgagtctcatcagcagtttgaggtagagccactcctgactgcattcctcccgtagataaaattggtgccactgatgaaaatccagggggaactaatggtgcaatcaaagcccctgtcccagtagcagcctgtgctcctgcagatacacttgcaccagccatagcctgggtccctgcagatccacctgcaccagccgtcccactagtactcgcaccagcagagtgaaatccaggtagagctgtgcaaatactcttcaaaaggtccttgatttctcccatctcacctctcagattactcagatctgtcatctcccgcctaagctgcaggatctcagctctagcgtcaaatccatccacactatccaaactgttaacggacctggtgcgagccggcatgttcactgacaacgaaattcggcttgagggttatctccaagattcaccctctcccctttttgatctcgtcgtcgcaggtctaccgccgcctgagtcaggtcgaaagctctggagattttacagggaatacacatcaaagtgattccccaaccctcgcttgtcgatctgtctcacttctactcgcctccggttcgaattgtataggcttttgggattttacgagaggaatccgcagatcctcccaaccttcaccttacaaatcgagagccaagaatcagctgtgctctgatacccttgtcagaaccacaccaaaacacccccgaaatggaattgacgaacacactctctctcagatttgtagccgccgcaagacaagaaaaactagggttctaagctaagtactagggttaatgatcttcgatagcttttccattcatcacaccgggttatatactcccaggcatctcagttttttttttacagagcagcgagtgagacagaggaagcagagtaaaagcagcgtcacgcgcaggcgacgacaaacagaaacggtaaatagtacagcaaagcgatcacagccgtaaatgcaccacggtaatttgatatagcctcatctctaccgttcatcttcattaaacgacgtcacccaaccggtatcccactctaactctgaacttctgaatttttaactaaaacttctgaaactcttctccatttcttctctgaaatctccatctctgacaacccgctgactcgtcgccctcgttcctccacggcatcggcgcgccatccgcccgtttggccgtaacgcgctccgccaccctcgtctactcagagacggagctgtacacagtcgcggcggcgcacgcgccgccgctgcgccgagaaatccaaggagacagggtcacgtgacctacagctcggccttcgctttttgagacttcctctacccacatctctatgtgcctgcagcactttcatatggggaaagatgggcttaccatgttccatcaatagcacctaacctatgctgattttggcggaccgtgctccaccccggtgaactcatgcggttccgacgtgcccagaggccagaggcgaatccgttcacggtccgtaggaccaacaccattcgaaggttgatggcccgccccgtctagaataggaatctttgactgggcttacgcacattcgctcacttacgctgtcccccctcagctcaccccagccccgggtacgtcgtctccaaggcttcacacaaaatcttcactgacaacatatgcatgcttttgtagggtcaggcagaaccgttgttgcctgatgggaacttcccccatattgctatcaatgtcttcatgtcgcacgacctcttaacattacacacgttttgcaaaattacagggttgctactactactagggtgctccgtgaaaaaacttcctttacaaataagtcccccgcgtataacccgcgacccatttgggggtaaaacgaacagccaccggcccatccccttgtggccgactaagacagagcccagtctactagactttggaataagtccactttgactcccttaaaagtgacccgaatctaatccatgaccctcaaccgtaaaaccagataggatgactccccgaactattcaaaccagtgcaatttgactccctcagtggttttggatggcggttttgctgacgtggcgttgacgtggcgatgttgacctgatctgtgttgttgatgtggtgcttatatggcattaaaataaaaaactatatgggctccattcgtcattcacatggaaaaaaaattgcgaggcccacatgtcatcctctatctatcctccttccccccctctctctctctcccttctctgtatgtttctcttcctccagattcggtgtgcagaatctggagcggcggcggcggcagggtgagggccggcgcggaggaaggaacttgagcgggtcgagcggcggcttcggcggcgacgacagagagccggaggagaggcggtggagcggcgacggcctcagctcgccggagaaggcgggggcgtccggcctgtggcctcccccacaatggtgccgcgccaggctgggacgaaggagagggctaatgcagacggcgaagcctgagacgccgccggccctagccgtgcctcccggtctgcgccggaagggggtgccgcctctgtttctttctgcccggagaacatgcatgtgcacagtgttgcctagcagatgcaagtgcagtgccagcgtggggtagcaaggcgcagccaccatggaatccagtcgaattttggcaggaccagcagctgtaggacgaatccgtcctaccagcgtggtccacctgagtcctgcagatcttgaggtcgtggactggtctgatttttttctttgtggtcactgtttgcaaggtcttgaggtcgtggacaatagctacttcatcaccgaggacaacgttggcatgctgaagctcaccaaggaggccaacggcatcttggttcgttgatcagcgcatcgactcatgttaccaattcgcctatgaaaattgctaacatctaaccgtgacatcctgtgattaattggtacaagcagtttgactaccatatcccgcgccggagacggtgggttgcgcagtggtgcactcaaacggccacaccgcggcagccatgtccacgggcgggctgatgaacaagatgaccgggtgcatcggcgactcgccgttgatcgggtcgggggaaggcaaggccatcatacgctccacgctggcgcgcgacgtcgccgccgtgatggagttcaggggtgccgggctgcaggaggccatcgactactgcgtcaaggaacggctggacgaagggttcatcgggctcatcgcggtgtccggcaccggcgaggtggcgcacgggttcaactgcaccggcatgttcagcgggtgcggctgcaagagaaaagagagagaagggagagagagggggaggaagaaggttggagagagaaaggatgacatgtgggtcccacaatatattttgtgtgtaaatgacagacgggtcccacaaaatatttttcattgtaatgccacataagcgccacgtgggatgaagaccgggtcaataccgccacgtcagcaaaaccgctcagggagtcaaattgcactagtttgaatagttcggggagtcatcctatccggttttacggttgagggtcacggattagattcgggtgactttttaagggagtcaaagtggactttttccactagactttcacccacagctcgaaggcccattctacctacctctcgaaagccaaggcccaaatcttatcctacagcgaccaaccaaaacgtactaaactgaaggtacccgccaaccaaaaaccaatctctaaacgccaaactgtaactccttaatccattctcgttttttttctgtcagctggatagggacgtctactactccctccgtctaataatataagtaattttaagtttttgtttgcactgtttaactactcgtattattaaaaaaattaaaattattatttattttttgttacttactttattatccaaagtattttaaacataacttttcattttttatatttgcacaaattttttaaataagcaagtaaaaactcaaaatctcttaagtaaatttcacaaaactacatgtttttttttcaagttgcataaaacaacacacattttgatacttggcactttagtacatatattttggtaatttagtttcacaaaaccacactattgatgaatagattcacccgtgagatgacgtggttgttccatctaagatgaggatgttacatcctattaatttcgtgcgatggctgataataggatgtcatgtcctcgtcctaagtgaaacaaccacgtcatctcgcgagtgaatccattcattgatagtgtggttttatgaaactacactaccaaaatatatgtacttattaagtgtcaagtgtcaaagtgtatgtggttttctacaacttaaacaacaaaatgtgtagttttgtgaaaattactcaatctcttatattatgggacggagggtgtaattatttgtttcatgctcagaattcaaaagtgtggctgttattctaatctcccacgagtccacgacacgatgccgcacggttggccgttgccccgagaccagcgttttgtccatgcgtacgtgtcaaacctccacctaaccatgacgcgaccacggacggcgacgctggcataccgccaaaggctaacgtctccgtcgccgtctcggcgagcaattcccccagcccaccgctcgtgtagtcgtgtgggcgcggcgcggacgtgacgtgcgtcggcgcgcgcccctgcaggtgggtcaatctcaatccctttgctcaattgctccaagtgtcggcgcgcgcgcggttgctgctgggtccgcgcgtcgtggcggcgcagggatcggacacttgtgaggcgcgagcggctgcagctcgacgcgacgtgacgtggccgttgtttgggaccggcggtgatattgctacctccatcccaaaataagtgtagccgtaaggacacgtttgaccgatcatcttatttaaaaattttatgaaaaaattgaaaaaaaatagtcacacaataagtaatattcatattttatcatctaataacaataaaaatactaattataattttttttcaaataagatgaacagtcaagacataaatagtacataactacatttattttaggacgggggagtagattgctagtactaccatgtcgacctttttttttggttgagatgaactgcctctgccataggttgttttgaccgtttgtacccattttgtacattggttttagagaaatcacgttctcaatgccgatgcatgaactgtgaagggagaagcgtacagacgaaagagctaaaccctttgttataaaatataataaattatagcatttagaatttgtttaaaaatatgacaatttatctaccaacatttcttcctaacaaattataacctttcatcgtttaaattcctcacatgtctatatttttaacccatcataacatttttttatttagttttatctttttatatatgtttttaattttttaaaacactttaattatgaaacggaggtagtatttttgttctcttctttcctcacggggaaaaaatgaaaggccgcacagccaatcagccatagaacgcagtgatacaacttgcacaggatgagctctcaaaagcaaatactcaactccatatatgggtgcaggagcagtagcgcgtcaatcgtcaaaataagagtattgttgactaccctactccatttatctaccacgtgccactttaaaagcctcatgggttatgggctgcgtgggccgagaaagaagcggggtctgatgagacgtgtgttgtgctcacatgttctgaacctcctgatgagatggtaattcgtcattgtaatttttgcaatgaatgtcaactgaatatctcatgtgattttcttgcgctccaaatagaatttcacaagagctcccctgcaaatttgaatggtcatcacagctcacaataattccacctgtagttagcatgtatatatatagcctttgtcccgtgttcttcaaaaaataatattagaccttaattcaattgaagataatttctgaactgaagctccaaacacgcacccagcaaaaggcacggcataaaagtgatgttcataatgggttttattgatagtagaaatcaattgaaccatttatctattctgataggaaaaaaatattttattgctctaactattctacctaattacttaacccctaaactctttcatgcttattttataatctgagctattttgtactgaaattttgatagaatacatatgcatttagaacttacgtctagtcctctcttttttttttgaaaattttgaactattagcgtagttcgaaagcactaaagactaatttaacatcaaaaatttaaaatttaaagttcaaacaaacatccatggaaaattttgaaaatattcttgaactttaataatgatgtcatatatggcttaaaaataacagttttaaatacagcttgtataaagaataaaaaaataaatgttatttaaacattaaagtgaacgatttttattagtttaggggtaaaatgagccaaaaaaaaatagttcacgggttaactgatccattgaattagttcggataagtaaaatggatttattttcattaggggaagtaaaatgaatttattttcattataatacaatggattatttattgtcacattgactatgggtaatagaatatcttgtatatttcatcaccgattaagatcaatttttaccagagttagattagaaattagcttaaacgtatctcgggataaaaaggcgacagcacgcaaatccagaacgcaacatgttccggccggagaacgcagaccactcggcagtcgcacacgcgcagccgacgtaactaaccaccttaccaaacgggacgatataagcaaaaccgcgacgcgcgcggccaagaggcaaacaaacaaacacgcacgcacaccactactccatcagcagcagccagcgagcccgcgccgcagccacccgcgcgcgcgcgcgcggccggtgaggtgtgtgagatagatcgtcgagcgcgcgtacgtcgatcgtcgaggctggccgccgccgcgaggataccggcgccggtgcgcgcggtgatggcgtggtggcggaagaaggtcgtcttcccggcgcgccgcgcgtgggccgccgtctccacccgcgtccgcgcccgcaagccaggtacgcgaccaagctaacgattctccccccatcaccctgactctggctggtagtagtacgcacacgcatacttgatgctgcccaaggatggcgtgctagctagttcttctgggagaaataatcttggtatactttcttagagcccgacaagtttgctgctgatttgatgatcttcttggtctggctatgtccatacagttcttttctcttttcttgacgccatgagagatcccataagaagagagagttctaggtctgaattatattggaattcagttctagatcatttcgctacttcgtggagacggtaaaacagttatagaaaagtggcatgactcgtgaaatcatgagtcaaaactatttaggttaaaatattgaagtgcagttacctggatgaatacagaacttctctgttcaactggaaagtcatagccatgcttattgtttttttcccctttgaaattcataatgtctggactttacatctaaaccaacaatccaacatgatactatttggaatcttcactataaaaaagagagatactgttcgaaacaaaactgcccatgttttcatcattccttctccttcttctttcctctgatcttgtattgtcagtatttctggtcatgctctctagagaaggagtaattctcaatctagagcttatgccatctgggaaatggaaacccttttgttttatgcaaaatctagagcttttcttccatcaattatttactcttacagttacagtgttgaccattcttcaatttcgttcacatcaaccatcaaccaagtatttgtccatggtggaatgtgattcttttccactacaatgccgctgagtggatgagactttgcaggctaagtctagaaacaatcttccttttgcaccatctcatctcccactaacattctccaaaaatctagctcatccaacactactcgatcctaacatgtgggtccaagatgaaaagtctatggtgatacgatccctctttttggttgccaaaccagaaaccaccaccaatgccaaaatttctctgtgatttcaaagggtttcaggaatttgttccaaaaattccagcttttgcacagccaccaaaactaaatgctcttctgaaagtcaacctccccggcgggtacaacgcgacagtgaaatggcagcgacctaccagggattatcagcagtgcacagtgagatactgccattggtagtactatggttttgtttggggagtttaagattttgagaaacaactagtgagaatttagttggtgagaatatgaaagggctgggtttcttggcttctaaattttagtttattttctagattgtataactacatattcttaaaatctgggtggaaatctaaactatttgagaaagattctgacagctgaggattctaggagaagctgcagctaacagaaacttcccaaacaggccctatacctagtaccactctgctgcattgctgctacagtaccatccttattcaataggagcaccaagtgtcacactgtcacgaggtcgatggttcagtacactgaagatcagtaggtgcatggatatttttagggtccaaaattcagtactaccacgctgcccaattagtgccagctcgatctcaacatcttgctttgtcaactagcagtaatgacccaatcaaacatgatgtacagttagttacctgcatcttcttctcagatctgaaccagattctgcttgaacacatacactggaactctgcaagctaatctcaaacgggaaagcagcaggagtagagtactgtcaagtggatcgttctgcttgttctgttctgcttgcagcttccctgcaagtgttagcagtatcagtctccaataattcagaccttttggtatgaactgagccgttgcgatttgcggctgcatctgatctgcacccaaagattcttcttcgcggttagaaaagggttcccttgtaccagcgtcgcacgcgacaacacaattaataggagataatgccgtccacgcgtaagcccatcaacttttaaccaccagcttgtctagagctcgaggcagggggcca

SEQ ID NO: 16548 - DNA, 522 bp, Oryza sativa
tggaacaagagtgatcctaacaaatttaggagacaatattatccacggtataataataacaggaactcatataagagaaaaagcatatgtacccataataaacttaacaacccgaggaaatcaatggccatttaccttgtgtctgacgacagttcccaataaaagtgtgctattctatgactataaataaaaccaaggacaaactttatctaatgttggtttatatctaaaaaaaccagtctttacacatggccaattatatgtcgcaatctcacgagtaagcaatagttaaggtttaaaaattctaacagaaaatgaagatgggacatgtgcaacacaaacaaaaaatatagtatatagagaaattttagattcatttacatcttaatgtatactatatttttctctatatactatataaacacaaacacagtactaacattttccattgcttataatttgcagatgaatatcattgcaattgcagagctgcgcccagggcgatatgactacatgatatgc

SEQ ID NO: 16549 - DNA, 7637 bp, Oryza sativa
ctgggattaaaacttgaacagtctatgctaggttttaggcttaagaaaaaaaattacaaaccttgctttgcgcaaaaagaacaaaagccatcctttgaattcctctgtcatgtgcaccattcttgtggtggcttgcaaagaacggttggtactcacccctgcaaatataaaattaatcagaaccaggagatgaagcctcgaaggatccctatgcctactaccaggagggagatgaagacgatggcgctcagtaggtcttagtacggtcgttgcctgtggcaatggcatgccgctgcctgaattccgctgccttatctatttctgcttttgggatgtattccggaccgctcggtccgatgatttaagactacgcctgcgggcttatgatgtaataattcgtattagacactcgtgtatgtgcacttggtatttcagctatgaattcgtgtgtaccagactacgtgatccagggaaatggtactgtttacacgattgattcctgttataaaaacgggggtccacagagctggtatcagagccatatgactgtaggaaaagaccaaaaggcgccccaccccttttctaagttggccaagggagaaattcccatttagtaatactttcaaaaataaaaacgctatatttacaaaactcggtacaattttcatcttactcttaactattttcttcacaaaacaagttttactctcaattgactttgggtttttcttaaaattagatggcagattcggattcacccgctacctgagagttgagcttacctcaatcagaggggtatgtcattgagctgcatcgtatgttgaggcgtctgcgatactctgggttcccgtcataccgagtgagacagtgtggctcactttgggaggctcgggtcgaggttcacccccgagtcccttccgagttggactacagctttcagacacgtcaccaccgagacctgccagataccgcgatgcaggatgcagcccgggaggccttcctccgactcagctctatccaccgagctgagttagtgagtaccgagtttgctcatcacccgttccgggaggagagcaactcagtttgcacagttcaggacacgccctgctgctacaacccgatggtgactcggttgtcacgatgggctgaggcagtagatgactactacgaggaggctctgttggagattgacgaccaccagagacgtatgggagagctggagactgagttgactgacctctcagtgcagcagcttcagttggaggaggagcaccaggcttggggcagtgagatagacttactgaaggcacagctccaggtccacggcgaccagttccagcagttatctgaccagtacaacgatcgccgcgggatgatggatactcttgaggagcagctgagagagagtcaggagcacgtcagccagctggaggagcagcttcgagtagccaagatcagcaccacaggggcttctacttccacagcagtaggccgtgaccgctactttttcctcaccccgccgtacccaccggcgttccacgctcttctgggagaggctagtatgctagctaccgagtcagcaccttacatagtggacccgacagcagcacagccacctgtcccggagatggtgcacactccactgatccctacaccttctccgcagctgggttccagtttggagactccgatctaggtcgactccgagacagaggggaccgacaccgagccagagatcaagccagacatcactgatccttcagaggatgagacccctgttccccgcatcaccttccttggaggtcctcgcaccctcagcactactcgcaagagcacacgacctccgggcaagaggcccaagccagatccagaggccactacttctgagccgtggggactccggtttgcgcgtgccagcgaccaccctctacctgccccaggatcctgcggatggctggaggactagactgacggactccttgcagcttcgatctcgtatcagatggtttttggatagtatgcgagacacccccctcccttacctagattgacgagtagattgatgattagtttgatgtatcttttggatgaaccttatttggactgcgtatgtatgcagtcgattgcatcatgatttatgtgccatttgtgaaactctgtgatgttatttatgatatctattgttgctgtgttataaatgagtttattccaccatgcttgcaaaacaaagttcacatcaaaacaatctcccctaatgggataaagccgtaaaagatagctagagaattaggatacttactcaatcaatcaacctgcacagatggcaagccgacgtcgggcaacaaccagcaatgacgaaactcagacacccgacttagccactctggccggagttatggccacccaaactcaacttctgcaagctatcgcgaacaaccaaggcaaccgcggagggccaagctttggagagtttatgaggaccaagccacccacattcgccacagctgaagaacctatggatgctgaagattggttaaggatcattgagaagaagctaactcttattcgagtacgtgaggccgataaagtgatctttgcggcaaaccaattggaaggaccagccggagactggtgggacacgtacaaagaatcccgagaagaagatgctggagaaccaaactgggaggaatttaccacagcctttcgtgacaacttcgtgcctgccgcagtgatgcggatgaaaaagaatgagttcaggagactacggcaagggaataccacagtacaagagtacctgaaccatttcactcagctggcgcgctacgcgactagagatcttgccaacgaggaggaaaagatcgacaaattcattgaaggcttgaatgacgagttacgcgggcccatgattggacaagaccacgatagtttccagagtttaatcaataaggtcgttaggttggagaacgaccggaaggtcgtggagcacaatcgtaaaaggaggcttgccatgaaccgcccgcctcagaccgcaccccagcgtcctaaagggacaacctcctcggcatggagaccaacagtggtgacaaccagtcgacctgccgcctccagtaatttccacaggccggttaccattcagaaccgcgctcctgcaccgaatcaggccgccactggatcagtaaggccaggaagttgtttcaactgtggagagtatgggcatttcgccaataaatgtcctcatccgaacaagacacccattcgcaccggagctaatgcaacggctattcacgggactgctacccctgctgctggacgaggtctattcaggactccgcagactaacaggaccgctaccgaatttggacgcgggcaagtgaaccacgttcgagctgaagaggcccaggaagaccaaggcgtactgatgggtatgttttgactcaactccactccagttaaagttctcttcgattcaggagcatcgcattcatttatatctttgaaagcaagtcaacaacacaatttaatcagagttaaactaagacaaccaatgttagtacattcacctgggggtgagatagcagtggatacagcttgcattgacgtacccatccgccttcgggatgtggtatttccctccaatcttatggtgctaataccccaaactcttgatgtcattctgggtatggattggttagcaaagcatagagggataattgactgtagacgtagagaagttaccctgaccacaccctggggatcggatatgagagcaaccatggatcaagatcctaggctaaccgaacgtgccggaggtatatttaccatgctacccctaaagggaatgcccgtagtgcagcgatttcctgatgtgttcccagaagatttacctggaatgccaccagatcgagacacagagttcattattgacctgatacccggaactgcccccatatccaagagaccatatcggatgccggtcaatgagttggatgaacttaaaaagcaaattagggagttgcaagaaaagggatttgtacgccccagttcgtcaccttggggagccccagtgctattcgtcaagaagaaagatggtagcatgagaatgtgtgtggactaccgctcactgaacgaagtaactatcaaaaacaagtatccactaccacggattgatgatctttttgatcaactcaaaggagctaaggtgttctctaagattgaccatcggtcaggataccaccaattgaaaattagaaccggggacatacccaaaactgcgttctcaacacgctatggattatatgagttcaccgtaatgtcgtttggtttaaccaacgctccggcatactttatgaatcttatgaacaaagtgttcatggactacttggacaaatttgtggtggtattcatcgatgatattctaatctactccaaagatgaggaagaacatgcggaacacttgcgattggtactcgagaaacttcggaagcataagttatatgcaaaattcagcaagtgtgagttctggttaaaagaagtcgcttttctaggccacgtaatctcggccggtggagtagcagtggatcctgctaaagtggaggctgtcacagaatggaaagcacccaaatctgtgactgaaattcggagttttctaggcttggctggatactaccgacggttcattgaagggttctctaagatagcccgaccaatgacacaactactcaagaaggaaaagaagtttgtgtggtcagaacagtgtcaggaaagctttgagcagctcaaagaaaagctgacctcggcgcctattttagttcttcccgacatcaggaaagacttcgttatatattgtgatgcgtcaaggcaaggactaggaggagtactgatgcaggacggaaaagttgtggcctatgcgtcgcgacaattgcaaccacatgaggaaaactaccctacccgtgacctagaactcgcagctgtggttcatgcgctaaagatttggagacattatctgattggaaaccattgcgatatctacactgaccacaagagtctaaagtatatcttcacccagtcagatctcaacttgaggcaaaggcgatggttagaattaatcaaggactatgatctagaagttcactatcacccaggcaaagcaaacgttgtggccgacgctctgagtcgtaagagccattgcaatcatctgagaatggaagggatgatccctgagcttagggaggagatagctcagctgaacctacatatagtacctcgtggacagataaacaccctggacattcaacctcttttgagaacccaaatagaagaagcccagaaggacaacgaggaagtccgagaggtgaaggaacgcttagctacaggacgtgcaaaggaattttcaaccgacgaaaaagatgttctatggtataaaaagagaatttacgtacccgaacagggtggactgaggggattaattttaaaggaagctcacgaatcggcatattcattgcaccccggaagtaccaagatgtaccaagatctgaaggaaggatactggtggcccaacatgaaaagagatgtggcggaatacatagcactctgtgacgtgtgccaaaaggtgaaggctgagcatcaccgaccggtaggcttgctgcaaccccttaggattcccgaatggaaatgggatgagataggtatggattttattgttggattgcccaaaaccgcaacaggatatgattccatttgggtgatcgtggatcgactcaccaagacggcgagattcattcccgttaagacaaattatagcagtgctaagctagccgagttatacatgaccaggatagtatgtcttcatggtgtacctaagaaaattacatctgatcggggcacacagtttacctcacatttctgggagaaagtccatgaagccctaggaagttacctcgcatttagcacagcttatcatccacagacagatggccagacagagagaaccaaccaggtcctggaggaaatgctgagggcttgtgctctggattttagcaaggactgggagagatgtttgccctacgccgaattctcctacaacaacagctttcaagcaagcctaaagatgtcacccaatgaggcattgtttggtcgacgatgtcgtaccctgctaatgtggtccgagactggagaacaggcggtatttggacctgacattattcaagaagccgaagaaaaggttcgcttgatccgtgaccgtctaaaagtagcacaatcatgataaaagagttacgccgacacccaaagaagaaacctggaatttaaggagggagattacgtttatctaaaggtttctccgatgaggggaacaaaaaggtttaaggtcaaaggaaaactggcaccaagatatgtgggaccattccagatcatcgccaggcgaggagaagttgcatatcagctacagttaccagagaatatcgcggatgtgcacccagtcttccatgtgtctaagctaaagaaatgtttacgagtgccggaagagcaagctccgctggaagagtcacattagcaaggatctcacatatccagaacacccgatccggatattggatgaagccgaaaagaggactaagagcaaagtgtggcgtatgtacaaggtacaatggagcaatcacactgaggatgaagccacctgggaaaccgaagaattcttgagtacggagtacccgcatctattcgaaaactggtaagaaatctcgggacgagatttatttaaggggggtaggtttgtaacaccctgaaaatttgaccgacaaaatcaaaactataaaaatacggattttcaaaaactttttaaactaattgcatcatgctgatcttattcgtctattttatctggatttgatctcgaagattattaatcgtgagtaaagaatagttaattaggaataaaccttaaaaacaaattggtaaaataaatacaaattaaaataaagattaggtggggatagaaataaataaaatattatcgcaaccatatttggatcaattaaatttaaatacgatggaataagaattaaccctaattaaaactcaaataaattatataaaaataaaatatgagtaatattaatctagggtgaattcattagttaagataacacaaatattgagtaaaatgcatatatgcaaaattaggaatcgtggaatcaaatttatatggaaaatacactaaaatcgggttaattagaaatcggcactgttcattgcacctaaggtgttcgacggggtcccctaacccagctccttcttttttccccctctctctgtcgccatcccgtcgccgcgtgcgcgttccatcgccgcctcgagccttgccgctgccgcgccgcgagcccgcgccgcgccacgccgcgtcgtcctatcgttgctgtcacgccgtgccgtcgtgtcgccgcccatcgcatcccgccccgagccgcgcgccaccgctgtcgccgtcgccatcgatgtcccgtcgccgcgcgcgtcccatcgccgctgccgccgctgataccgcgccgcgccggccgttccatcgcctcgcgccgtcgccgttcggccgtcgcgtcgccgatgccagtcctcgcgccccgcgccctgccgcgccgcgttgt

SEQ ID NO: 16550 - DNA, 17229 bp, Oryza sativa
agaggagagaaaaaggagagaaaaagaaagagagggagagaaaagagagaaaaagaaagagaggagagaaaaagagggaaaatagaaaagaagaaacggagaaaatagaagggaaattgggggagaaattaggaggatttaggaaataaaaatggtcggggttaatcatagattattttcggaaattcctcgagcgtaatagtatttcggtcgaaattccgagttaattataaaaatatgtttcttaaacagattagattaaaattggtagtaatttagatataattaataactaaacaattagatgaattcttatagattattatagattatttttggtaatctctataagtcatcggttcacggtagaaattcggatttaattactaggaatcttagccgtgtattatatttaatcgtttagtcatagactgaattaaattgtataatatttctaggatttcgtccgatatttagctcgtaatagaaatttctaacctattatatggatataatgctcgggaagagtaaattaaaaacttatgacaacaaaataattatacccgcaaaatagtttaaatcgaaattgggtttgccgtagttcgcagatagtaaagttaataaaaaggaatcgactttcgcatttgactttcatttggatttatttggatttttatttgaattctaaccgaattcaaatcaatttttgcacgtaaccatagagcccgagggagttgcggatccaagcgaaggccaagacccgcaagactttgagcaaggcaagtcatcactattccttgaacatgttgatcccaattgcaaaattgttttgtttacaaataaaattgcatgcaatgatgaacatcctacttgtgattatgccatgccttgattattgtttacccttaaaatccttgtaaccataattacgtatgagtccctagtcaattatgacaattgcttagaaatgccattctagaatcatgcatactcatatttatcaaatgctatatgcttggtcaattacctttgggaaggtaattgagatgcggcatgtggagacatgagcgccacattgccatgatgttgatgacatgatttgtgaaaggagaaataaaattaaacaattgttttcgactggggcggacggaggatttgggtggtatctgggaaaggctagtaccgtccccggtcaattaaggaccgagccatgaagttaagcatgaaacgacccccgtacaaccgcacttctcatatgggtatagacctagcggattagatagccgaacggaggcagtatccctgcatagatggttcacccctgagtgaggcaggtgcgctatggtgggacagccgttgaggtagggccgagaggcgtgccctacatcggtgtcgccattggtaggactgccatgagtgtgtgagagagagaacttaacttgaaccataatttaatatgtgtgtgagacttctctttcccgggagcgccagaactcctctcactgttagaaacatggacgcctagagtgcatgaggatttaagttcatggagcgggtactaccaatgcgaggttatcgaaaagctttgcggtgacgcgtctcatgtgttgggacgagactcatgtgttgggcagtcgcggagtgcgggtaaagtgtacatccactgcagtgtgagtaaaccaaatctattcgaatagccgtgctcgcggttattgagcaccgggacatgtattacacttggctagactctaaattcttaacttgtgggggatgggatattgcatgatgaattttatgctgagggagtcacttcccgagaggagggaaggtggacatcctcagaaaaccatgacgattcaatggcgggaagctatccttgggatcacaatggatggtggatagaaccgtcattgtttaatatgaacactggtattaaaacttgaacagtctatgctaggtcttaggcttgagaaaagaattacaaaacttgctttgcgcaaaagaaccatagccatcctttgaattcctctgtcatgtgcatcattgctgtggtggcttgctgagtacggttggtactcacccttgcaaatataaaattaatcagaagcgggagatgaagcctcggaggatccctatgcctactaccaggagggagatgaagacgatggcgctcagtaggtcttagtacggtcgttgccggtggcaatggcatgccgctgcttgaattccgctgccttatctatttctgcttttgggctgtattccggaccgctcggtccgatgatttaagactacgcctgcgggcttatgatgtaataattcgtattagacactcgtgtatgtgcacttggtatttcagctatgaattcgtgtgtaccagactacgtgatccagggaaatggtactgtttacacgattgattccagttataaaaacgggggtccacagaatactacatattcagtaatgcacagcaggtcattttgtgatggatcaacattactgtcgatgctaggaatccgcaatatgaaaagggtgtagcgcatgagaactaaagtacgtgagttggatgacaaaagatttatacaagtttacgaccttatcgagaggtaatatcatactcatgatgttaagggatttgtatatatgaggtgctgtatctcttcttcctatatagttggtacccactagagaagttattactataaagtttgcaccacgttgcgccacatcatcatttattttcagccgttggattggactgcatgtttccagatgaacgatgttgatatcttgggccaacttcccatcattttttttccgttgggccagcccaccctgcacacgctccttaaattcttggaaaaaagttaatcatattgccaagaggctaatatgacaaatgatgtttttataaagttttgaacttactcagttaatcataggctaatcctgttttttacacctaacatatcttcacagcaatcaagcaaatcgaccagctcggtacgctagaataccatgtaccttgaattgggtttcctgattgaattgtacttgtttaaacgaacatttaggcgcatctctatctcaacattgtaaatctccttttcttcgtatgctgattcagtgaccaatttacatcaattttatgcacatagaaaattttatagtgtgcccactgcaacgcatggggtatgaactggttgatataatgatcttgggtatgattatgcccttgaggggcctcctacctgccttatgtaggtcgggggcaagattatagataaaacctaactaaacctggtatctatttgacaatattccggagtcagagctataggccgtatcccttaatactcagggaaacgtaatactcaaggcttaatcctttacatattctagagatataaactatctcatataatcagtcgataaactaatcgtatgggtatatgatacccgtaatctccacagtagcccatgagcccttcacactcgaaaatacggtcgcatcggctactttgataatactgtcttaaatcaatttgttaaattctatagacagccgattggtcatgtttagggtttattattctttgatatatccagtccataccgatttggtctaactccatcgactgagaccatcaacgatatgctatcggcctatcgatcgatcggctatcgatcgactgattctgcttttgtcctttcttgctgattgcaggatcaaatcagctggtatgccctagacacactcaaggctaaccttggacctgcactggagttaagcagatctcctaggccgccgtgttttcacatcaacaagcttttggcacatctagtgggacaaagttttgttattcaaccatgtcgtcactgtctgacattggtaaagaaaatgttatacctgctaaggttgaagatctgtctgaagagcaaaaggcagagatggagcagaagatgcaagaactgaagaaggcatatattaattctttttctatgactcggcaagggaaagttattcaaaagtacaagtgccaaatgccgaagttagaaggagaaggagcatctggtgccaaaggagagcagaaagaagatgataataataaaaaacagttgatgactttataggatcgtcttgatttagctgtgcaccatgctctcatcaaccaatctggaatcttggtcaccacattgtcaaatttgatcaactcagtggttgatgggtcgattgctgagtagaagacaagaggaccagtatatttaccaagtggtgttttttttcccaaatatagagaaatcaagactagtcttgggaaagccgagtgcttcgatcatcttcaccacattctcccaagtgcttttaccaaatcataaggctgtgaaaggctgaaaaaattttatgagataataaagaatatatactcagatacatcgactagatacaccttattaggtgtagccctccgactatatggttagttggacaaactaagtatatagtcaaggaataaataatctaaccaaacaagtggtttttgataattatagtcaaccaagtgacttaatactaatatatagcataggcggtatgaatcctcaaacaacatgatccgagtgatatacctactacttattaaaaagtataatgtgcatagccaaaagccaactgcatctttaaaagtcacatagtaaatgatttaataaaaagcctttatgcagtgagtaaaggaattttctatggttgttcacattgtgcgcatattgccaggacaaatatgtttatgtccctataagacacacaacatcgccacagccaaaaatatatggcatttgtagtgtaaaatccaagtaaaataacactaacgaatggatttaccaactgcctgaaaatgaccaagatatattattagactacaaccataatattggtcttttagaaaaatgcacacataagtggccgaaagcaatgataaactaacatcaatcaattgctttataaaaagcaaacatcgtcttaacaaccatacgtaaagctttacttttgccaccttttaaattgtattgtgccaactactgaaaagttgtgtatcagatatataaaaagatttaaggtatatattagacacttgagcacgcatgtattgccaagagcaaaaatgcttaatccctaaaggtacatgacagaacacaactgaaaatatagtccgtgaactcttgatgggccgtggcccgataattccacggatcgataccctaaaatataaaactgactaatgaggcctccacaaactgcccacagccacaagctgtctgttgcactgttcagcctaacgaggcctcgacacagaaaaaaaaaagaaaaataattaaaacgcacaggtataattgctagtagtaaataaattacaataaatcaattctaaaccattatcggtaccaatcaacatatatacacccctagaatgacacgtcgctgccacattcgcagtgccgccttttatgaaacattccagagggattatgcaggtcgagatacgtcggtccatcaaagcaagcgacgaacaagtcagtactccctccgtcaagtttacttttcatgcactaatctcacacgtaacaataatacgaaaccaataaaatactgcaatactactattttatcaaatcataatacaactatttctcactttatctacttctattattattattattatttacttttacaaactccgatacaataattatctttaaaaaaattatttaggataaatgagaggagcctaaaaatatggccccattcaaaacaaagaaaaaaacataggaattccaaaggattttatatcctatgggatataatcctgcgtgaccttttgaaacgaagtattgattcataccaatttatttggaattcctatggaatggattattgtagaggaattttggaggaaaattagcatgaggcactactacaaaaaggacatgtagagacatcccgtaagagacggttaagcaagtcgtccctattaaagcccatctcctacattgcctcttacgtagatacactaattagagacaggataatagaccgtctctacgatcacattaatctatttggtaaattttgaagttgactgagagaaaaaataaatcctagacatggccgtctctacatcacataaaaaccgtctctaggggctgcttctactgcagtgaggtcttacctcatattttcttcttcctatgtcttgaattcctatattttccttgtgtgactatatgcaaacggtagttttgaaactttcccgtgttttcgaatcccgtatatgaatctaatgaatatggcattctattcttatatttcttctattcccatgttttgataatcgtatatttgaaagggacggaggaagtagctagctagcttaattaatttggtcacgtgtagggtaatacacttccaagagaacatccacttcacaagagatctcctactttcgttggccctagctagcttagctggaaatgttagaccatatattgcggaggttttaggattatacgatgttgatgtaggagtattctagaagtccacgagtataccttctgtcttaaaaaaaaagataattctacctataaatttagatatatggttaaaaattcgtttttttaagacggaatagtaagtatatgcatatcgctacttttgcaatagaactaacttctcgctgcacactaaggccctgtttgggagaacttgtcctagctgcagcttttttctaaagctgcttctgctagaaaatgccccaaacagtccatagtttctgagaatctgtagttatagattctgaaaaatgaactaagaagtcagaagctggagaagctggatttcaaagcttttccaaattcttaaaagctagctactaaatagctgtttctcagaatctaaacctccctaatcaggccctaattctaggcgtgggcggaccgcatgcagcagagctagctcgatcgatcggcaacagctgcaccccatccaagccgtcgatctgtatgacgacaaaaatatacaaaatcgatcagatataacagctgatgatcgatctgttttttttttttttgaacatcgatctgttaggatgaaaattaaacagctcagaccctgtcgaaacaccggttggatctacttggatgacctgcatatcgaccaaacgaaaggtagaagtcaaatttgtatgtatgaccgtcctatatatagtgtggactggggaggacgaagatggttttcactagagttttattatgaatactgatttccgttagatatttaatttgcaggagatattttgtcctagacccgtactatgtttgttcaaatgacattttgccttagaaactggatggcgactctcatgcttattgatactattatctatatatctattatattattaggatagttgggttaataattctcacattaattaaagataaaaaaagattttaagtagaaatataatttaaaaataactgaaacccgaaattaaaaataagcaatattgaaagaaagagtccatatcaaaatctaaaataaaattaattaaaattcaaaataaacattcgctgtgccgacttgtattaaacattccagaaggattatgcaggtcgagactcgagatacgtcggcccgtcaaagcgagcgacggacaagtcagtactccgtccgtcaagtttacttttcatgcactactctcacacgtgacaatacgaaaccaatacaagtctgaaataccactattttatcaaatcgtaatacaactattttttactttatcttcttctgatacaattattctttactttcacaaactccgataccataattattttaaaataaatttattttggataaatgagaggagcctaaaaatatggcgcgctttgaaacaaagaaaaaacatagtatttccaatggatttatatcctatggaaaataatactataagacccttggaaacaaaatattgattcttatcaattcaagattcctatggaattttggaggaaaattagtacgacgtcttacctcatatcttcttcttcatgtgtcttgaattcctcatttttcccgcgtaactatcaaatggtagttttgaaactttcatatgttttcaaatcccataggaatccaatgaacattacattttattcctacattttttctatttctgtttttgacaatctagcgtttcaaaggaacggagaaagtagctagctagcttaatttggtcacgtgtagggtaagagtatatcggatacactccaagaggccatccacttcactaatttggtcacgtgtagggtaagtaagatctcctactttcgttggccctagctagcttagctggaaatgacttactacctccaattccaaaataagtacagccgttggtatccgtatccaacgtttgactatctgtattatttgaaaaatttatgaaaaaatttaaaataattagtcacacaaagtattattcatattttattatctagtaacaataaaaatattaatcataaaaaatttttaaataagacaaacggtcaaatgttggacattatcgatataaaactgtacttattttgggacggagggagttgaccatattgcggaggttaggctagaattggatgttcatgtaggagtacgctacgaagtaactccccccgtctcataaaaacaaatctaagattggatgtgacatattttagtattacgaatctgtacatatagaagtatgtgttacatctgatattaattagttttctatgagacggatggagatgcatatcactactagaacttgttcttaaaaaaaaaaaggaagagtagagctaacttctcgctgcacattaattctaggcgtgggcggaccgcatgcagcagagctagctcgatcggcaacagctgcaccccatgcaagccgtcgatctgtatgacgacaaaaatatacaaattaatcgatcagatagcagctgaggcgttgattaaacagctgatgatcgatctgttaggatgacaattaaacagctcagaccctgtccaaacaccgcttggatctacttggatgacctgcatatcgaccaaacgaaaggtagaagccaaatttgtgatatatatatgtatgactgttctatatatagtgtggactggggaggagtggaggacgacgatggttttcactagagttttattatgaatactgatttcagttagatattttgccctagacccgtactatgtttgttcaaaagatattttgccttaaacactactccagatgacgacactcatgcttgttgatactattatctctatgtagtatactattaagaaaattataaaagtaggtatcacgatagttattggggctacaaattcccacattaattggagataaaaaaaaatagaagattttaagtaggaataaaatttaaaaataactgaaattcgaaattaaaaatatgtaattatcaaataaagagtccatataagaacccaatacaatattaattaaaattcaaaataaaaaataaaataagatctgaaattaaaaactaagagagttcaagtaagaatatagttttgaaacaactgaaattgaaaaataaaaaattaggaattttgaaagaatactccatatacagcacaatacaagattaattaaaatttgaaaaaaaataattaaaaaaggaaaatagaaatacagtttataaatactgacattcgtaataaagagaagataccatctgtaacacatgacgagattattaaaattgggaataacgaataaaatagtttccaaaaatataaaaataatataagagttcaagtgggaatattatttttaaataaaaaatattggaatgagaatatgaaattttaagaaaacaagttcatctagaacacaacgatgacaaatcacaataaagaggggagaagcaacacgctcgcagtgggtgttagaaattcccacattaattggagaaaaagaaaaatagaagaagagtttaagtagaaatataatttaaaaataattgaatatcagaaataaaaataagcaatatttaaagaagaaaccatataagaacccaatacgagattaattaaaatttaaaataaaaaataaaataaaatccattagaaaaatgattataaaagttcaactagaaatataatttataaataactaaattttgtaataaaaataaagattgtcaaaaaaagacaatctagaacccatgatgagattaattaaaatttaaaataagaaataaaataaattccaaaatagaaaaataaatataagagttcaagaaaaaaaataatataatttataaataaaaatattggaataaaaatatggaattttcaaaaaataatcatctggaacacaacgatgacaaatgacaataaagaggagagaagcatcatgcctgtagaggagtagagtggtggcggttaatgggttatctgaaaattattagcaaaacctcaaatagaattccaataatgattaaaaggagagacggcagatatgtcgttaagcagtacagtcatggcgattgcgggacttctgaaatgtaaaaaataaaccccaacaaatatcatgtttgatttttaaaatctcaatggcaataaagaggggaggcaggtaagtcgtaaaagagtaaagtggcaaagacgctgacggtttggcgagatttctagaaaaataaaaaatgaacccaaattattattatgtttgattcttaaaatcccaatgataacaaagagaaggaagcggatgggctgtagaggagtatagtgacagcatttggcgagacttctagaaataatgaaaacgaaacccaatgacaaaataaactcaaaaactacgatgttcaatttttaaaggttataagaaaaatgaatagaagcagtggtagaccgagcaagcaaataaaacaaggggtcacaaagaagcaaggaatagcaaccagcgtggcatttaaaaactgtaaattaattttacaaacatgagcattataagatttgttctttcgatgtcttaagataacgagttagctatttaacaaattataaataaaaatataaaaaatatataattttgtatgtgtgctagccgtgtaattgcgggggccacctagttgtattaaagcactctacttttcaagccccagatggaacgtactgtttctctaagagaaatcaagtcaaagtcagttagaaatcaagtcaaagtcagttagaagacacgacaacagacctggagtaacgtactactgtactgtactccctccgtctcagaatatagcaacctagaaccggattagacatatcctagtactataaatttagacatgagacatgtccagattcgtagtactagaatacgttccatccggttttagattgctatattttgggagggagtactaaagtcaaagtcaattcaattcttgatcgactcgtcgtgagctttacgtacactaattatttcacacgtgtgccatgccagcttcgttttccagtcgtgttacgttttacaactccacagagttaggaaacaaaattttaatatttgtgacaactgtaaaacaaaattttcataactgtcaatacaaatttgtgatgaatatatcagtagtacataaaccatttctacaaacggtcaaaagcgatctttgcatacggccatcccaaccaaccaaaaggtctgcgaaaatattttttttttcatgtggccaaccgcatgccaaaattccatttttttcacgcggtttcctataccggctgcatacaaaaataaattcggcgagaaaaaataaaaataaaaatagaaaccgggtgaacctaggcccgccaccatcgtcattcggatccgccgcccgccgccatcgtcgttagtgccatcggatccgatggtcccacctccctctgttgtgtcaccagcactagatccacacgagaaagacccccggtgctagatccacgcggccgagaacgggccgtcgccgcccgttcccggtcgccgccgtcgtcgtcggtgccagatccgcgaggggacgagccgctgccgccagctcctggttgccggcacctgacgctgttgccgaatccatgtggggtggccccactcccagccgccttgtcgatgctgctcgccgctttcggccgcctgctcccggttgcccactgtcatcgtcggatccacgcgcgccgcctgccgccgagcgccaaaccccccgccgcctcgcaccgagctgctacctagggcagcagatccggccctcccgagggtggcgttgccaaatctgccgctgccgcccggcgacggcgcgtcgccgcagccactcctggtgcccgctgtcatcgtagccgcacctactcctacccctctcggccgttggctcctactcggatagagagagagaagagagagagcagacgagagagaggaaagtaaataattaggagaggagaggagaggagttcaaaaaataaataaatgatgagagggaaaagagagtggagggagataaaaaaaatatgtaaagggatgatatttttcatgcggatcacttaagaggtccccttttcgcatatgtcctcttaagaggaccgcatgagaaaataggcttatttttgcatgaggctccttaatagacccgcatgcaaagagaaaattgattttggcatgcaggtcttataaagagctactcccttcatttcatattataagaatttgtaatattgcctacattcatatagatgttaatgaatctaaacacatatatacgtctagattcattaatatatttatttgtacggacaatgctagaaagccttaattataatatgaaacggaagaagtatatgcgaaaatgaagatcagtttttgcagatgtcgccagttacgtacggtctctttgcaatctaaagggcttcttgtaaaaaaataatcgtttttatagtgtattgggatgaatttctagtggaaacagtacgggacaattagaaacgtacgctataggaattgaaacttcagattgaaaatcggaaaccgcgcgctatgatcaggaattcccgtattgtttttcacgttatagcatcacccacacaatagcctatagaaacctggatataggatgatccaatgagaattgaaaaccacagctcatgtgctctttaatgtaaaatccgaagaagtattcatccgagaagcgcgcttattagcttttttattacaacaggtgctcttttctaaatatagttcacatattgctaccaattgttataaataataaaataaagttgtcgctgaattgtgacaaagaaaataccgatcaatgtttcattcatatttccaattatcaactgtgctctaatttgtttatcctaaataaaagggaatagcacccctgattatcaatatgtatcaaaggtgaaagactaaattaagtacatatcgggacaaaaattccatatttgttcctaaacactcacatattcgtgaacgcacagcaggtcatttgtgatggatcaatattaccgatttcaaatggctaatatctaacggacggatctaaaagtagcccgtacgtttgatatatgcatatgtggataccagtcatagaagattagaagtgaatccatctataatgggtgttagttgtgacccgtcatcaaagatgacaggacatttctaacaagtgtggtagctacagatagggctgtcaatctgtttgagtttgatttgttacagcttaatttgagcacgactcgaatgctacagacaagccaaacttaagcataggttgaggttcgcaaacctagtgagctcgagctcgaatagcttggtagggtttgattagcacaggatgcattgcatgtagaaagatatttttatgggtcaatatatacttgtcatcgtgcttgacctactcaagtctcaagaccttatcaatgcttttcaataaagctattatctgtctgctagtaataatactactgttcctagtagatgtagacatgtagtagctagctttttttaatttcaacgttttaaaaccatgaattcatgagagaagctgcaggcttcattcaagacaaaaggcaccaatttagttttgactaccgatagtttgtattgatatcttttatacaagaggaagttttggaattacaccaagtaggctcaaagctcaatcgggaaagatcgtagatttatggttagtgatgcgtgaccacgactagatacctagtaaaatttaaaattcttttagggatttttggtgtctttaaaattaaaaaaaatcatgactagtagtgacggtacataacttatacgtatagatgacttatggaatccatcatagataaggttttctttgtcactgacaaatgagaatagatgggacatatacccgttacagatgtgggttaccgcccatcatatatgaggggttccgttgtaatgaaactacgtgatcttggtttgaaattcacttgtgaaatcatttagtaatactttgcaaactctcaacatgatccgtactttatctttagactacaccagtcaagttttgataatgtggcagctgggtggtgaagtatagttagtcaaaaaagtgataaagtcattatgaaatcactaataaataaaaaaagtaaatccatattaacttggttttttttaagagtctctttgtttaggcttagacttattattggcttcggtttttaagtcagtttttttggtttatataacttataagccaatggatataaagtattaagtttaatggtgtggttatacatgtaccgcacataagataaaaaaacttctccaacctagcctttggattaatagtgtatgagtgacttatgacttaaacaaaaaccaaacgaaaaggttgcttctttgcttagcttagacgtagtgtttagggtagaggttagcttcatttattgtgtgcttcacagaaagtgaggtaggcagcaggtggtgacagtcataatagagttcaaggccgaactcagcctgtcagtagactagggaagggccggtgcccaaagcattcgatagagttttaccttggttaaatccataggaatattctctgtcctaagcctatcatttagttgttgtccttggttaaatcctgttctgagatacacacgttccttctgttcgatacgcttggaatactcttgtgaatttatctgtgtgcgtaacaaataccaagagggggaaggggagggcaaggggaggaggcgacgagagaatgagcggtgagagagcgatgagacgaggtgcgcgggcatgagaggacaaggaagcgaggggcgtgagaggataaggatgcgaaaggagctggtttagctcgctcccaaccattggcgtgactcgaattttaagggtgctggatttttaacagaccggcacctaaaatatattatatattctggtttaaccgacacctataatatattaaagttgttggtatttttacaaaataagcacataaagtattggtccagttttctctggaactggtatacatagttggttaaaggtattggtttatatttttccatcctgtggaggtgggaaaatgtctatagatgttgtttttacaattttcggcacctataatttgtcccattggtgatgttctatattactagagcctcaacacgtgaacgccaacagaggctgaggaggacccgcgtgcccgcgaagatcgaggaggagctgcggtgactgcgagtttcatcacatcaaaggccgaggaggagccaagctcaccagcctccttgagagcaaaaaagcttgagacatcgccagtcttgtcgccgcctacacgcgaggttgggctccacctctgcgcaagctccaccgtcaggcatcgggcgagctcgtgtgggagagtgtcacaatggcagtatgcttattgtgctaacgagatggaggcacaaccggcgagcttgacgggccagccaccaccgcactcttgagctaggggagaagagggagagagaaggtggggaatgaggaagctaagatagagagaggtgagaggggagggaatctgataggttggtcccaccgattcttttttaaaaaagttgttgactacttgctgcctcgtaggaccaaaataagaatggatggagtcaaatggttatttgtctggctcgaatagttgactgtaaaatgtttggtatttaagttaggggtaattcggttgactgtgatagttcgggagtaattcggattttttccgctaattaatctatgtacgtaaagcttccgccttctctttcgtccgtccgatcccctccctcccaagcacctctgcttctgccttcgcctccccccctaccggcacctcccatctctcccttgctgcacattctcctgctcccccatggctcctgttctccttggcgcccctcctttcttgcctcccttccttctccccccccccaaatctcttcctcggtgcacgcgctccccctctcccacagcccctcttctccttggcaccccttctctcctgcctccctccctctcattgcactcgctcccgctttcccatggcccctctactccctggagcccctcctctcccctatgttcccttcctcttgagcgttcaaggaaaacaaaaaacttatgtccgtgaacacgttttgatgtactcacccggctgtgttcaccacaagagatcgtcgttgccgtttctctctctatgggaccatgccgttgctggtcgtgttcccgttgttctggttttcttcgttgccgatcaccatctatggataagtcacattgtgggacatgtctagctaccttactcaccgccgtttgattactggagcaccgtcgcccaccttccctcctcatatgttttttttgtttcgggtagggaagacaataaactatgttagtcgttgtttctctctctttcgttcttcctgcgtgttcaaggaaaaaggaatcccctcatccggtaacgcgttttgatgtatactcctccggtcatgttcatcaacagtgcttgccattgtcatttctctctctatcgggacacgttgttgcaggcctattcttgatgttctggttttcttcgttgccaccctctaccatctat

SEQ ID NO: 16551 - DNA, 5233 bp, Oryza sativa
aggcccggtacataaagtatggggactaaaaatagacatataaacgtaactgtctaaagaatagggaccttaaatagacttattttagctatttatataccccagcccaaagaagagggaggtaaaatagactttttgtagctgtacatatgtcacagcccaataggagggaggaaatttagacttattctgaggaaaagcacgacggcccatcgtgccttcgggccggcccggcacggcccgaggcgtgttgggccgtgcctgggccgtgagggcggcacgtgggctggcacggcacggcccggtgcgtcggtcgggccgtgccggcccgacaagcctcggcccaggcacggccgggcctgggccgtgccgtgccgggcggcccacatggccaactatagagtaatatagtgtgtcagtcactgtgcaatggccattttgaccgttctaccgctggtcttggtgatgctgctgcttccgttggctgcaattgcatccggcgacccaccatggcagcactactgcggaagcagcggcaactacacggccgggagcaaataccaggccaacctgcaggccctcgccgcgaccctcccgtcgaccgcgtcgtcttcctcccccgcactcttcgccaaggacgccgccggcggcggcgacgccgagcccgacagggtgttcgccctgaccctctgcagaggcgacaccgtcttcgccaacgcctcgtcgtcgtcgtgcgccgactgcgcctcccgcgccttccgcgacgcgcagagcgtgtgcccctacagcaaggaggtggccgtctactacgacccctgcctcctctacttctccggcgacgacttcctctcctctccggccaacccggcccaggtgaggctctacgacgtcgatcgctccacccggcgtggcggcggcggcgccgacttcgtcaccctcgtgagggcgctcctgagctacacgatgcagtgggccgtgccgtacaattccacgggcggcggggccgccgccgtgaggtggtacaccacggtgcggatggacgtcgtcacgccgccgctgttctcgctgatgcagtgcacgccggacatgtccggcggcgactgccggcagtgcctgcaggacctcgtcggcaacaccaccttcaacggctcggtctccggcgtgcgcaacatcggcgcccgttgcggttacaggtacgacacgtacaagttctacggcggggagcccaagctgaagatcgggtcactgtcggagatcaactcaacggcgccatcgagcccaccgccgcctccgccggtgacggagacacgttccggtatgtttggacagtcaccttttatatatactatatatactaggtgaaactatagttggtcccggtcttgcccgggccaagatttgccgggccggcccatgtgctccacctgtggaccaggcacggcccaataagggtcgggccgtgccggaccagcccgaaggcacggatagtccattgtgctttctttgaaataagtttgtttcccctccctcctctttaggttgtgacatatatataactaaaacaagtctatttaatgtccctacactttgggccgtgccaaataatacgtctatttatcctccctattctttgtgccttgtcttataggtggtttaaaataagtttatttcacctccctaaagtttgtgccgtgccagtccggcccaccgtgccaaggcataggcccaggcatggcccaacaaccgggccgtgccggcacgggcccgacagcgatcaggccatgccgtgcctgggccgggctgtcgggccttatggccaactataggtgaaaccccgtgcgttgctgtagaagtatactacgataacgataagtaaaagtaacatgtgttataggtgctagttttagataatctatagatgccggtttaaaaaaatcagacagccacgagccgagccgaaccaagccaacgccccaccacacgataaaaattacgccgctgcccgtatccactcccctcgctcacaaccaaatggggtattgaagttatttcatcatgtgtaatgagaatataaaataaaattatgagcaatgtataattatttttggagatgagatttccttgcagggagaaagaaggtgttgacagttgctttgcttgtgccactgatagcactttgccctgtcgtcatattctgttttgcatggataaggagattaagaaaccgtgagttatagaaatcaacttatcaaatctttaaattgtaatataattattgtttctgagttctgacagactactcttgtgttattagccttttaataacgtatttgttgctttagacaaatcaatgttgcgaaaaaaggatacaatggccagagaagaagtattaaagctttggagactagaagaaagcgattcagagtttatgctatttgatttctctcagatagaagatgctactagcaacttctcggaagataagaaacttggagaaggaggttttggctccgtatacaaggtaaaataaattagatatatacacacacataaaaatcttcaatacatgtttacttgaagtatgaactacttgaactttgtttgaaaaaaaatgcagggccaattgcccaatgggcttgaggtagcagttaagcgacttgctgcacattcaagtcaaggcctggttgagttcaaaaatgaaattcaacttattgcaaagctacaacataccaatttagtaaaccttcgaggatgttgcattcaaggagaagagaacttactaatatatgaatacatgccaaacaagagtttagacttcttcatctttggtatgcttatacattgtttttcaaaaaatgtggttattttctatatatatagcatcaaataaatagtaacatatatccttatacttcactatgcagatctgaaaagagcagcattgctcaactggaaaacacgcctgaacataatagaaggaataacacaagggcttttgtatctccacaaacactcccggttatgcatcatacatagagacttaaaagcaagcaatattctactagaccgtgacatgaatcctaaaatctctgactttgggttagctaagatatttgactcaaatgatgtccaaagaaatacaaaaagggtggtgggcacttagtaagagttaattcacctttcaaatttgttatttagctagtccaagtgatttagggataagctcattttactccctcaactatctggtttgtcttaaaaaacactacttaactctaccaaaccgaacacatacacccctcaacgtacaacctaagggcaatataacccagttctaatggtggtttccatgattttgaaatccaaattcttttttttacttgtattttttaataatggaataacattctggcctttgctcaaaaagctacagctaattattacaattttttttacttatgtctcctagtttggatgatatgtgaatagtatttgaatgtgagtgaaaaaaaaacatatatttttcgatatcaaaatcatgaaaaccattattaaaaccaagctgtgtgttgaacccacatggtattttggttggttttgatagtatgtcgaggggtgtaaaatatccggttacatagttaaggggtgtcttttaagacaattccaacgtttgagggttgtactacagacttatctcttattatgattttggtggatccagactgaggtgttttaacatgtgcatgcattttgttttgatttcagtgggtatatggctcctgagtatgcatctgagggttgcttctcgctgaaatcggatgtctttagctttggagttctggttcttgagattattagtgggaaaagaaacgctgggtttcaccaatatggggacttcttcaacctccttggctatgtaagtttttttaaaaatttagtataagagactaatatattcattttaaagatacacaataatcgagcacactgctgggaatatgtatgaactacacggtttgtgcatgcatgagtgcaataatagttaaaattttatgatagtcggtcttcattttgaaaaattatagcatatgctttatgaaacccgccttaacttggctcatggctcaaaattctcattcactaaaattgcacacaatagctcatcacatcaaacttgttgcaggcatggcagctatggaaggatggaagttggcatgaacttgtagatccatcattagtaagtgaaggtcaaatgatggaaataaagaaatgtatgaaagttgcacttttatgtgttcaagagaatgcggttgatcgtcccaccatgtccgcagttgttaagatgctttcaagcgagttgaaaattctacctgagcccaaacaaccagcattctttaatgtaagggtgaaacatggagagctgtctaatactgcacctagtagcataaacgatgtaaccataacaattgtgaacggcaggtaatgccaatatatatagggactttaattaaaatggtaaaaacccacaggactatataccttgtacagaatgtaattattaaactgcagttatgttacgtagttctgtaacattattggaacggcagatatatatagttgaattacttttgacgaagtgtacaattcaaattaaataatacagtttttccttgtcctaacctttgccaaaattcaaaattatctttggctgtgcatgactttcaattcgctctgccgaaagataaaaggccaaactttactgcattcaagaacaaagaaactgaagcaaactcatcacataaaagatcagttcgttggtattaggacatagatttatgtggaaagctgattgagccaattaatgatttttcatatggacagtgccatcatccataaatatttgacaataagctactctctccgttttaggttatactccctccatctacttttgataggcatatttctaaatctaaaaaatttatttttgatagtcatatttcaatccaacaacctatcctcttaatgacttaattagatttaatgcgtgactctccattcttccatacaagattggctacatgagtatcgagaaatgtaaatattaatgaatcgcttgtttacgacgaataactagtagcatatttaaatgaatgataaatataattacttatccttggtctgtgtgccaagataaaatatgactatcaaaagtagatggagggagtaagac

SEQ ID NO: 16552 - DNA, 17806 bp, Oryza sativa
tttgaccaaagtcaaaacgtcttataacctgaaatggagggagtataagaaacgtattcctggctcttgtttgtgtgttgtctctttatagggagatgtcaatcagacgaagagagatatttctgcaggtttaggccctcttcactccttagaataatgaccctaagttatcaagcaagttgttggttttattgataccgaaagagtatggttacaagggtatatgtggacctagtctaggtctatagatatgctagtcatcggtcctggcgcaatggacacgggtctttggttatattctgcatcataccctccgttccggtatgacttgctgagtacagtgggtagtactcagtcttgctctatctcccaaccccagagttcgagtatgcgtcagatggtggctactcggaggagtagacttcgtccgtgccgtcgaggatgcctgtggagtggtgttgcccgctgctatccaagtaagacttagtttcagtcatccctttaatttccgatgtatttatgtaaaactttttgtttgtaagacgtggatctgtatgtcaatattgtcgtttgtgtaccctggtctggcctgtcctggacaggggttttaatgcacattctggttggaattctattcgggaatttctgggcgtgacaataccctatctatatacacaaagacatgatattactagctagcactaaaaatctctaattaaaagatcttgtccactatgtcaaataggatactcttatgaatcaccggaatatttcaacgggaaatgttctaaagtttcactatcacaagccttagggaattcaaaccgaatacaatgtcttagagtaaagattccgatgaatcgcaacactgtcaacgcaaaaggctattaagtatcattattacacgcgtatagttcaacgcgataacgtctcaaagtatcactattacatgtcttaaggaattgaaatttcggtaacaacttccattgcactactgggtgcaccaagggtacttgcccttccttgccgcttccgaccccgcatcctttgcacgctgcgccctagccaactttcttgcctgatattcggcgcgttcttccttcttgtgtcttgccaacacccttagctccaactcttctctcctctccctctcagtcttctccattgcccatgctggcattggcgtttctcacgttcttcattccactcgcgccattgccaaatcatactcgtatggaactcatccatctccttgtcaatccactccacaaagtcacaaagaggaggagggatttaggtgcatatacattacatcacaaattatatcttcacgacaaagttgcatatattcaagatgaaacaatagaaaattaacaaatttaccttcactgccatctttgtctttccctcctttcccttaggcacatgcttaggtttctctgggctatatgcatagttgcggcacattcagtacctctggccataggtatcctagtcatgactatgctgaaaacaacactcatccccacaccaacacatagggcgctttacacctggtgctggcagctgctcaggggaatagctaacaacacccttccttaatatcctaaaattgcaaaaatgtttatcgctatatcaattgcaattaaccaacaactatacctacaaatttaacataagtcggttttttcatcaaaccatctattcaactccaaactacaaataagcattatcacatatatactagaacatatcctagaactaatctatcatgcaaccgaattggtctctcctccatataatatataggtacatattatatactcctcgattgataatacatcccgagccatattccccaaatcacggttagaaccaaatcaaccaaaatacaaagtaaaacattagggaaattagggtttttgaaggaggtcaaccttataactaaattctcaacaccgtatatgaatcgtccataccaacatgaagattgaactacaatattacattcttacccacattccttaattcacaccgcatctcgagccaaatttatcaatccatggtttcaaccaaaatacacaagagaaatgaaagcccggttgagcaaatttgggtttttcgagggggtttaccttacaaattgatgcccaatgcaatgcccacgaaatcttggggtggatttgggaatatttggggaagggaggagagaggacgaccgtgtggggatgaaccctagacaaggagagaggagaggaagagagtggatagcataggcttctgagtgttcagtcaaaaaaaggaaagacaagaccaagcaattctaacagccatcttacaatctttaagattaagaattggagtgtcttctggcaaataaccacatttatagagtgtcttaccccaaaagtgccttcctgcgatgtcttgtaacaaaaattgcctttttttaccctctcgcacgctatcatataaatctctgctacttaggcgttgtttagttcccaaaataaaaacttttcacccatcacatctaatgttttgacatatgcatggagtattaaatgtggaataaaaaaaccaattatacagtttgcgtgtaaattgcgagatgaatcttttaagcctaattacaccatgatttgacaatttggtcctatagtaaacatttgctaatgatggattaattaggcttactaaattcgtctcgcggtttcatggcagaatctgtaatttgttttgttattagactacatttaatacttcaaatgtgtgtctgtatatccgatgtgataaccaaacctaaaatttttccccaactaaacaagtccttaaaaaaatcagtaatggtgctcttgttttctggcacaacaaacgtatatgacaggcacgcgtaatatccaacggactggaccacaaacccatcgcgtaatgcacccatcaccatctccacagagatcgcgcattgcgcggacggtttcatcctccgtaaatgactcctccgcctagggccggtccggagatttgggaggccctaggcgaacttgacactataggcccataaggagttctataaaacgcatataccatatagtgacacaaataaatatttctaacatggtaaacaataaatcaagcagtttgatatagcaatttattctcgataaataatatcgatggtataattgacaacaaaaataacaccatagaaacaaagtagtatgaatagcttaataggagaccacagatatcctatatcccttataaaaagagtttcttcgcgcatttctcgaagcgaaatcattaatgaaagtttggagatcaatgctctctaagatattcttctcaatgctgcacatagccaagccgttctgagcacccgaaaataaaattttaacattgtaacaccagaaatagtaaaattgcaaagtaaattatacaacaataaccataaaaattatagcctaaataatctaacttttggagtgggaaaatcatgcaatgatgcaaagcaagaaaatcctaagtccataagtaataagttgctaacctaaatttcttagaaaaatcgaagaaataacacaagaacaaaaaacaccttagttttcctaggacttagggctaaaagagaatggagagtggagatgggaagaggcgtgaggcgtcagcgattagaggccggcccgacgtgccggcagccagccggccaggcgcccgccgcctgacaactcggtgaggcggcgaagtgcttgtgcctccccggtctgctctgcgcggagggaatatcagagaggagtagacgtgtcgtgtcgcggttaggttgtgcagtcaggagtcgcgcaagactcacgaaaaaaaaggagaaacaaagcggaggagacgcgcgtcgcggcctggcagcgccctcactcctggcctagcaacgcaaccgcgcctccctccttcctaggctgcgcttgctcactgggctaggctgcccgcagggggaggggggaaggggtggtaatcacgccctgtcagccttaaccctaggcggtcgcacaaccgacctaggcccagggctggccctacctccgcccactcgtcgccgccacccgcaaccaccaccatcgtcccccgccgcgcactccactctagatccccccactgagccgattcctactactcctcaccaccgacatctactccttcacccacccgccacgcgcattgcccacttgcaaactcaactccaccgccccttccgcatccccccatcccaccaccttcttccgccgtgctaccgacggcccctccacagcgccgctgacggctccaggtcatcctcgtcgtcgtcacacggtcccggccagctcctccaccacgccgccgttggcccatccacaagatacggagataccagctcggcaaccaagccattatggcccagccaccagagccagcctgcccaaccgaccaagcaggtcaggccgtctttcccccaatttcccgccagcccaccaaaccgagccgcccaagcctacagccttttgcgttttacctgctcgacctcgtgtcgcgcgcacctgcccggcgacctagctcacgagccccggccaccgtcgcgtccgctccatcaccagctagctaaggctgtgctcggaagagcctcttcccaacttccctctcgcattttccacactcactctttttaaactgttaaacagtgtgccgcgcactgtacttcgctgcacctgagattgagccaagcccagagtggaaacacgagtacaccggaagcgcagccgctcggtcgaacaaatccactgccaacctaggaggggcaccaagatcccacaaggccaccaacctgttcgctgcgccggtgcgcatcgacaattactctatgtgtgccataacgtaagtcacttcgactttttttaattatttttttaagtttaattaagtttatagtaaaaacacaatagtatttcacccaaaaaaacacaatagtatttacaacacaaaataaatatattatcaacatatattcaatgttggatttaatataactaatttgacgttagagatgttgctaattttttttataaacttgacaacttaaatatgtttaaaaaaaatcaaaacaacttataatataaaacagatgaaatggagagagtattatagaagaaacatgtttcattttaggggtcatccttttttctcgttttagataaaaccaaatagatcaaaagttgtcaagggggtaacttatattgaaatcaaataatgaggctggaaaacgtttgttgaagttgagtttaattgaacagggttgaaagcggttctttattgggttaattggatccatgccattacaattgtgtcaaattagagaaatgccattacaaatcgcctatttcgaagcgtgccatccatatacgcgcagaatagtctccatgccatgccgtacgacgtaggctcgctttgactcattttgaccggtgtgtagttccgtatggtcgcaaatgcccctgcatacatggttacatcggcgacttggttgggctcgaccacgagaaaccactcctccgctgtccccaaaccattctatcgacggcggcataaaccctagccagcggtggcggcggcggcgacggtgagtccctcggcatctctgggcgaccgtgggagtgactgcgatggacgcccaatcgagaaccctttctcggtcgagcaggtgtagagaggagcggtcccgggcagcagcgtgcgacatccccgagctgaagtgtgcttgcgggtggccggcagcttcaggcacatcgacgactgtcaggaatcctggccggcgatggctgcaatgcggcggagaggtgaatctttggccacgacaaattttgagttgcatttctttgatttctttcccaatcccctttccttccctttcaagcagcagggtgcacgatgctatttatggatctgggaggatctcctcagggagtatgtcgaggagatagtggcatactgccacgccggcgagtttgatagcctatgggagacatgtgacgagttgcggtggcagttgttagatgtgcagggtcgcaacatcgagttgtgtagtatcttggaagcaaaagaggcgcaattgcagctctatagagatgagttgaatcagtcaaagagggaggttgcagagatgaagcacaagatggaatcagagaaggccatgctccaatgggttctgtatatgctaatgtttatctgtgttctttgtgtgtcagtagttgtagggaagaactatcttggatagttaattactgtgaatgtgcaatatgtaattgtaaatgacttgtgtaatgaatcctagtttcagtttgagcaaatgtgagtaattgtgcatttgtaattggcccgtgcatttgtagttgtagatttttagcaaatgtgagcaaagctgataaaatgggacttatgagacatgattttcatacatgattttcagcagcatatgtgagcaaacatgattttcatgtccaaatttcagttcaactaaaaactatcaaaacttggcaatgtgagaatgttagcagtaaaacaacaaatttgctggtattttctgggttttccagtagagaaacacaaatttatctaatttccagcagaccaacacaaatcacatatgtcgagcaagttcatgaatataaggtcatatatggaccaacacaaatttatctaatggcacatgtaaggagcaatttcattcattacatatctggtatttcaagcgaatcgacacaaatctgagaatgtcacatatatggagcaaattcattcatcattgcagccaacttcacattcatcattgcagccaaactcagaatacataataagcaggtcttagtgccatttcagtactacatcacaaaataaacaggtctgccagtcatcacaacataggtgtgtcttaggcattacatcacataatatattacaaaagggaacccacttctgtgatgctaacttacacaggcattcacatcacaaataccagcaattcttgggacatcatatattacaaaagaaatcccagtaatcagctaggtgaacatcaagctgggttggttggttgagacccttcaaaccaatctgatagccttctaggagcagttcttggtggagcactggaagaagcaagaactctcctcttttgtggtgttcgcttcttctttggagtttcatgtttcttcttatttggtgctgatgagctagcttcagcattcacattagatggcctcctcctgcaagtgaaaagaagaaacatgattcaacaatagttaaaagtactgaagtcatggatcaaatcagagatcaaaatggaagggttcagtacataccttttcctgggtgtttcttcagtagccatgtcatcttcacatagtggttcagccagtttgcatgttttctcaaagtgctcaaactggttgcatctcttgcatttcaccttctttctcccaggctcaagacagccccttatcctttgcactctaggcctgccagctcctcttcttagtcttggaggatgcactttgaactcaagatcaactgaaggccattgtgacctatcagtcatgggttgaatcctccctgcataagctgctctaaagtactggacactgtaatatggatgcacaaagtcctgaatcttgcccctgttgctgcatatccaagccaaggggatcctctagagtcgtcctgcaggcatgccataccctacaagaacaattttggttgtccaagtccacaatgtgcctctgggtgctgttatcactctcaaccattgtgacttcagcaaacccatggtcacttctggccaccttaaccaccttcaaattactagttgcagtgtttagctccttcatgacacttggcaggatttcatcatccatcttgctggcacaatctcttctaagtgcaaatttctccatgatcatttctctgatggaatcaaccaactcatgtaagagcaaaccttttaagcccttgatctggttgttgaaactctctgaaacattatttgtcaggtaatcacacttgctaagttctgaaaatccacatctataccaaatccttgagtggtgtttctctaggaactctattgcatcaggcctgacatcccatatatgcttcaaatgccactgaaacttatcctcagtatagcatctagcagctggatacagatgatcagtgaacactggcccttggtacttcttcatgaaattagcatagagatgcctcatgcattctctatgctctaccttcttgaaagccttacatgctttgtctaaacccttacatgcatctgtagaaataactaaaccctctgtgtctcctatggccttatttagttgttgcataaaccaaagccaattatcatctgtttctgagtcaaacacagcatatgctacataatacaaccagttatgtccatctacagcagtggctgaagctagctgtccagtgtatttaccagttaatctagttgcatctacacctatgtaaggtctacatccagccaaaaatccatctatgcaaggtttcaatgcaacaaaaattctcttaaagcacatcttcttgcctactttctgcaactcaatctctacaattgtacctggtgacttgttctgcagtgcagccttccagttgaaaagaagctggaagctttcttcatatgtaccatggatctggtcaattgccttcttcataccagaccatgctttggagtatttcagcttgatctcgtatttttcttcaagcttcttcctacaatcagttggtcccttgccaggattggtcttgagccaatcatgtagcctgtttgcacaccagccttgagtagccatcttcccttcatgtagctttgtagaagaacaagtgtgctcaaatggaagaaccttaatctgcatgacaagtagtgcaacacataagtaaacatcatctgaacaagaaaacaaaggaaatttgtgaagaattcacctttgcagtcttcttatcctcaatcagagatgcatgtatatatgccaagggcaaccatcagctgcacattttgcaataaaccttgtaggatctggcttcaccgaacctttagcaaattcaaaacctttcacgatggcataatgccttacagcttttctgagagctatcatgtcagggaacaaagcatctttgacaatgtttggattctcagggtcatgaatgatgttataaatctgaggatcatgatctgtaatctgtgcctcaggagctgccatagcactagcactagcaccattctctccactctgagcagtagctgcagccccctgaggttcagatccaggttgaccttgctgtttagatgcatgaacatatatgtgctcatcatcaacaccaatatactcctcttcattgtcaaagatatctgcctctctaacttctgcttcctctgttgtaggatggtcagaacctccaacagtagggatgtcagcagggatttcatgagggatgtcagcagggaattgaggagggatttcaggatggatttcagcagggatttcaggaggcaccacacatataggatttaaagcatttatagcaaatggcacaccctttgcagcatccaggatggatacaataagctcaaagtggctctcttctacatacatttcaaacaactctggaatctggccatcctccaacagtctcacatcctcaccaattaacttatgaaaataccatatggcaggagactaatttgggcaacaagttaactcaacacttaggctactcaacacaaactcaatgttaaagctatctgattccacaacccattgatgagttgacccttttgtgtaaattttcctaccagcagcatctattgtcacatagccttgaaccctaacgtctaccgaaaaccagttcctaccaaacaaatcaccacacatgaagaataatgcaagccaaagatgcatgatgcagaaaaaagatgctttgccttccaacattacagctttcaattgatttagggttagggatactcacggcctcgaacagattgttggattggatttgcctacatccatctcctcgccatctcgcccaggggtccgcgggggggtggttgtcgccatcacacttcctctgccaaggcctactagcggcgcatctctcccgcttgaatcctcgccttcaccgccgccacaaatgccgccgccagccagatctggagcgcgaatagggaggaatggagtggggaatggatggggctagggtttcgactgggaatagagtgagcaagccaacgggtcgagctgaaacaggccagatttagagcgtgtctgaaaggggcatttctgtccatacggatatacgtatccgatactacgcgtccaaacacgggagacgaccaaattatggcatggatcaagattcacatcaatacggatggcacgcttcgaaataggtgatttgtaatggaatttctctaatttgacacaattgtaatggcatggatccaattaacccttctttatttgccattaatcatatatagggttaaaccggttaatccaggaacttggcacgacgacaagcggaaaggcagttgcaggaatgaaggatgaagggtagctagcagcctaggaaaaagaattgcgaatatacttattatttttaataactttacgtatatacttgcacggtaagactttgcataaatatatctatcccacagggtgaaaacacgagaccgaatgtatgccgcaacgcaaaatcgcggaaccaacggtctcgcgggatggtcgcgcggcaccggccgtggcatgcgtagggtgggcatatataatgctgtttgacactgtttagcacaatagagacaccgactttgctactgttcacagagctggttccgtgcaatggaattgcgggaccgtgttggtgtcacgtttttgagccacgggaccgtctcggtgccgtgcgctaccgttggccaccacggtggcgcgtttttgagccgggggaccgccgcggtgtcgcgcgacaattctacagtaccgcgtgaccatcccgtgtgatcgtcggtcccgtgttttttgctgcaactaacatttagtctctcgtccttaccccgtgggacgggtatatttatgaaaattcttcccgtgcaggtatataaacataaattattaaaaaataagtatattcataatttttttagaagcctagcacccattgaagacagttggaaatgatttacattctcatcagttcataattcgcaaagtataacacgaacaacttgttttttcctggttttcttgctaagacgattgtgagctcaaacgagtcgagttggcccattatcgacgatacaacaagtgagggatgaaaatgggacaaaaggaaaattgaggtgaaacgcaaacaatgaaagaattgaatttgtaaattttgttagagaaaagagggaactatgaccaattgactgcacacggtggcatgtcagtgccacaacaacaatactatagttgggaaagtgtttttctttaaaatatcatcactcggagattgaatagctcgagttaagcttgtatgaactgtccatcatgctgattgctgagctccttgatgaacccgacgagccgctcgaactccgccgccgacgagccgccatcggcgacgtcctgcctcacctcgcgcgccagcgcctgcgccgacgccctgatctcgccggactccatcgcctccctcaccatcctctccacgacggcggcgtcgcacacgtccttcatgtccagccccgtcccccacacggcgccgacgaaccggctgttgatctgctggtcggcgaagaacggccagcacaccgtcggcacgccctcgccggcggcctccagcgtcgagttccacccggcgtgcgtcaggaagcaccccacggcgcggtggcgcagcacgtcccgctgcggcgcccaccccacgacgcgcgccttgttgttcttctccgccgccgcgacggcttcgcggagggcgccggcgctctgactcgccccgaccatgtccggccggagcacccagaggaatgggtagccggcggcgacgagcccgtggaggaactccgtgaactgctccagcgagatgacggcgaagctgcctaggctcacgtacacgactgatcggtccggctgcccgtcgagccacgccacgcagccgtcgtccgcgcgccacaggctgcccgcggccgccggcaccgggaacatggcgtggagagggccgatggcgaagacgtcgcgcatgcgcggcgcgacgtgcgcgagcgctggcccctccatggacgcggccgtgttgagcacgaccgcccgcgccccgcggctgtgcgcggtgacctcgatgagcatctgcacgatggggtcgttctggtcctcggtgcagttccggaagttgccaggaagatctcgccggcgcaggaagctctccatgcccggaacgccgcgcaccggctcgtcgaggtcgccgtcggccgggaacaggacgacctcaccgagctcgaacagcctgtcgactgacaagtaggccagtacgctgcacgcgctggccgtgcggaagaccagcgacgggacgccgatctcctcggcgacgtcggcggcgaacggcatgctgccgtcggcgacgacgcaggtcaccggagggaagccgccggaggaggcgccgtcgtcccctgcgcgtacgagcgaagcgagcaaggagcggtacgggacgctgccgttggtccgcagcgactcgaggagctccacgatgtcgccgacggcgcgcgggtggtcgtcggggaggccgtcggggatggacatgaaccggagccgcggcgagtcggcgccgccggcggccgcggcgccaccgaggcggcggaggctgtggtcggtgtggaggaaggtgacgtgaagaccggcgccgacgaggccggtggcgaagtgcatcatgcagttgatgtggccctgcccgggcgccgggaagacgagcacgtgcgccgccgccgctgccgccgccatgttcgtccgctcgcgcggcgggcgtctcactcacggcactgcgctctcgtccaacctgacccgtcgtttccttgtaggcgcctaggcgatctcatctatggccatttggccaatggttggttctacggacaagttgctgaaaaaaaatggtattagtagaaaattttggacgagtctctagacagcaaatttcactgggcgtattaaaaacgaaattgctatgcttccaacttggattgggattcggtgacattgctccggtgacattcccgtgacattgagtcactaacgtgtgggactcctgtcaccgagaatgtcacgggggaatgtcactaaatctgcgtcggtccaactcatactataacttatatccggttagtgtatatataggcataaatactacttgtttgggtccagatgacaagaaacaagctcagtgagtcgaatggctcggtcatacgtatagcaagattctattaaaaactgccgtaacctttctgagtgattcaaagtctagaagtttaatttattgtgtgatctagagaaggtgttggtactatttataactgactttaatttgtttattttatttctccctacgtagatcgagttcagacttcagattctgtggcaggtgctcacaatacaaatgtaacttgcggttgctgccatttgccaactggcggcaataggtccatctcgccttcccttaccctctcttcttcccacactctcaatttcacatcaagacggtgatcccgagactgtgaaggacagtaagggtattcttatcttttttatgtctattgtgtatatttatatgggattcggatcaggtgcagtcactactgtgactgtaactttagcagtatccatcatccaaccatccagcacacaagggatggtttagattcgttgtttaatttccccccagctattcaactactctctgactcgagcagatgtgttttggagggaaaagtctgagagggaagtaagaattggcgccaattctaccatgggaagcatactttacctcctactgccgcacatcacacgcaattaatttggatattatctttttttccctagggttctattaatgttgaagatgtcatcttatcttaaaagttcatttgaagaggtcaatagaacttagaaggcatcgtgctgattttggaagcagacgatgatctacttttggatcatgaaaatttttgtaactgggttaatctagcagtagcatagctagttgattttgaaagcttttgtgtcagtggatgcatgacacccaatttaagcgaaaatagttagggtgtgtttagttcacgaaaagaaaatttttgagtgtcacatcggacatttgaccatatatcggaaggggttttcggacacgaatgaaaaaattaatttcataactcacctgaaaaccgtgagacgaatttattaagcctaattaattcgtgattagcacatatgggttactgtagctgtcggtgacatgggatcaggagtatcatgactagaggtttgaggcagacgcaatcgcccacgtggcctggcaccctcgggggacgtcgggcccgagggtgatgtgttcgacctcctcttagtccccccgagggggtcggaccgcacccgcctcggccccgagggccgaggcgccccgacccctcgtgggttttttctccgcgtgtatgggttaggtgagcacagcggggctcacctaaccacatttattgcggtttggctgagcgtgtcacgccgcatgtaacgcagtgcagtgcactcgtttatccggtctgtgaccagtcacagaccggtcagatcgcgggttaggtggcgacaggcgatctgacgcacgcctcgccccatcccgtcaggacgagggcttctaggcgctcgtccccagctggagctagcgtgttacctcccagagatggcacgttagtcctggttagatatatgccaggcttcatcctaaccattacaggcaagatgttgtgtgaagaagggccaacatgtagattgctaaactgacacgtggtggacaagaatgagcgatttgtgaccagtctgacactggtcatgtcgtcagcagacagccataatcccacgtcgcacctgcttccggcggaagtggaggtaggtatgggccgtcttatcagaaggtcattcggacggcaactatacaaatctccgtccatttatgaaaagggagggtaagtccccacagaaaagagggagatggtgcatgtggtatccccttaagatataaaaggaggaccttgcccacttagaggggggactggactggactggactggactttccgggattcggaacccagaacaagggagaggctggctcatactttgtagctccttcagacacagatccaccaaaaacacaggagtagggtattacgcttctcagcggcccgaacctgtatacatcgcccgtgtcttgtgctctttcgattgtcgcaatccttccacacatcaagagcttagaatttcacccagagtccccggccgaaccggcaaaggggggcctgcgcggtctcccggtgaggagccacaagctccgtcatctggcgcgccaggtagggggctcagcgtgtgtcttctgagctctcgcactcttccgtgtgcgccaagcttttcctgttcagcctgatggccgagcaagcaaaggcgcatgacctctctccgagtgtgagtggcgacgacggggagccgaacccacgccgtcgagctcgtactccaccgccccctccacgccaaagtcctaagcggggggaggcgcttgagagggtcgaaagatccgcgacttcaccgatcgcgggcgatggagaagaacggcgagatggggagcgtcgcctcctcgtctacggcgacggcagcacgccccagggcgcgctccaagctgcgggcgcgctcttacgtcacccgcctgtcgtcctgacccggagtctccagcccaacgatggctggacgacgtggccaaattagtcatgacggcacggcagcgcctagatgctggtgggcggtcctccgccaccaaggcctctggtgctgctaccaccggctccgcgtcgtcaagacggagggcacgacgagcggcagccgttgttcgccattcggccgccactctttcgtcgactccttcgatccgggaagatctgcgtggggggccgaacgcccgcaccagcatcgagcgccggcgtaatgaccaaagtgctgcccacgcaacggagggcgcttcctcgtccagagtgtcacctcaacacggacgcgggaatcagccctccgtgcccccggttggtggtgtcggctgtagagcctttgtggcgagtcttcggaatgtccgttggcccccaaggttccggcccaccatcgccgaaaaatatgatggcagcgtcaaccccgccgagtttctccaggtctacacgaccgggattgaggccgccgggggtgacgacagggtcatggcgaatttctttcccatggccctgaaggggcaggcgcggggttggctaatgaacttgccacccgcgtcagtccactcctgggaggatttgtgccaacaggtcaccatgaactttcagggcacatatccgcgcccaggtgaagaagcggacttacacgcagtacagcgaagggatgatgagtcacttcgctcgtacattcagcggttctgtcaaatccgcaacaccataccatgcatccctgcacacgcggtaatctacgcgttcagggggggcgtgcggcacaaccgcatgctcgaaaagatcgcctccaaggagccccagactaccgcggagctttttcagctcgcggaccgagtggctcgcaaggaggaggcctggacttggaacccctccggttccggtgtggcagcttcggccgcccccggatccgccgctcagacagggcggcgtgacaggaggaggaagaagaggtcagtccatttcgacgacgagggtcatgtcctcgccgtcgagggcgcttcgcgggccacccaaaaggacaggcctgcgagcgacaaaaagaaaaaggccggcgctcccagcagggagcgcccagccggcaagtggtgcaccgtccacaacacctccctccacgacctcgtggactgtcgcgcagtcaaaagtttggcagagcgaacgaggaagtgggaggaggagaggaggcaggagcgccgtgagggcaggtccccggcggttccctccggtaatcggcgaagtgaggccaagcagaaggcccccgccgaggacatcgatgatggcgatgaggacctaggtttccaagagcctggggccaccattgccaccgtcgatgggggagcgtgtgctcacgtttctcgccggagcttcaaggctatgaagcgagagcttctggccgcggcccctactcatgaggcgacgcgtcgggcgcggtggtcggaggttgccctcaccttggaccagaccgaccacccaccgtgcgttgcccggggagggcagattgcgatggtggtttcccccaccgtttgcaacgtgaagttggggcgtgtcctcattgatgggggagcggccctcaacatcctttcccccgcgggctatgacgccatcaaggccccggggatggtgctccggccgtctcaaccgattatcggtgtgatgccggggcacacattgccgttaggtcacatcgacctgccggtcaccttcggtggatccgccaatttccgcacggagcggg

SEQ ID NO: 16553 - DNA, 1166 bp, Oryza sativa
gcttggcgcctccgcccccgccaccccgaggcagcagatgatcacatgcgatgaggtcccgttcaaggaggtcgcctggggcgacggcccgtccaagaccacacggatcggtggtcttctggacggcaaataggaagacgcgctcgtctccttcctgcgggcaaatgctgacgtcttcgcatggagaccggcggatatgcccggggtccccagggaggtgattgagcaccgtctcgccatgcggtcgggcgcaaggccggtccggcagaaagtgcgacggcaggccccggaacgtcaagccttcatccgcgaggaggtggcgcgacttctggaggccggattcatccgtgaggtcatccatccggagtggctggcgaacccggtggtcgttcccaaggcgaacggcaagcttcggatgtgcatcgactacaccgaccttaacaaggcatgtcctaaggatccttaccccctgcctcgcatagatcagattgtcgactccactgcggggtgcgaccttttgtgttttctagatgcatactctggttaccatcagattcgcatggctagggaggatgaggaaaaaactgcgttcattacccccataggaacctattgttatacaacaatgcccttcgggttaaagaatgcaggtcctacttttcaacgtactactcgaatttctttgggtagccaattaggacgtaatgttgaggcttatgtcgatgacttggttgtaaagacgcacaaccaggaaacgttactcacagatctagcggaaacttttgagagtctccgctccgcccgcataaaactaaaccccgataagtgtgtgttcggtgtacctgcgggcaagcttctcgggttcttggtctctgcccgaggcattgaggccaaccccgagaagatacgggctatagagcggatgcgcccccccagcaaacttagggatgtgcaatgcgtcaccggttgcatggccgccctaagtcggttcatatcgaggctgggagagaaggcgttacccttatttaagcttttcaaacgctccggaccgtttacctggacggaggaagctgaaaatgccctcacccagttgaaggcgtatttaagctctcccccagttctggtcgccccggagccagacgagcccttgctactctacttagcgg

SEQ ID NO: 16554 - DNA, 565 bp, Oryza sativa
  unsure (1)..(565): unsure at all n locations
tggagcgcgatgaggacaattcttcattttgcgctttccccaccctgtggcgacttggccccggagagaacagggaggagaggcccccgagccgaacggtgggccaaggcccccgacgattggagttggccctctgcccgcttgtcagaccgtgctagaagccnccgacccccaagaaaggccctgaggccactgtgggaagnccgcacctatcgccctttgaccccgaggctaaccctgtgctgactcgacccgggaaagagaaggagaagaggcccccgagccgaacggaggcctaaggccccagacgaccggagttggccctttgcccgcttgtctgacgacgccaggagcccccgacccccaggacggccccaaagccactgtgggaaggccgcccctgttatcctccgaccccgaggtcatcagcacagaagacaagtgcgccccgcgaggctgcttggacgaagagtgccccagggatgcggcccctagcgaagaggatcggccccaccgaaaggtgcagcggcccgtctactttgttagtgaggccctccgggacgcc

SEQ ID NO: 16555 - DNA, 2774 bp, Oryza sativa
gcataatcgagagggtacaggacgggtggtgaaatgggcaatcgaactttctgagttcgatttgcactttgaaccacgccatgctatcaagagccaggccctcgtcgattttgtggcagagtggaccccggctcccaagcccgtctcaatccccgaggccagcacggacccctcgcagctgcctcacaccgcccacttggtaatgcagttcgacggctccctgtctcttcaggcgccggtgcgggggtcacgttgacctctccgagcggagacgtcctcagatatttggtccgcctcgactttcgagcgaccaataatatggcagagtatgagggactccttgccggactcagagtggcagctggactggggatcagccgcctcctggtgttaggcgactcccagctggtcgttaaccaagtctgtaaggagtaccggtgctctgacccacagatggacgcctacgtgcgccaagtacggcgtatggagcgccattttgacgggattgagcttcggcatgtgcccagatgggataacatgattgccgacgaactctcacggctcgcgtccacgcgagcccagaccccaccgggcgcctttgaagaaaggcttgcccatgtttgattttgaaatctcaatgacaataaactaaaaagggtaggcagcgggctagccgtagaagagtacagcagcaaagccgctaacggtttggcgggacttctagaaagtaaaaatgaacctaaacaataattatttttgatttttgaaattccaatgccaataaagagaggagccaccagacgagccatcccaatgacaataaagagaggaggcagtagacggaggcagcagacgggccgtagagtatagtggtagcgcttgacgagacttttaaaaatattataaaaatgaatcacaacgagatattaaactctaaacactacaaaggtctaatttttaaaggttcgggaattaaaaaaatataaaaaataaacccaatgataataatgttcgattttaaaatcacaatgacaataaagaggggagacagtggcgagctgtagaagagtattgtggaaaagccgctaactgtttggcaggactaatagaaagtaaaaaaaatgaaccacaacaacaattatgttcgatttttcaaatcccaacgacaataaagagataaggcagcgatcgagtcatagaggagtacagtggcagcgtttgatgagacttctaaaaactataaaaacgaaacccaatgagacaataaactctaaaagctataagatctaatttttaaagattccatagagaatgaatataaatagtggtagatcgagcaagcaaataaataagaggtaacttttgaaaacaataaagttaaacacagggatgataatatttgatctttcaaagtcttaagatatcgagataactatttaataaatttaagtaaaatcatatgaaaaatagataattttatatggatgatagctgtgaaattgtgcgggccacccagctagttcataaataaagaagggagcaaaatcgcgtccacgttgctctccccggggtgacacatatggcacttagcaccagctgccgccaccttcctccctccttttccccgcgcctatcgttgcctgagtggccgtcagcaaagccggctgcctgttaggatggcagcggcggggtttcttcccccctcggtgcccctgcacggctagggaccaagacgcgctttggaggtggagagtcgccacgccgtattgatccgagcctgcatggctggatccggacagggagagactggcaagcgtccgtggaggtgctagcggggtggctagcggcggtggaggtgtggacagatgatggcggtgacagaagtagaggaaaggcggtggcaagagaggacgatggtacgtgggacagcaggcggcggccctcggcagatctagcgcttcggcgctccactggcctgatccggtgccctcttccatctccggcaagggatgtcggatcccctcggtgatgacgtcaaaggaagctttggcagcggggaagagtgcgaggaggcaagcgacgggcaagaccagcgggcggaggtgccaacgctgaggaggacagcggcaagcccgtggcgatggcggcccaatgaaggcacgatagctgtggccggtagcggagatggccaccgtcgagccggacagcggcagagctcatggctacgacaatggcagcgtcgaggtcagcggcggcactgccgaggcaaaaaacggcacgcgaggaagtgcggggcggcggcgaagaccggtgtggtgtgtgccagaaggcgcgggtgcccatccgccggcggaggttagacggcggttggagcattggtgcgttagcgatggataagcaggctgcgaacggcaggtaaaaacctagcccggccttagccaggccggcaacgatggctttcagagcatcactcctttttttgggcattgtcgtgccatcccatgccctttagtgaggctgccgggtgaaaaaccagtctcggttctctttgagaccttgacagacagcggcggcggtgctttcgtcatttatctccttggaggcgttgtctaggcagcccccttgccgaaacctctgaaacaaccggtgcaagcttactctagattcttgaccccttgtgtcggtgcctagcttacgctactaggccacgttgcatgacctagggggaaagcggttccactcttctttatcaccttctctccctcaatcccaaa

SEQ ID NO: 16556 - DNA, 856 bp, Oryza sativa
ctaagttagcttaagccccaggggaagaagagtgagagttctccctagagtttaggaacctttgtaacactcaaccctaaatcccacgcacaggagtagggtattacgctccctagcggcccgaacctgtataatcccagctctcacatgcggtctcgaaagactctaggcggatatacgttcttgatcagcgcgccctttcccccggccgaactcacaaagggggtccctcgatcacccgctagagaggatcattcctcggcactaatcacggtgaatctggtcgaccgcccataaccgcgggaacggctattcaaatagttttactctggccagaggtgcacaactgtacccacaagacacagccccacgatacgtttccgtacgccgacatgccaccacgacataccggaaagaggccgtgataggacccttcgcataactccctctaaccaatcgtaccacacctcaggtttcgcccccgtccccagcaggcaacgggcggccccctctcgtgccacggtgaatccagaaaccgatcaacctgttgacgcaaaaaacacacactggcctaggagatctgcttagctctagtgcatgtccaaatcttggtgaggtgcgggtgtgccagtcagtttgatcctacagctgacaagatatgtaaacaacagatcaaacagccgatcggttgtcaagccgatggagtaattccagccgataggaatagggttttgaactatcgataatatgtccaatgtagataatgatataaaggcagtcggctgatgatgatgcaatataacagtaatataatccagtagaaaccaatcaactaacaatatgatatgatagaaca

SEQ ID NO: 16557 - DNA, 26666 bp, Oryza sativa
tcagttgaaagcacatgttcctgatcatacaccggtctttacttctcttcctcaccctgtggttttggatgccgctgacgtttgacctgaagaaatactcgatcgtcggcttgtgaaaaagggcaatgcagcacatgttcaggtgttgattaagtggtcttctttaccggcgcatcaggctacctgggaggattatgaagtgctcaagacccgctttccatcagcaccagcttggggacaagctgtttctccggcgggcggtactgtcacgtctgtaccacacgcgtgacgagctacaacgccaggatgacgtttacagtaacgtgtcggatgggtgtgtgagcatgtgtgttgtgtgattcggccaagcggccaggctggcatatatgacctttataagtaaggaaccctgtaatgagataagtgtgaaatgaagaaaggaaaaacgaatctctcctctcaacaactctgctctgcccctttcttcctcgactctgtctcctcctcctctgttcttcacctctcctgctctagttctttctctgctatgatctagtagtgttacatataatgacatttatctgaatagatatatttgcaatggcacatatcaaattaaccctagatttttttttttgagataaccacttatgtacattgcatgtgaggttggactaaacctcttccgcccatctgctgcattgcgtgtcttgcacgcatgatccttaactcgcatggattattagttatgtgtacaaattattttcaaaaaagaaaaagttgtgtacaaatttgttctgagttagacctactgcctactggcatctcaaaccttaacatttcctgctttaatgtggtacaaatttttgttttgcgcttttgtttttcacttattccacattttttctatcgaattttgtatggctgctagcttgtataaccctgagtgacggtgtctgaacaaccattttcctaactcgtacaaagcacttcctccgtttcacaatgtaagtcattctaacatttcccacattcatatttatgttagattcattaacatcaatatgaatatgagaaatgctagaaacatttcccacattcatatttatgttctatctatctaattcattaacatcaatataaatatgagaaatgctagaatgacttacgttgtgaaacggagggagtatatacacacaagccattcggaaggtcctgctgaatcctaaaccatccgcaagtacggaggagggtgtcaaggctgaaggtcatactccgacattagaaaaaaatcgagtactaacagaaaaggttccaataagcacgctggatattgcccttcaaagttcaaaccaacacttcagcatggttcttctttccttgaccagaacaagtgtagcgaagaacaaaaacgcattcaacaacaggcaatctgcataaacttatacatcatgttttctttgttgcccattgagaggcactcagcatatggtacatcatccaaattgccggtcaacaagaaaacaaaaccctcaacctcggcacacgcgacagtgtctttcgtcctactatcttcaaagaatatatcttgcaccggacaaaactatatccttccacgtatagggagcctgacatttatatccttcatgttagcatttgatgttggtgttagtgttcaggcaggctcgagaccatatcatgtcaaccaagattggttgatgtcccactcccaaacaatgcattgtctgctgttcaagctacaacatccgaagtgtcaaaactgatcatcccaaccaaccaatccttgcagctccatgatccaccctctccaaacgaaaggaccaagaagacgctgctggacagtcaaaaaagctgtcgcatgcggcacatcccttgtgtaatgaggatggccaagttagcgcaccaggacttcaggggcagcacctagcactccagagagaacaaatggtgggcaccatggtgcaaggaggccttcaccagtaatcatcatcgtatccagaccaccgtgagcgggatccacttgatctatttgactgccacggacgagggttaaaacccctatcatactgtttggtgtaccgctgttcaggggacctgtgcatcctccctcccttggagactctttttgtagcatttcttaaattctcttcgatatcatattcttggcgctgcaaaaggaaatcaggtgaactttgttttgcaggaaatttaaattaaaaaaacaatggtcattttataacaaaatgaaacttcatatttctgccatcaataagcactgtagcattgtagcaagcacatccaaattttccaaaatatggtaggtataggcttctccattactagtatgtacccagagtctgctcatagtggcattgcccattattattattatttagagagaatgtgcaggagcagtaaagattacagcatccacgcatctagatggtggatcaaccaaaaagaaaagggaagatatagagtaacagagctatattctcacaaagtatctggcgacctaaaagcatccttgcagaatgtttagttgaggcttaaattttgcaaatatgttaccaatgctatcttggaaacttccaggtatgaaaataatgaattggtcgagatttgatccattgaaaaaatctacgatgagtggcgcatgaaaatattactcggttaccacttttcataagcatatttaattgtttttttgctttaccttgtcagagtctgaaagaacattataagcctccccaattgctttaaatagatggtcagcatctgcatgaacctccttggcgacatccctccaaaacccatcatcaggcttttcattccttactagcaattgtgcagcctgcaggtcaaaatagtgttacagatgctttctgtgtgaatccaacaagaaattctctgaaacaatgtaaaccttatctgggtgatgcctcagtgcagccttccggtatgccttcttaatatctgctggagatgaagatggttcaattcccctgcaaaagagggggcaggagagaagagaaacaactaattaagctatctccacataataagagattattaatttgcttcgtctcattaaaatatagatgattcgccaatagttagaaagggtgacacccaattaaaataagatcatacaagtatgcaacataatatgacatgagcagctgtactcatcacaatggagttgatgtcctaaatcatgtgtgtgactgtggctagatgaagtagcaaagtattgattctcctataaaacagctgtcttgtgctatcgagaaaatctaatccaacacatgcagcagtgctcttggcaaggggaaaaaggaatcactacattatagattctagattaatttgttccactagatcaatgagaacagtaggtaaaaaatcaaatgtcagagatatgcattgaaagcaaatattaaggttggttaaaaacctgggggcaaaaacaacactttaataaacaaaaagaaggtaaggttaatttagaaaaaacttacaagattaaatacaaattcaagggagtatctctttttgcttcatcctctacagataaaagtcgggtgcgcgcctgcttcagatcgctatgcttgttcaaaacttttggtgacaatccagagttattagcttgcttttcaataagtgatatgagcttccgtaaatcattagcagcttgtccataatccctgatcatttcgtataaggtggctcttcttgaaattgcctgaaattaagaagccattaatgaaatccatgcacaaccacataaggctaaaacagtccatatataataaatgtatcacatattatgcatatgtaaatgtgtgcaaaatgataactgtgtatcataaaacaagagctactgcactttaccttcagataagttgcatcaagaaccatggctagtgaacaatctgctatagcatcagtaacttgaccgagtgcttggtatgaagcagcacgattgcaaaaacagacagctgaaaaggggcgtgaatcactattacgtgccaatgctgctgaatattgttctacagcctctgagtatcgacgagcttgaaatgcttcattcccagcagcctaaaaagcaacatgagcacaaaaaatattaagttatcattaacaaaaatgaaaggctatctaatcggtttcttgctcattctgtgatgttgcgtcaaacataggaaatagagatgcactcatagttactaattatcctgggagtcaataagttgtttatttcttgcacatcctactcagtaaaacagtagaagttgctaaagttgaataaaaaatgcagttctgactgcaagaaagaaatcatgtatcgatatgatagacagcaaagtactgtcacttcaaaaattatgcaacatttcctgctgagaaatatcatattccttaaaaccagaagggaaaagcaattatagttctggacagagcaaatttaaatattagaacagactcaataaagaacataggtagatatgacaggacaaatatcatcaaagttcatttcccgcaaaatatgttaaacaaatggagcataccttatgggaaagaagttccctaatggtagtagacaaagatgagaaacattcctgagatgttctcccttcactgcaagagtagccccattcaggagttaaatataacaagaaaaacttacaaaggaaaaaaaagaaagaaatgcaactcataggacatgagaaatttacctctctttgacatttgtcacttgctggtgcttatttagcaactcgagagcatcttcaagtttgcctgaaaggaagtaagtcttgcaaatgagatatgtccgccagagcctccctgaccattccgtagtttcagatgcactggaattcttttcagctaacacaactgtttcctggcatagttgaatgacttcttcatatttccgtagctgtacagtgcaacaaccatattagtaagcaggaagcactaagacatacaatagtgtaatagttcacaaaaaaaacatggatataaaacagcgaacgagaagaaattacagaccgtcagtagcgcctctgctttcatctccattagtttatctgagtgtgaacttatgtgcaatgcattggagataaattgtaaagcagttgttgcttcggacactgttcttttcttaagaagttcctccgatagcgatatccaatccaccacactctgaagtatagattaaatgatgtcattgtatcaacaaggtatgatgctataacaagcagaaaaagaatacttgttttttctcgaaaacgcaggagagctgcatttcatttcattaaggggaagaaaaaacaatacaaaaacacaacacaaagaaaaaaccaaagtaggagtgctcgagccctcctaccaagacccacacacactagacaacccggggagcttagttgcctagattagccgtcccactaaggagcttttgaaggtgagaagctccagcgacaccccaaagatggccctcattttctatcacttgcaagaccgtcgctactctaggattggcgttattgaaaacgcagtcgttgcggtgcttccaaatctcccaagctactaaggttaccaaggagttaatcccttttcagcacctccttcggccggttctttgttgcttggctccaccacctcagaaagcggtcggtagagggttgaggcgcagcctcggctaaccctagtctcaaaaagattgccgtccaaacttggcgagaaaaaacacaagagatcaaaatgtgttggatggattcttccctttgatcacaaagggggcagatcactgtgtgctgcagcccacgcttagctagacgatcggctgtccaacacctattattgatggccagccaaatgaagaatttgcaccggaggggagcccaacacttccaaatacgtttccagggagcaaaatgaatcgaacccaagaaataggcttcataagttgatttgcaagtgtaaacgccatctgcagtaagcttccaaacatgctgatcctggacatcttgtagcagcaccacctcttctactagatcccaaatggccaggtactcagcaagaagctggaccaaaagccccccttggatgtcagcaacccaacttctatttgtcaaagcttgtgccacagaacgttgctttcttgctcttttagggattaaggcgaaaagattaggggctagctcagcaatcgtctttccttgcagccatctgtcactccaaaacttggtatgttctccatttccaaggatagttttgacagccacagcaaaaagagagtggacatttttgggcacattgatggataaaccggcccaaggcctagatgagtctgttttatgcagccaaagccatctcatgcgcaaagcccaccccatcttttcgagattaagaataccaagtccccctaaagacaggggtcgacacactcgatcccaagagaccaagcagtttcctccatttgcattgtcactccctttccataaaaaaccacggcgcctcttgtcaatggctttaagcacccatttaggaagatccagtgccatcattgcataaatagggatggctgaaagaaccgccctaacagctgtgagccggccagctttattcatcaaggaagctttccaacccgggagattgtccgctactttgtccactaaaggcagcaggtcagccttggttggtttccgaattgtaagaggaagcccaagataattgcaactcaagtatatcttaacaaaccgaggtaatatcaggtgcaaacagataattttggcagaataagcatttactaccaattccttccattctaacaatgacaatggtttgcttacggacttttggtgtctggtacagaggataacgactggcatcccttggatatcaatacaaggcaatgactagtactccgtgaaagcacagtcatcattcgtcaataaaataacttccactaccagaatagaattcctttatattatcatgtgtatttagtccctatgatatcctcttttattggacataatggtgcatgtgaaaatgattaaacagaaactggccaccattaagatgttagatgtgcaaacgggaaagagaacccaatagtgcgagcatcagattgatcaacagattaccagtgttccgcggtgatgtaaaaggctagataatagagcctgctaatacagtgatatgaacagaatgatattggaaatatagtaattgcaacaaagatcagaatgttcatgaaagctgtatactgaatttctatagtaagacatgatgggccgtagttgacagctcttcctaggatagtaaagacaaagataaatcttcgtagaccattactatgtaaaagtctacgaaggttgatcatctgaaatcagtataattagatttgtcgtgaaaaaacttcatatatcagtgggggtggcccatgtataaaatgtcatacacttcatcaagggtaccttttacaatcctaattcagaatttttttttcctaattttcatttccggcaaactgtttgctaagttgtccaactaactgccattaatcgctcggtcggtccctgagggcaattttaggccatgactcaacatgaacacttagttggtcaacttaagattctttgattaatcatcacgtccggaagaaacaccaggaacagatcagctggaagggacaggaaggcagaggaaaggaagggggagacagaagaggttttgctgtcatggcgtcatgactcatgaaacaacaggtaaaggtggtactagtgattgatgcaaacaaaaaaatgaagagaaaggaaggaaatgatgagataggccaatccagctcagatttcagccctcaagctatgaagttcaccacgtctatacccatgacactgacctctctcttgttggctttctcctcccaacatcactggacagtggacactccttaatatccatatcagctttgtcctgttagtcggccagatctggtgaccatgcaaatcggggtaggagtcctgttagcaaactgtaggactgtataagatccgaaaccaatcttacggtccaaacagccactggcaagctttggagggtgacagaggtgtagttgtgtagagcggactgcgggagaaggcaagaagcagaaacagaagcagcagcataacaaagaagtcaactgcaactgtgcaacagtggatggtagcacatcgcttcacgtcctacttaggctacctttctctctgctactctacttactcaccatcagcagtatagtatacttatcaggagctgaaagccaagccattaccagtacctagtcaacaagttgacctattaatgactatttggcaaattgcctcctagggactcaaaatttactacttactcccaagtaacgactatggctgtagatggttatatgaaccacaccactactccctgtaaaactattctttgcatgtgttccactaaaagtcaatttttgtgaggtgttgattaaagtaactaagaatagttagggcttattcggttcataggatttccaaatcataggaataggaaaagtaaaggattaggacgacacatgcactccaatcgttaggaatttttccaagagctctcacctcatgcttagaatcctatggaataaggttgtaagactacaatccttaggaatttggtactccctccatccctaaatataagggattttggttagatgtgacacatcctagtatgatgaatctggacataaagcctgtccaaattcattgtactaggatacatcacatccaaccaaaatcccttatatttagggacggagggagtaggatctatttctatgaaaagaatgatgcacatagaaaaaaattaggttcaattcctacaataatcctttggaaatcttttaaaccgaatgagcccttatagttctaaaaaacttaataaataacaaattagtaattatatattctttgaaatttccataaacgaaaagtagatagcaaaaggaacaaaacacatggatagtaattaacacaaaataaagaacttaaagtgatccctgagcagaaatatagcacacctgaactctttcaagaccatcagaagcctcagcgagcatttttctgtcagaaccagaagtcttactggacgttaaacaggcagtgtaactccttaatgcatcttcaagatccccgagtgcaagttgacagctgcatccatatacggtaccaagttagataactaaatcaatgagtcccatcacagaaacggctcaattcctacaggaatccagaaaaatcccatggcccagacaaagttctaatgggcctgacagagtgatagtcaaaacagcatgggttatacacatgcataataaaattagcctacaaattccttagaattccttagaaggtatgaaggtggtatcttcaatcaaagtaacaagagtgaataacctctccagagtaatccagtacaacataaaggcacatgtttcaagggaaaaacatcagtggactacagttcagtttctccaaagcatacattagttatatagtgaatatttgaatattctaattaagacagtactaatacacctggaacatgcagctctggttttacaagtatgcgcattacaaaagtatttagatatctattgcatcatcttccatgataaaagcagtacattccactatgcagggtgcttaccagaaaaagaacatataagtgcaccttgttcaaatgaagttctcaatcatactaattgatttgttatcactgaataagatatactatttcgtttaaacattaaaagaattagttgggttgctgtagcaacttcttactttgcagctctaactttagccttgagaaaggtaggatcaattgatgtagcaatcaaacaatcctgaagagcttctctcattctcccgagagacatcctggtagctgcacggttgctgtagcaaagcatcagtgcacgggaacagtatccagaagaatcatgaccggaaacagaatttattccacgggtataatactcctccgctgtagcaaagtgaccatttgtgtaggcttgatttccactggccaaaataaaatgaaaagatatggtatatcaaaatcaaatttgaatgatcacataatgccatgtaaaaagatatatatgacatgaaaaagacaacaacagacaaacagaattaaactgtgttcatacaaaccttgtacgccaggtttcacaagtctccaaggctgcagaagttgatgcacctcttgttgactgctcatctgctgaatcccctgctttatttttttcaggggaaaactgcatggtctttttgtcttgtgatgattttggctgtacataagcctgagtaactgaaggcttaggcagttgaccagacttagttcttaccttccttctagtgttacgtctttgtgttgacacggagctttggggagatgtagaagcaccgaaggtaaagttcagcccactaaaatcttctgagctttcttggaaagtggcatgttcaccaatctcgtgcgctgttctgtagccattctcttcataggcttgcccttgattgttgagcctataagcatcatcccaaacttcagctggggctgatttaggtttaccattagcagtgtcatgcatattggaggaagaaggttgtggtgcgataggtatagttacttcttcatcaaaactagaaaagctgctagcaaagctgttcgcagatgtgtctacattgggaattctaccttcatcttcgcatgttggaagatctgcatcaataaccaagtgctcagttgcagaaactagatcttcagcacaactggagctctggtttgagacaccataatcatgtatatgaacggactgatcagacatcactgatgcttcttttgctacctgttcaactgtagctgaataaggagaacaatccattggtgagtagtcacctgctaaatccatgtctggcccagtggtgcatgtttcttgagaagcaaagtgatggggttgagcatgctgctttaacttggtgggccttttatttttccttgcgtttttatgcgcttcctttttatctctatatgctgattttatatagtcaataccaaataagctctctcttgaacaccaggctggctcttgtctgactgcacaagattcaccaggaatagtatcacttgctgtatttgtagttttgaaactgaaagatggcatatcatttccagaagtagagaagctagatgaatgatttgaatgtgaaaatgcgcgtgactccggaacattgggctggggaatagcaccaaatactggaatggcttctgctttacttctgaacacaaattgggaagatccattcactttagtagatccgactgaagccccttccctattgatgtttaatttcttgatgtcctcttgtaatgcatgttctgcatatccttcggaaggagggacggcattgctaccactactgaaaacaaaactactaggcccataaccttgatcattatctgatctagaatgtgtaatgtttccaatatcctcattagccaagttccctccattaccctttagttcaaaggatacattagtttgaatgcttgtgaatggcatgcttgctgcctgggcagaagaaaaggttgtggctgcattagttccaaaaccagatacttctggtggctggtgagcagtttcatctttattgttgttggatggggctccatggcctaagttcagttttgtcatcctggctggaagtgtgctctccatgttaccatgaactgaggtaaatgcctttgaatttgcaccagtgacaaaattgccacgatcgtccattaccttttttgaagagtgtgagctcaaggaagcatcacttccaaatacaaatgcctctgatggataaccagaattatcactttgtttgcactgtgtaactccacctcctatattcaaacatgatggcaactctggaggcaaattattaacactactaggtggaacaaaagcatcactgttggcagcagaggaaaaaacactgccctcattagaagtactcccagagacaaacgcttcggcttgacgactactacctccacttcccttctgctgaaagggaacatcacttatcttctcaggacacagacctgtgccatcagtaacattgaatgtatcagatggattggtattagcaccagaagaaacatcattagtcctatccgcatggtcactggatacgttccctccaaacacaaaaactggtggtgcatcattggtagattcagtgcccatccttcccaaaggcgcttgattgcctataccatattgtgtcagcttctctgcaacaccatttgcattggcagaagcatatgaacctgcacggtggacatcagaactagtaccatcagaagaaggcccgcttccattgcctccaaacacgaatgtttttggcacgtcattatcaccctgcaacggcactctggtgcctaaattcaactgcgtcaatttctccgggagcacattcacttcactgttgagaaccaaaccaggtatatcaactccaaaaatggagctcctatccttcttgttggcattgacgctactctcaccacgagtctgaagattcatcctccccattttctcgggcagctttgccgaaagccgcccatccctcgtcgaaccgaggcaagctgtccctgacgctcccgaacacgaagggggcttctccattggatgacgccactggaggctgctgactcgtggcagaagccgcaccgccaaacacgaatccgccgtcctgaccctccccggcgccaacaccaacgccacccggcgcgatccccccgatcccatcctgccccgatgcgtccgtaccgccgccgccccctccgccgaacggattccacggcgccgcagcgggtgacgccggtggcggctggcgggagcgggaggaggccgccgcgtggcgccgcttggccagacgcggggcgcggcgggaaggaggaggcggtcccgcggcgtgatcggaggaggaggcgaggccgagccccaggttggggttgcccatggcggcggcggggagcggggtgccgctagggttctggcccgtggtggggtagggggctggcgctgctaccgccggcgtcatcggccggcggcggcggcggcggctgcggcggcgtgggattggaggggaggggagggtgttatgggtgggtccgatttgggggggagaagcggaggagggaggaggaatggggttgcgtggggaacgcggcgaaggcgatgcggtgcgggagagaggagaggggtggcggtgcgtgtcgcgcagttgggttgggcctattctgttctgtgtgttggggattttgaccgtttgggacgtgtccgtaaagctgtggacgacgacgatttttttgaatttgggtgcggtggggtggggttgcctggttttttttgtttgtttgttttgtttttttttcttggaggatgaacaacaatgaacccgtttgttgattcgtttttaaggctgtgttctttttgatagagttctcaacccaccgctcttattttcgatgtgcatgttttctaaaatattaaacatgtgttttaaaaaaattctatacgaaatttgttttaaaaattcatattaatttatattttaaaaattagtaaatacttaattaactatacactggtgattcgctctattttacgtgtataggaatcgtgcctcagataagatgtttggtttggtgagattttcttatgcggatgtgcacttcttttatatataataaacaagtatgcacaagaataagtttggcgagaaagaatgcaaattcagaaacagaattatcttgagagttctatatactaatcatgagagaattttatatttgtccccagatgttaactgattctcttatttgccctcgcaaacttgcctctccctctatttgtccccaattcaaaaaaatgtacatggcttgcttgctgttagaaggcacatgaaaggataattttgcccttgtgatttttttatatgacttactaaaccttgttgaataataatttgatttttttaatgtagggattaggacgcatattagtattagagggtctgtttagatcccaccttaaaattttacaccatatcatatcaaacgtttgaacacatgcatgaagtattaaatataggctaaaaataactaattgcacagattgtgactactttatgagacgaatattttaagcctaactgctccatgatttaacaatatggtgttataggaaacacgtgctaagacgtattaattaggcttaataaattcatctcgcggtttactgacggattctgtaattagtttttttatcagtgctcgaacaccccatgcgacaccctatataataccggatgtgacacgccaaaacttttgacccctgtatctaaagaccccatagtaatctgacattgcctttttttttcggggcatccatgtcggataggatgaattgaaaaataaaaacagccacctggtcggaaagtggaaaaaagtgacacatatgtgagagaaattagtggagatcaggtggcaaatgggaaaaaaaattttaggagggtggcatttgagaactagttttctgaaaggatgtcaaatagtaaattctccttgatgatttcaagtaaggcaataatgaatgtaaagtactaaaatatttatatttcttaatgattaagtttgaaggaataatgaatgtaaagtactaaaatatttatatttctaaatgattaagtttgtaatagttagtagttagttaatcacttgctaataagttttacatgaagcagaatagcgcaactaaacctctagttcaaatggactctaaggctaagttcgaatgtaagggttcgaaactccccctccctcacacacgcaaaaccgtaatgacttactagcacgtgattaattaagtatttactaaaaatttgaaaaataaactattattattttttacaccaactttgctatagaaattcttttgtaaaacacacattgtttagcaatttaagggtgcgcatgaaaaatgaggcaacatatcctatgcacacaggccctcacgtgtacaccaactaaaaaatgtcaccaaaaaaatctagaaaaaatcatacacatactttcaattgtattacacctagggttaaaatcataacgtcaaattcattatattttagccgtaacaaaaaaaacaaaaaaatcagacagttttaaggttgcaattttgtcagaattttatcttttttgttattctctatgtagaataaatttgaagatgcgactttgcacgtagatgtaatactattgaaagtacatgtatgaatttttctagaattttttgtgataatttttagttagtgtacacggtgtgtacacgcgagggcctgtgtgcataggatacgctcccgaaaaatgaaggggcaaaagttgggacctaaggcacccaaatgaacgcacctaaagcatctgttgagggttgttaaataccaaattaatgacgtcaatacctacataaaaccataaatataaaacatacaacatagcggtaggatttatttctaacaattttcacgagtgttggtgtacatttgtatgcaggaggcaaacaccaaagttgatataaaatatacattaaggaggaggagaatcaaactcaaatccaaacttatggagttttggaccaaaaacccaactgaacacctccaaataggccaaacatccatactagtagaatgaggggcccaaaatgagtatccatgccgaaatccggggccaacggagctggccaggggttcgcccgaaccctgacacaggccgctggcccaagcccaagttcggttcggtagcaaaccgcttcccaatgacggttatggtcgttttcaccggtagaaaccgttatcagctggacacttgccaagaggagaagggagatgctttttggatgcttaagcatctccacattcccaaggcacctctaggcctataaatacccctcctctctctcatttacaacacacatggagctgaattacatgagcctctattatatcttttgtacattataaaataggtagagagtgaggggaagctctggaggagtacccgaaagtttggcactctctccaacttctaccttttctaggaggaattctggaggagtaccagagctgtcggtacactctgctccgggttcggagaaacttcttctattaagtaagcattcaggatctttttttatgttatttaatttcttagtctaagtgagatagattttcatctttacgggttcattgtttagtatccgtactaagtgctctagtactaggactttggataaaaaaggaagttcctgcgcaagtattagagtagtaattaataacttagacgtggtgtctaggttagagattacctttatttgttgtgtatcccactgatttgttagaggtagacggcaggtagtgacagccctgaattccgtcctagtaatcctccacatttggatatatcatagagttatagccggaaccatggtggcagaccaacaagggtcgatgcccgaagtaacagatagaaaattacctttacttagtgtagataattaaaacacatagaaagtccactctagcctagctagcctaccattagttgttgttcttggatagtcttagccttaggtagattacacgcgttccctgagttcggtatccttttggggtcacccgaaagtgaagtgctacagtggtatttcgtgtgtttgcaaatttatctgtggtcgtaagaaataccaatagcatccaaagtagccaatgtcgagcgaattcagatggctccacataggaacacatttatcaaaccaaaggcttgtttagaatcctagacatttataagaaactttattacaaatgccacatgaaatagtttgatgtgttcaattgccaagctataaaaccaaaagcctttttcatcaaaatccacaagaaaaaaagaaagaaaagcaaagcaaaggaaaggagcatctttatattcgaggaattttaaagttggtgcgcatgctaggccatcaattcagaactcgatgaataagtttgtttttggtccctcattttgacgtagtttaaaattcatccctgaactgcaataccatatataacacgtttcttaatttgcaaaaccatgtcaactttcgtcccaaggcagtacagctctcagtttcggctgatgtggcgctttaactccggttagctgtgttgagtcagcatgggacccaccacgagcctcacatgccagtgtccaactttttttcctccctttccaatctcttccccatcctctctaggccaatgccaagcggccaaaggcggcccgactgcgccgcttgcaccccaccacccatcgtctctctccgtcgtcgcgtcgtcgctgtatgagcgtctcaacggtggtcacatacttcttgcccccgcgccatagccaccaccatcaccatcagcttctaaattcacgcaaacggtggggatggggtcaagattttgagaaatggcacatcaatgctgaggaggaccgggaaggaggaggagggccctggtggcggcgacgatggctgacgaggtgggtaaggcaagtgtgcgagtgagcacgagtaaaagaggtgggtaaggcgtgcatacgagcgagcaagtgagacacggctagaaccgtcgtttgtctctcccctttcttctctacgtgcggcctgtcgcggctgacccaccagggcaccacgccccatggcttttccctctcctccgcagcgcgccacaggctacaagaggtgagcacgaggcgactagcgcgagatggctcctccctggccgccaccgctctttctttccgccttatcggctcaagtggccgtggtgctcctgagacgaggaggcgtctagccgactgcctgtcgggcgagttactccttgagaggtggctctcccggatccccgccgacggttggggcatgcatctcgtcagcctctaacggcgatgacctcaacgagatccccatcccttctcttcctcctcctccaccattgcccatctccacgctgcagtgcttgctcccgtgctgacaacctgatgtcgccaatgccaacgcccaagcgaagaggttggctagagagggagaaaaggatgtgtcactgacatgtagggcccatcattttttttatttaaaccaaattccctgacatgtgagtcctcgatgacacgcccgccatgtcagccaaacactgctctgggatctcgggtacactgagtttataaattgagagacacgttatacttgaatattgtggttttgggatgactttcaaactccaatgaacttattccgaactcgaccgatctgagcccaattaacatctgacccaggagcggcccataacggcagagagcccaagccgaaggcctcctcctcctcctcctcccccgtcgccgacggtatcggcgtcaccatgcggcgtctcacctccgctccgctcccctcccctctccatttcgaaatgggcgcggcgcgagagaggccggctcgccgccgcgccgctccccgcggcggcgtccagccgagttagcaccatgtgagtatcccccccccccaccaccaccaccagtccccacgtctcctccctccacagcgccgcaccaccgtcacgcggtgatcgcggtgggggccatcgctgattgctggaggcgccgcggtcccggtatgtccggctttcagcatcatcgtatgccttagggtcgcatggcgcgctttgtctggatagcagggaccggacagattcgctttccgcgtgcttcgcgataaggggataataggtagtcgaactgtagaaggttcattgtactctgcacacgttggttgaaattgtgggggtacagattgcacgtgaaactatcatatgcggggaggaattgagctctggctagccgaaatcccgttacgtctagcaaacgagaagttttactgtccttgcgaaagtaactcgaggtactaaattttacactaaaaaatatggtgccttacggtatcttttgcaaggatggtaaaattacccctagcaaatactagttgattttggttagttaccagttgatccttgattttagtgcagtatgcctttatcttaatttgactacctgcacgcttgcagcctaccatgtgcttcgttaggcaactatcattcaaaccgacaagccccacagcatttgtgccgcaaaggatttagtactgctggttcatgagttcgaggttgatatgtcaaatatgctaagtggatacaattattgtttatctggagttccgcgaccacatactgcaaggtgcagtgctgatgtgacaaactactttttccgtgacctcatctgttgataacccaagatcaaacgcatttcaaagccttcatgatgcttgcctataggcatgcttgatgagaggactcctttggatgtctggcgtcaccttttagctgctgctagaatggataagatggattagacattccattgactagttgaaatgaggtccattaccaatagtagttctggccccgggcctctcctttggtttcatgcaatggactgccttttgttcaacaggtgacacttttcatggttattgaataattcaaatgagtatgatacattgttggagcgtgttgaaaacatatcggcgtgctacttatattactatttttagtttctgatttttgtctgtatggtgcggaatctttcaatctaccaactacaacttatctagaaagttaagatttaatacataactaaggttaaatactttacactacccttgctggttgctgaaatatacaacacataaaccaaaaggtaagaatttatagaatataaaatttcatcactaatatgttattcttttttttgtatacattttgatgttttacactatccaattgaaaaggcatggcagtatttctgctcagaatgttgacataagttacactctgatacgagtttatgcttcataataaaactaagcatgaaacttgaagcagctttctttagatgatttgtcgttactagttttatgaacgaggctatggatttaaaggtccttttgggttatctaactataagctttagtgtttacgctacattattgtgaaaagtgcaaattatagtactacacaataatatcttctgaaaaatgtcagttcagttccatggcaaagaagttggaaaattcaaaataaattgcatgccactaaaccttcacttctactacctccgtacctaaaaaagtgtgtttttagctatgatcctggacagtatttgtcccggttcattgctaaaaatatcactgtttcaaggatggagggagtagtaccgtatgattgaggaattggctcattaaaatgaaataaaacaatctgaatacttgaaggaacatattaataaattattatttaaggacaattagacaaatatggatatcttcttgatttttgagatgtctgcttttggcatgtatttcttcttattgttactttcatcaagttctgtgccactgaaatgaaagtatttcctgtagttatagatggaatttgcaatctaaatgcagtatcaataagaacttgcaaggaaaatcacccaataaacatgtatagttgtacactaaacaatagctatattaaactcatatttggtatggatggttgaacggagtggatcaattcgacatcctcctatcatcaatgatattggccagtaattaatatttggatacttctgcaattataccttttgttctttgaagaagccactcaccatgaattttcttattgtttcacttgatggggatgttagttcagtcaggtttttttttttaaagaaactctttactttcataaagttacttgtactttgaatttcagcaaagttatcttctccagttgatcttgctaacttccataggtgtgtgcttaggtggcaagtgtgacatgctaatgctgatgatgatatctagttgggtgaaacatttaagttgatttggatgacctttgagccactctgtatcacaattagggatgataaaagcagactaaagctagctttcacaaaatattattgccaattttgttaattacttgttaaattaaatgtgtatcttgaacacttcctgtaagataatgactctgcagtcatcacggtgataggcacttattatgctatagtttcctgcttaacacaaaaacatgtgatcttttgcccattggaaattgaaaataggcacaagttctctacattcttgatctacctggtactgtttggctgattattttctgttttctgctgcttctcttcctcatcaaaggtgtctggaccattgattactccttaaacccctattcatagaggtttaaactttagagatattaatgatataatgtgctgattgtgttaatgtcttatctgtgacgcatatgcctttttctactgtagacgcatatgcttttgcaaatgctttatgggcatgttttattatttggtcaactaatgtatctcttttcataagttgtttgtctcttgacacttgacaatcatatctaatcaaatgaattcatatccttgttgatcatatatttgtgcatcaaacttttatcctcaaccttttaacaaaagggggaccatgttcattggggaacttatatttttcaagaatacctcaaatcttttttattgttagggcaagttatacttcagagaaaacaacaaatatttgtactttgaatcagtttcttacctctgcatatattatgtgcaatctcaccatacctctcattttttatgcacccttacaaagtttgattctgtttagctcaagaaaatatggtgtgttattatattgcttgccatttagcgtcagaacctcattcactagttctggtttctggggactttggatcatccaaattatatattataagtttcatattaaattgtgtatttctgcatgaaaacgtgatatgttattcctcatggaacatgcatcatgctaaatgtgtatacaggcacctttgatggtcaaatttatttgccaatcatcgccccacccatagctgctttttgctactgtcgtcaattcccacagcactcagcatgagttcctcttgttagtggttcagttcatcattgcacagcttatctttctgctgtaagtactgctggaattctcattttgcttggattggtacaatgctcaaattattgcttccaaagagcttcatagaaaattggaagtaaggcaatgctgctctcctttaatcttcttgatgagaatgttcatgagtgcaccactagttcactgctgatattcagtagttagtaaactgtgttgcccatgctacagttaattgccttttgtaaaagaaattttacctacagttctgtacaaactacaaacgtttgctcccaggaaataaatatttacattagatactgtcatgagggcaagggtagtgacgctgatgccttttgaaatattctttgtcctggagctaagatggccaaggggtcataggcttttttcctctgttgaaatgtgtcccaccttgcaccaaaatgggactgccactcctgttctgtggtatagtttgggagatactgcttcactccaatacctgccttgtcagagaactctattatcctgtagttcaggtccaatgtatgtttgatgttatgggggccaagtgctgaggataggaatgccaccaggtagaaaacttcctcatctggtatgactactgatgttctgttgtcccatctgcatgaaatgattaacaagaatggttattcacttaatgatgcatctccatggtatctgtgattcagagacaaagcttgttacctggatttgttcactggatagagtaatatgggaccattgttactgtctttcaggattttcccaaagacctccttcgcaaatttatggatcatgcttcttggaatgatgatattaagccatgggtgtgggacttcccacatgcccttagctctcaacttcatctcagaagagtgtaccctatccaagaactctatgtatgttacatccgtgtggaataaggaggaaggcatatatctaagttgagacagcagtgtgttgacctcctgtaaacatatatacatacagaattcaaccactcaaacttgacctcattttacttggtttataaacatctttagtgacataagggtaatggttggctcacctgttccatgacatcagcctcgtcagggttgaagttctttgtcatctcaaggcagaagagcacttttccatctgattcaaactggctagaacgcactgggtcctgcggattgaaggacgacctccagttgttcaggatgcctgtcctatttatgatgacaaagccctcgatgtagtcaaatgtcttctctgctgaaatgagcatttcctggtcttcggtgaagcttgtgaaatccaagtagagaactcgtagccaccttacctgtcatccatctgattaactcatgagtatgctattgaaatgctaatatcatcaagctgacatgacttaattgtttcgcttaccatttttggagcaggttcaagaggaatcctggctcttgtgatgacgccaaactgacctaggccaccaagggcagcatggaagagatcagagttttgttcaggtgagcatgtgataacatcacctcttcctgcatttgccagtcattatagagagttagttacattaaattgttcaaatcgtcatgctatataggtctctctcataccagtcacaatttccagctcgttgacattgctgatctgtgggccatgccggaaggtctgcccactgactcctgcattcgacagtgtgcctccaaccgtgagatggagatagtccgtccacgactttggtgctaaaccatacttcagagtctcatgcaaaacatttatccagagttctcctcctgaagcatcgacatagggtgatacgccagggttcaccctcattgtgttactctggagggattccatactgatgatgattccctcagcagcctgggactgcccatacagcgagtgcccatgtccacgggctgccactgtgagcgtggagtgctcacccatcaagaacacatgcctgatggttgtggcaatgtcagccactgagccaggatgaagcaccgcaaccggcgggaagctggacaggttgccaaagtcctgtgcagcagcagacacatcgtggaagctgaaatggccatcaagggtgagttcctccagggatgatggcacatcttgtttaggcacatgcatggtggtgacaccaccaagggcaagtaacaggagcagcttcagatactgcaagagtgatggcctcatggctcttctacgtgtcaagaatgaacaatattctgtggcaatgttttgagaggaagacaaaatgtgcaggaggacagttgttcactgccaagagcagagggatgggagtggagatggagggagagaaggagatttaaaggaaaaccttgaagggtatgtatgtggactggtgcaggaagtggcgtggtcaaaccggtattgggcactgtttggtagactagaaacccatgtgaggatgtgctgcttacaaaatttggaagaatacatgtttcttttggaggaagctatgttgcggtggttgatggctctatttgagatgctaatgttctttcttccttggcttctgtttcaagcatggtgcagcatctgtcagtaagtgattggatgcagggaaaaaatgatgcattcgtttagtaaactcagtctatcacagtacatatctttcactacagcttgttcagaggaacagtgacatagaagagatcaagcaggtgcagtgaacagagatgggttttgagcgtgtatctggtgtggatctcagaaggattgagattctgatgaagtcatatgtagggaaaaagaagtgatatcaggtattcaagtggcaaacctggttgctcctgagcaggcctgcttgatccctcaaattcgatttctcatgcaaaaattcatgttggtctttgcgaggatgagccaaagtgctatctctgtgctttcatatttacaagtggcaagcctcctctcaagcatatctgattaagtttcttcccatatttctttttcggatgttggggcctgttttccaactgcatgaagatcaatttcttgcagaacatataaacaggtaacaaagcttctgtctggccatttttagacaagttgatacatcaatgatataattctttctcaatattttgtggttcaggaatttgatattttgtgctagctcaattgtatggacatggatcacttaaatgtttgtccctttttagtgaccagaaacttttgcttgataatgtagaattcctttgcccacatgcatgctgttgccatcctaaggtttatccaaaacaacactgccatgttctcggggtaatttttttccaagttgctgcctgttagagtctaccatgggaatcaacggatcattgtgttctcgtatctgatcatatctgtctgaaggcaatgtgaacagatatgtgaaacaaactgaatgctctggcatgtctgctttttacacttaggagcttagacaacagtttatgctgcagttctgaagatatctggtaaatccacaagcataggaaacctaggttggacagactttgtaaagcaaagtggaaatgaggggaccgggaaaactaagtatttaccttttttagggataagtttatgcctaacttttgtcacagattgtccttgtgtgaataatttgatacatgcgccagtgaacttatgttatatcagctgtttacttcgattattagcaatcgggattcaggcatggtgtttatttgagttttataggtatcatgtgcaaaattcaaaaacatgtataattcttccatttttgattacgatgccggctctggtatccttttataatgcacaatattcagactttttttcgttctacatagtggttacttgaattggggggaggaaattagcaaagctagatcccctaaggtctgaacaacaaattggtagactctttgcattactatccattcagaattgatgcattgtacattttaaagggtacatttgaataaaccaaaatgttgaacactgcaacaaataataccatgtctacccgacctgtccaccaaccagaaatttacaggaacatcacactctgtcaattatatttacgtagttcttggcaaaataacatcctgttctgacctttgactgcagaaatgtagctgatgccatgcctgcataccacccatgagtggcatacctaatatcaatatcaaggaatgacttcctgtagtgctcttcttccttgagagcacacgcaataagctatcaaaagagtatacatcttttccaagaaaacgaaaggtagagatttttttatcaaacatatcaacacatgacctatttgttgacttgaaag

SEQ ID NO: 16558 - DNA, 2429 bp, Oryza sativa
ccgcaagaacgagaatctgttgtcggacatcacaataaagtgtaattagctccagaacactcggggccttattttattatttcctgtgaatttggagagagaaacattggtgagagtacgattttgcccctgccctcacaccagccagagcaccgccaccacctcctccgtgcggcggccggcgcggtgagtgcgctggggagagggggagaaaggcgagcccgctctgtgccgcccgctgccacacccacgcaggccgccaacgcacgccgccgccggtggcgacagtcgacgcacgcgcgtgccgctgccttctctaccatctgcgccgttgtgccggaagacgaggaagacgacagcgacaaggatgacaagaaggaggaggccgtggagctcgagatgctgcacatcgaccacgcgtggaagtccgtgaagctgacgagctccgctggtgaccaccgcgggctgatgcaggtggagctgctccgttgttctttggtcgccggacattgtcgtcggcgtcagtgtcgtcaatcaacacgtctgttagctccacgccaaaggggtcatcggcggcgatgagcccacgcacgccggctacagtgcgaaacatcccggcgatggctgccgccgctcagacctgtcacagggacagaacacaagcgctgcacatgttcagttccatcgccgccgttggccaacccaatgcgtcgtcactgtccaggtcgagacccaagggcaaacttgtatttatttagtgtttctctctctaaattcacaggaaataataaaataaggccccgagtgtccaggagctaattacactttttttatgccagatagcaaattctcgttcttgcggtgtccacgagctaattaaacgtttttccgataccctgtagcaaattttgccaaaagaaattggtgcttcatgcgtgaaggtaaaggagagtatgcagatacaaatcggagtgtcatttccttacttgcttgttctgtcaatgtcaccgacgtggagtagccgccggttgtttctcttgacccagatgaacacctccttgctggttaaggtgatgtccgacgtccggcgacaaggcccgaagcagcgccttcgcctcaaccgccaccggccaccgccgttaaccgccacggtgtcatcgtcctcctccatagtgtgtcaccgatctgtgggctgggatggtggatcgattcagatccggggaagttgtttttatcgaagtaaatcatttactccgataatagtgggagcatgatgacaggacgtggggtgggatcggaagtagggaagttgtttttattatcgaagtaaatcgtttactccgatatcaatgggtgcgggatgacgggacatggggtgaggtgggcctggactaatacatgtttggcgctcggaatactaaggaacgcactgcgctcctaatagtactactcttttttttttacccttttgacatatattttttactcttacatacaccatagtttttttccttttcctataatatatgtaagggtaaattggataactcattgtagattttgcatgggagggtgataccgtttgtgcgtgtggcgattttggtaggttcaagaactatattaacccacatgataaatttgaaggactcgtttggacaatataaaagctaaattaacccacgaatagaactttagggatcatgataagtctcaggaccaccttcacattctcgtgttttgtacacaggtgtacggaccaagcatgtgccacccggaactcattcgcttgcgtacttgcacgggtagacgggtgatcaaagtttttggccaacgttacgcgtgactactcctattcatctttgcttcaccaacgtgtcaacggagaacactgaagacaacgaggtgaacggaaacgacaacaacactggagacaaggaggtaacggggaccgacgtcgacgaaaaacactgaagagaaggtgaacgggaacgacaccactggagacgtgaacggaaacgacaacaccaacagagacaatactgcctcaaactccagcggcggagtgccattcttatgatgctccaatttatcaactgcactaattcataccctaatttatcaattgcactagtttatatcctatatgcgtttatatcctatatgcgtcatgtttattgtcttaatattttagattaaaatatgtcaaattatgactaaatttccaacatgaaaccacatcgatatcaaatatatatgggcgtatcaaatatatatgggcagcttcacaaataggcataccctaatatacccatgttcaacatatgggcaaatccgtattaaaggtcctgtgggctgtggatgtaaagtgtattcatctgtgtcttcaatgtgcaagtttcaggctgaaacataccttaatcttgcatcat

SEQ ID NO: 16559 - DNA, 8366 bp, Oryza sativa
cctccttgctggttaaggtgatgtccgacgtccggcgacaaggcccgaagaagcgctttgcctcaaccgccaccggccaccgccgttaaccgccacggtgtcatcgtcctcctccatagtgtgtcaccgatctgtgggctgggatggtggatcgattcagatccggggaagttgtttttatcgaagtaaatcatttactccgataatagtgggagcatgatgacaggacgtggggtgggatcggaagtagggaagttgtttttattatcgaagtaaatcgtttactccgatatcaatgggtgcgggatgacgggacatggggtgaggtgggcctggactaatacatgtttggcgctcggaatactaaggaacgcactgcgctcctaatagtactactcttttttttttacccttttgacatatattttttactcttacatacaccatagtttttttccttttcctataatatatgtaagggtaaattggataactcattgtagattttgcatgggagggtgataccgtttgtgcgtgtggcgattttggtaggttcaagaactatattaacccacatgataaatttgaaggactcgtttggacaatataaaagctaaattaacccacgaatagaactttagggatcatgataagtctcaggaccaccttcacattctcggttctgtacacaggtgtacgggacaagcatgtgccaccggaactccattcgcttgcgtacttgcacgggtagacgggtgatcaagtttctgggcaacgttacgcgtgactactcctattcatctttgccttcaccaacgtgtcaacggagaacactgaagacaacgaggtgaacggaaacgacaacaacactggagacaaggaggtaaacgggaacgacgtcgacggagaacactggagaggaggtgaacgggaacgacaacactggagacgtgaacggaaacgacaacaccaacagagacaatactgcctcaaactccagcggcggagtgccattcttatgatgctccaatttatcaactgcactaattcataccctaatttatcaattgcactagtttatatcctatatgcgtttatatcctatatgcgtcatgtttattgtcttaatattttagattaaaatatgtcaaattatgactaaatttccaacatgaaaccacatcgatatcaaatatatatgggcgtatcaaatatatatgggcagcttcacaaataggcataccctaatatacccatgttcaacatatgggcaaatccgtattaaaggtcctgtgggctgtggatgtaaagtgtattcatctgtgtcttcaatgtgcaagtttcaggctgaaacataccttaatcttgcatcatcataaatattgctgatatttagtaggggattttcggcatttcagtggtcgagtgcaacatgaagatatttaatatacgacagcataattcagagcataaaaacacataacactagtataatatgaacttatagcagtgtaaatcacaatactaagaaccacacttcacaaatatcattgacgctttaaccatactgccacatgatacaggcaactcaagcgtagcggctgcaaatcacactactctgggtttaatcaagaagttaaaatggctggtgcagcagcagagccacagacacagacttaaaggaacaaacgaaagcctcttcaagtagagtatgctgcaggccagtggccagcgctgaaactggctcattatttgtagtaacatgagataatgagagaataatatgtggatatggtattacttaagctcttctgataggagcatcagaagggagccatggttgcttaagaacatcctcaagttccaagctttgagcgaagaggaacagacttatcatgcccatggcatcatcatcaaatttctgggatcctctccaattcctgaaagcaaagcacaataagatcagccagaatatagaacaaaagatactgcaagaaaccaatctgaagagtacaaacattttaatcttcttgcaccgatcttttggatgtttcagggtcttgtcccggcccgacgcggtcagggccagcgcaggctccttccggaccgggattgatcagagtttcagttgattgctattcaaagtcttcatagtcggcctcatccagcatgtcgtcatcgtcatcgttgaaggcagcgacgtcggctgggtagcgcaggatcccaccgatcccaccaaagccacggcagaactgtgatccttcctgcgacttgttggtgacaaactccagggtgcagccatactgctggtaattctccgcgaaccactccagcagcaacggcttgtcgatgacatcaaactctcctgatgttgcctcgtccacaaagttgctctgatctgcctcctggtcactgttgaggtacttgatcactgtttctcctgtggcggtgttcttcagctcgtatcgcctgacatcaaggttctcccacacaatcagtgtatccacagcacctatctcgagcgccgttattgtatcctgcacacctaggacatacttcccggtgtcctggcttatctcctcaaagtacttgccgatcagcttcttttcttggacaaacttgacatcagacagcacctctgcagacatctcaattgcttggttgaagccactctcccctccatatgacacatcaagagtcttgattacctttgcttgcaagcgtggatcaaacatctcagattttcccagctcggtcttgaaatcggcagagccagcaagaataagcccagcgatgtttggctggttggtggctgaattgatgaagaactgggtagcaagctcagccgccttgcgcaggtagttgtgacgcctctccatgcgcaggcgggcaaagcggacagcagactgccctcctcgcccgtgcttcttcgggagatcgacgctgaacttgtaaagaacctccctgctgttgccactaagtgtaccatacagtgttccgttgccatccatgattatgaaaccaaacttgtcatcagactccagaagctcattcagtgcctctgtgtggaacttgttgtcacacagatacagcgaagcgttaatcggcctgaacggctcaaagtcgaaggtgaccttcttctctttgccgtcatcggtgacaatggtcccagtatagagcactaatccattcacgggaactcgactatacagcttcagcctctgttgggcagaagttatggcggccaacacggactgacggttgactctgctcttgatgttagaggcagttccatactcatcacccagcatcttggtgactcgggagacctgatcacgaggtggcatgataagcgaaatcatgctcgtaccgttgcccctggcagcatcaagtgccttgatcaatttcttgaccttccatacttcaatgttcttgtcggtttcatgtccctcgcccatcttggctagtgtttacagctctcttcgcctgaaagaataaaggtatggcaactttatttttttaagaattgattggtatgaacaagttaaaataagactgatacaaatacttttaatgaaccaaaactcatacagaatgacctaaatatgaatatatagtcagtgtaacatgtagacgtgcttaatcattgaaatataaataagttctggtcatggtgtatattaaatgaaaccacacccatatacagcaaaccaaaagaaatctatggagtaacttaatcaacattcacacaacacagcttttagttctcacaacgctacaatgattatatgcagcagactagccatccgatccaaaacagcacagacatcagaaacatatgcactgtgcgttgttccagttggggcaaacactcagataagtgaatgtaaagtatcagaaatggaacaattttagagtgtgggtctctgttttaacaaagttgtttttaccgccttcttgtaaataaataaaataaggtgcgaaccctgtagcttagtccacaggagatcagaaattgcactaagatcacagttcacaacaggagatcagaaattactgggcagggcattttgttggattcagacatgagcctatgacagaagggtgtgtttagttcatgtcaaaattggaagtttggttgaaattggaacgatgtgacggaaaagttgaaagtttgtgtgtgtaggaaagttttgatgtgatggaaaaattggaagtttgaagaaaaatttggaactaaactaggccgaagtaggacgtaatagagaatctccataaaaaagagtgtaatttttaagaggtttttacagaccagtcaagaaaacttcttgcaaactggaatgatatatcattaacagatccatctttttagcatcgatctgcatagagacagcacttactactaaatcaatagagactttgcaccctatgttttatttggtccttctgatccaacaacccaagcgaacactagcaagaaggtactaacactaggatagtagcgttgtctaaataaaatacatccaacagcgacgagatgaacctcatcatactattaaaagaacacaacaatcaagattagacatctcaaatatctctaaatctatccacgccgaaacacacccggcaccaccgaaccaaatcgtgagccaagaattaatatgttccaccatcttagagcacacacacaggaaaaaaaatccactgattttacaaactaaccgtgtaccgtgtagacgcccaatccaatcaagttgagaagaagaagaagagacacacagaaacagatacagatacaggagctggaaagctggaaggaagcgcctcaaacatggaaagaaattagagcacccttgcaatcatcccgccattagccacatgcgcacatgatgacacaaaagtactcccccctcccaaaatacaagtaaaaataagatcatataagacattctactcagtactatttcttataattttgtgacggagggagtaatagtagtagaagaagaggggaagaggcggcggcaaggcagccgggggtgcgcacctgcgtgaacgagcgagatggccgggcgccgcggcgcggcgagcgagaggttgcggtgatgttcgtgtgcgtccgcactgcgtgattatattggtgccgctttggctccgcgagctttagaagagaaggttttgagcgaggcagggacggtggtggcggagatcacgtcgtccaagagagagagagagagagagagagagagagaaaggttggcacacgtagcagcaggcgggagagccagagtatgtgtgctgttcaccaacccgtgcggcgtgggacaagtgtccccgcgtcgcgtcggtctcccgttgatcggttcggttctcctccttcgcgaagtcgcgcaacgcaacacctggcgcagcgaggcgtcggccaccgaacaaccgttgccgttcgcagcagcgagatatttttttgggtaggcacttttttttttaactttattaaaatttggtaaggttgaaaatgacgccctcagatcggagttttgtcagggtgttacgttgaatgtggttttgttataatgttatattcaaacgactctattttgctacactcctatttagaccaattttgattatttgcaaatgttttccactgtgatctgacttttttttttgcccctataactattttgttgacttacgtgtgacatatcgatcccaatccaattgtcgtcttcctctagatgcccctgtcgccaaacctagatctcccccgcgtgacagtgctccgccggtagcaagggacgtgggggttagggactgcacttcgccgccaaccacgccggcgccgcggcacaccaggcgctcaacctgaccgcgcaccacggcatcaccccattctccaatgagctcctcgacgtgggcggcgacctgctcgcggcggagctcctcattgaggcgagagcgtcaagaacaccatggaagctgctgaacctggcgccgacaacattgacctcgatgtctagcctcctaacgccatcggcgatgacggggccttgcgcggcgacgaccatgcgaggccagcgcgcgcaagccgtagtcagctccaccctgcagcatccagccccttgagtaggccctccacctcgtcggggagggagatcgacgctggccatggtggagctcgccattgaagagggacttcaaaatccaccatggagttaagccaatttgagtgggatttactgggggaattgatgatgaggatgagaggaaccgatttttttcattcaatttggggcgagagcaacctaggatggagatcaagagaagcattgtcgcatgatttcactggagaaagaaggatggtggcgggcagaggtggaagacgctcctccacaactgaggcaagggcatttgggtcaaaccaaataagaaaaacaacggaaaacatttgcaaataaccaaagttggttgaaatggcagtgtggcaggatggggtcgtttgaaaatagcattacaacgaagccacatttggtgatggcattctgacgaaaccctaacccgaagatagctaaatatcaattttctcgataccgtcgcgtgtccacggtcggctatgggttcacatcctccaccaattagaggggtgatgaatggcagaggcgtgtacagtaaaatgtaaaatgtgaggagcgtgtacagctctacagggaaattattgtagaaacatacaatataaaaaaaagacacatcagtgcctctttattaataccggtttgacaaaacctggcactgttagatggttttgaactaaaaataagttcatgataaaaacatgcttcacctggcattgataatcattcaatattgattgttcgacgacacatcagcatcgggtcttgccaataaccagcacataagaataacacatcagtgttgaatcttatatttatagtgagatgaatggacttttggcaggaaagtacatcagcgtcgggtctttagaatacagacccgacacttatgccaatgacatcagtgccaggtattctaatgaccgggcactgatgtcgctaatcatattagtgctgatttcagatatatgaacttaaccttttcgtatgaactcggattacgacaaagtttaatgaaaattgtagctctcgacaagatctatgattttatagttgacaacttattcatttgagctattttagatactcaaattcaagattcaaatcttgcttatgaagactaagaaggaaaatatccatttactaacaagatagattgatgcgtaggtgagttggtaaggatagttgcatcatgcatgtgaggaggatggtgtcttgagttcaaatctttacagtggcaaaaattatattatatacaacttgcgaaaatagatattagtggttgtggctttatacatacatgagtaaagatggtaggagtattcaaaaatattttttagcctaaattttgaatttggatacttattatcacagatgaacccatttcagtgctgagtacagataagcccatatcagtgccgggtctagagaataccagcacacatgagtctatccagattctatctaggtgcttctaggcactgaacaaagggaatcatcagtgccgaaagtttggtgtcaggtatattcacttcactatcaagcatttcaagccaactgacattgtccaagtgcaggaaaaggcagtaagcccccatcttactcaagacattcaatagattatccttacatcgtcccaagactgctcatgataataacaatggtgcgcacaaacgacaaagcaaacatctcaacacatgtaaaccccccatctagatgaggtagaatggaaacggaatcaaatgatcgaacgcgaatctcgctaagttgtgagttccatgatggctgtgacgatgtcgccattggcagccttgagtgccttcaccgccttggacctcgacacggtggcctgggtcatcaccagctcgatgtccttcggctcgacaccagtctcgtcgacggcctcatcatcttcctgggctgctgtcgacgcctccggcttcgagagcatgctgctcagatccggcgccttgaactgctctgcagcctgggtctgcagctgcgagctcaggtcctcgatcttggcctcgccaaaaatgacataggtgtcggatgtagggctcttgaagacatccggtttggagatgacaaaaaggatctgaaatggggcaaaagaaatagcaaacatcaacaggaatccaactaatagaactatttagattggctagataagagcagtcgtaagctcacattcttgctcttcttgacagtaacacggctcacaccagtgataga

SEQ ID NO: 16560 - DNA, 556 bp, Oryza sativa
agttggtgactaacttgttagtttcagaggtcaatgagatagcgatgcatgaggttgtgacaaccaggtaaggtgattgtcacgcccagaaattcccgaatagaattccaagcagaatgtgcattaaaattcccgtccaggaccggccggggtacacaaacgacaaagttgacatacagatccacgtcttacaaacattataaaagtcttacataaatgtagcggaaaacttaaaaggataactggagctaagccttgacttggactgcagcgggaacaccactccacaggcatcctcgacggcacggacgaagcctactcctcggagaaaccaccatctaatgcatactcaaattctgggggttggggaaaatagagcaagactgagtactacccactgtactcagcaagtcataccggaataggggtatgatgcagggaattatcaaggggtagctataatggttcatttgcataaagcggacatttataaacagaagttgaaagcagtaaaacagttgtaataattaatcaatattaatcatccactgtccaa

SEQ ID NO: 16561 - DNA, 568 bp, Oryza sativa
cattggacctgaactacaggataatagagttctctgacaaggcaggtattggagtgaagcagtatctcccaaactataccacagaacaggagtggcagtcccattttggtgcaaggtgggacacatttcaacagaggaaaaaagcctatgaccccttggccatcttagctccaggacaaagaatatttcaaaaggcatcagcgtcactacccttgccctcatgacagtatctaatgtaaatatttatttcctgggagcaaacgtttgtagtttgtacagaactgtaggtaaaatttcttttacaaaaggcaattaactgtagcatgggcaacacagtttactaactactgaatatcagcagtgaactagtggtgcactcatgaacattctcatcaagaagattaaaggagagcagcattgccttactttcaattttctatgaagctctttggaagcaataatttgagcattgtaccaatccaagcaaaatgagaattccagcagtacttacagccgaaagataagctgtgcaatgatgaaactgaccactaacaaaagaactcatgct

SEQ ID NO: 16562 - DNA, 1157 bp, Oryza sativa
cctttcttcatttcacacttatctcattacagggttccttacttataaaggtcatatatgccagcctggccgcttggccgaatcacacaacacacatgctcacacacccatccgacacgttactgtaaacgtcatcctggcgttgtagctcgtcacgcgtgtggtacagacgtgacagtaccgcccgccggagaaacagcttgtccccaagctggtgctgatggaaagcgggtcttgagcacttcataatcctcccaggtagcctgatgcgccggtaaagaagaccacttaatcaacacctgaacatgtgctgcattgccctttttcacaagccgacgatcgagtatttcttcaggtcaaacgtcagcggcatccaaaaccacagggtgaggaagagaagtaaagaccggtgtatgatcaggaacatgtgctttcaactgagagacatgaaagacgggatgaatcaaacttgagtctggtaactgtaaccgataagccgactgaccaattttctctagaatttcaaatgggccaaagaacttgaaagctagtttggggtatggacgattcaccaccgaagattgagtatatggctgcaacttcagaaacacataatccccaactgcaaaggatcgttcagaccggcctttgtctgcttgatgcttcatgcgcaactgagcccgttgcagttgttgttgtaagaaagcagatagctgattgcgttcagaaacaagatcatgactgatggactgaggagagaagtactggcacttgactgacatgaggatcagctccaaacaaagcttgatgaggagaacaacccaatgcagtgtgaaaagaggtattgtaccagtattctgccaagtgcagccatttgttccacttagttgatgttgcttgagtaatacaacgtaagtacatttcaagatattgattaacacgctcggtctggccgtccgtttgaggatgataagcggagctcatactcagagtagtgtcccacactttgaacaaatcactccaaaatcggctggtgaaaattttatcccgatctgagacgatagaatgagggatgccatgtgtcttgaaaactgttttgtcaactgcattggccacttgggaagcagtaaatggatgacgcaagggaataaaatggg

SEQ ID NO: 16563 - DNA, 5318 bp, Oryza sativa
ttggaaagactttcgataaaatccattgatatgtccacccaggcttccttaggaattggtaatggtgttaacaagccagggagcttgcagtgttcagacttggcctgctgacaaatctgacactgcttaacaaagttagccacatctgatttcagacctacccaagaaaataacttcttcatcctttgataggtagcagtagagccagaatgacccccaacaggagaagaatgaaaagcattaatcaatttcgtttgtaatccagtgttagctccaatccatactcgttcatgatgtctgattaatccatcatgcagagaaaaaccttgtgtattaggagattgaacagccaattcggtcagcaaagtttgagcagcaggatccactggataagaatttaacacctcctggagccagaggggagaagccactgacagtgcagcacaatgaggtataacaggcatcctggacagcgcatcagcaactatattgtcaactcctttttggtattgaaaagtatattgaaaacccatcaatttagtcatagccttctgttgcaaatcagttccaagaacttgatcattcaagtgacatagacttttgtgatcagtgcgaatagtaaaagggcagtgctgtaaataacatctccatttgtcaacagccatcattatagccaaaaactccttttcatagatagaaagtttctgattagctggtcccaaagctttgctataataagcaataggatgattcaactggctgagcacagcaccaactccataagcacaggcatctgtctccaaaacaaagggaagactgaaattaggtaatgctagcaccggggtagaactcatggctagtttgagctgttgaaaagcttgttgagcagcatctgaccagaggaatgctttcttttttaataacactgtgagaggtttggctataatgctgtaattcggaacaaatttgtgatagtaacctgtgaggcccagaaaacctctcaactcagttgcagtttgtggaacaggccaggctaacatcgctgcagttttggcagcatcagtactgacacctttagcagaaattatgtggcccaaatactctaattgagcacaagcaaaagagcgcttagacattttggcatataactgatgttgtcgcaacaacataaacacttgtctcagatgatgtaggtgagaatccaagtcagggctgtacactaaaatgtcatccatgaaaaccaatacacattgcgaataagagatgcaaatactgaattcatcaggcattgaaatgtagatggagcatttgttaaaccaaagggcataaccctgaattgaaactgcccatgatgagttttgaaagcggttttaaactcatcctgttccaccatacggatttgatgataactggctctcaagtccagtttagagaagtattgtttgcccgctaactcatccaataactcatcaaccaccggcattggaaacttactcttaatagtgacagagttgagtttgcgataatccacacaaaaacaccatgtcccatctttctttttgaccaacaagactgaggaggcaaaagggctcatgctgggagtaataagaccagaatcaatcatgtccttgacttggcattcaatctcatccttttgtaaaggagaatacctgtaaggtttactgttgacaggagcatcatcagggtacaagaagatagcatgatcaaaagtgcgatgaggaggtaaacacttgggctcttgaaaaacatcagcaaactcagacagtaatggagctactacttctgaaatggactgagaatctgcattgtcagtaggttcaagcaaaacagcagcccaaatatcacaacccttctgccatttcaatatttgagggtaagaaatagcacataattcagtctgggaatcagactcttgaacaccctgcagtgcgattcactgatcttgatagaaaaacttcagagttttagttgcccagttacaagacatatcaccccattgagccaaccaattcatccccaatattgcatcatggccccccgactgaaccactttcagatcataagagaatgtctgaccttggatccaccatgtgaaattagaaaccacatattggcaagagagaaactcaccattagctacctgaaccaaggaaggggaaatagggcacaactgcaaacccaacagctgagcaaaattgagatcaatgaaactatgagagctgccggaatccaccaacatcaacaatactttattctgaaccaatgctctcaaacgaatagcattatggcgagatgcaccagataacgcattcaaagaaatatgatactgctccttagcatcagaatcttcttcggtagccactgcattcaaaagatcatctggaataacttcagtgatttgcatagcttttaattaaccagtgatcacacactgatgatcaggtgaatatttatccccacatttaaaacagagtccattcgctcttctatattccttcaactgtttagctttccataattcagctccttcaagttgaatggccgatggctcagagacaggaacagacgtatccactttagcgccaacccctttgtatgtcaatttcttaagaggtttctgtccactgtctagtaacacactttcttgcactaaagcaattgcagcagcctgctgaacagtgtcaggtaactggaccagcacagctgagcggatttcttcctttagacccagaataaaacgatacagcagcatcatccctcccacagatggatcaaacacacgcacctggtacactagtgaatcaaactgggacttataatcggcaactgaaccagtttgccgtaaggtttgcagcgcctgaactttttcacgctgtgcagtactttcaaactcgagagcaaccgcataacgaaattgagaccagtcacaaatctcttctactaacttaaaggattggtaccactgtgctacatttccagacatatgcaagactgccgcagaaaccttaaacatagccggaatttggtacatgtcaaaataggtctcgcacatatctagccaaatacggacatcagagccatcgaaacgaggaaaatccatcttaggcaagcaactcttagcacgaacaccctgatcaaaaccctggctagactccgcttcgttgcgaataaacacaggacgagtatggaaccttggtggcggcggcggcggcagtggtggtggtggggaaacacccgcattgccaagagaaaccgcagatggggagcccagaatactcacttgatcggaagacgccaaactcttttgcagccgcgccgcctgaagctgatcttgctgcagcttcccaaccgcctccagagcgagatccaccttgacgacggcctgatcgagccgccctccgtgtttcgtcatcttgtcgtccatagcctccatcttctgagtgagtaactccaacttctccaacaatttcccctccatcgactcgagcgattggcataacggagcgctgagcttgatgggcgccgtggtgagcgttcgctccaaatccaaccgaacctgaaccggacttacagcagccgcacccgagggtagccgcctaccggagcatagggattttaccagtcagatcgagagaatttgaacgcatcaaccacggaaaacccgaatctgataccactgtaacactactagatcatagcagaggaataactagagcaggagaggtgaagaacagaggaggaggagacagagtcgagaaagaaaggggcagagcagagttgttgagaggagagattcgtttttcctttcttcatttcacacctatctcattacagggttccttacttataaaggtcatacatgccagcctggccgcttggccgaatcacacaacacacatgcgcacacacccacccgacacgttactgtaaacgtcatcctggcattgtagctcgtcacacgtgtggcacaggcatgacattataattggtatattcgtagctgtgttactcaaattttacaaaattagagccatgccatcgtcgtcacgttttccatcttccccatttgtacatgaggttcacctgttagattcgtcttcttccttcatcctctcatcttctcttttctttttcccatctctctccaccatttcttcgtttcttctttcttcacatgtagagcagaaggaggagaggagcggggtgccggtgctccagtggctgggaggtggcgacgcagcgaccgaatgtgttcccgagcttggctcactcgtggaaagtgtcggccggtacagggagctagggagatggccagaacaatggatggaagggcacaattccggcggcaaagaaggtgatggtggtggtgggatggggtggctaaaagagaggggaaactaggggaatgggttctccttggtgaggcaaaccggtggtgcgaagatttggtgtgaggggagccagtgagggagattgattgatgatgaggtggtgggcagacatggtagagaaagaagaagagagcgacaatgatggaactaggtgtggggtgcgtcggcttcgggcaaactgcgatggcggtggtgcgctgaggacgatgccctatcccccacgtggatgccgttgaggaagaggagctcatcatcgctggtcatctccatgaggagctcgtcatcctcttcctcatcctcctccatggacaaacgtgcgtagaggcgtggtcggggagagccccgtcgacgagctgctctggtggctcacttcctcggctcctcccacgaccaccatagatggcggcagaggttgaggttgcacggaggaggaggaggaggaggaggatgagggagcttgttgcgggtggtgccagcgagcgagttgatgtgtgggcgccgagtggttgtgctcgccggtgtaggagaggttgaaggtgtttgggttggaatgtctcctctccacttgcttgcagcacaacagcagcagcacaaggccgccgcagcgcagcctgctcccaatggcgccgaccacgccggccgctccgcgctgcccacgacgactcacccatggggaaggaagatgataagggagggtgaaaggaagaaaataaatctgacgggtgagtaacacgtgcagataggagagtagatgaaaaatgtgatgacgatgatattacgaatagacgaattataatgatatttatctaaataaacatatttaaaatggcacggatcgaataaacccaaacaagggtatccgggagggacgcacgattctacctgtttttgttatttttggcccat

SEQ ID NO: 16564 - DNA, 2450 bp, Oryza sativa
ttttaaaaaattatgtgtcgtactgtagtagaaagagaagaaggggaggaggaagggggagaagagggaggagtatagggggaggccgggcaaaccgatcgctgggcgatcgccctggcgatcgatcgcccattagcccccctccttcatcgtagttcattcgtcaaatccaacgatccagaatcatccaatccaacgtcttcagtcgtcccacctacctcggttttactaattagcgcgtacgagacttctctaagtcgcacgcgtgccacgtggcggaccctcatcgtctgcgggtgggtatggtgggcaccgcaagttttccttttttttcctaggatttttttttggagatgcatatatccaaagtaactaacccggacagttttagataataacgataattaaggtaagaattttctttttttttcaagattttttagtaacagattgaaatggaatctatacatgaagtgaaattttgaaacctttcaacttgaaatttgaatttttttaagtcaaaatttgaaaactttcaacttttcatctcaaattcgaaaaactttcaaaccaaatttgaaaactttcaacgcaaaattgaaaactttcaactcagattcaaaaactttcaagtcaaattgaaaaactttcaactcaaaatttgaaacttttcaactcgattttggaaactttcaactcaaatttaaaaactttcaacacaaaatttgaaaactttcaattctacatttgtaaagaggtgtgcgaaagattgaaaaaaagaaagaaaaacacatctggaggtgcaaaaatcgaaaaaaaccaaacagaaaaaagggcgcgcaagaaggggggccaacaggcgcgcgcgccagctaatttgctgaagtgtacgcatgttaacagcgaaatttggtaagcccttaagagaattaccatgtcaccaatagtcggattcctgctatattcggttaaggaaattaatctattaaaggaagcttatccagaagtgaccgagttcaaggaggatgcgacatgatagtttatctattaattaggcagtatttgttagtttcttttatctttaggaaaatgtgtttagtgtcctataaggattttatgttttccttttatctttaggaaagtttctttcttgtcctacaaggacaagtatctccccacgggtataaatatgtacacccggggtcattgtaaactatctctagatcaatataactactctcagcgcatcgtcaccctctttaccgaggtttttacttatcatccggcggaacttggcacctgacacgaggctgcatcggttttcgatctccggcgaaggagtaagtcatatgttctgccggccctggtgaatctatcggctacgtcagtgttgttcaaggctgcatcgcttcgatctcttggatcgctctggtttggttgatatatttgcatacctaatatctcaattatatctctaattgcattgtgtttagagacgcatcggtttagttgggctgtctcggttaggtttgatcttctgtcttagccgatatatctctacaatcacaatgctattgtaaatagatttgttatgtccatcacattagacagatctatcagctcatcgagtattagattatcatatacaatctcgtgctgcatcggttagtttcgacctactagattattgttgataatataaatcttgttgagccgataagttcatactagtgttttatcgaggtgctagccgataagttatctagacgttgcatcggcttataaggattgcatatacatataagttggatttagccgatgacaacaaaggtttcattgatttatctaatcttgtggattttatgacatcggacctctagccgatgtatgctttaacaatcagatcagtacttgttctatcatatcatattgttagttgattggtttctactggattatattactgttatattgcatcatcatcagccgactgcctttatatcattatctacattggacatattatcgatagttcaaaaccctattcctatcggctggaattactccatcggcttgacaaccgatcggctgtttgatctgttgtttacatatcttgtcagctgtaggatcaaactgactggcacacccgcacctcaccaagatttggacatgcactagagctaagcagatctcctaggccagtgtgtgttttttgcgtcaacaggttgatcggtttctggattcaccgtggcacgagagggggccgcccgttgcctgctggggacgggggcgaaacctgaggtgtggtacgattggttagagggagttatgcgaaaggtcctatcatctttctatcacgtggtggcatgtcggcgtacggaaacgtatcgtggggctgtgtcttgtgggtacagttgtgcacctctggccagagtaaaactatttgaata

SEQ ID NO: 16565 - DNA, 1846 bp, Oryza sativa
tatagggcgaattcgagctcggtacccgtgatcgagggaccccctttgtgagttcggccgggggaaagggcgcgctgatcaagaacgtatatccgcctagagtctttcgagaccgcatgtgagagctgggattatacaggttcgggccgctagggagcgtaataccctactcctgtgcgtgggatttagggttgagtgttacaaaggttcctaaactctagggagaactctcactcttcttcccctggggcttaagctaacttagagtcgtcccccctttttggtgagaaaggtcctccttttatagttcaaggggataccacatgcaccgccttggaaggagggcgaagcggggcgacggcgggcggagcggtgacacgcacgaagccggcggggcggcagcgggcggagtggggcaatggcgcatgcgggcgaagaggggcgacggcgggtggagtgccgacgcgtccgaactccgaaaccggcggggcgacggcgcatgctggcggagatcggcgcggggcgtacagcgatcgacggcggcctgggggccccgacttgctgatgctgttgaagacgaacaggagggcgtgtacaacttgctgcttcttgtggtgatggacgacgacggcgggagcttgctacttgttgctgctagcttgcttcttgtctgtggatttaacagcttggcgttggatcttgcggcttgcctgtggatctggatatgctcgctgcttgctgatgaagatgcgcttgttgctgacgggagagctgatgggatgacgagaccgacggacggtggctcgccggcgacggatgcttgctgcttgacaccggcgatccccacagcggaggtgcgtgtcctcctcctcctcgaacccatcgccatcgtcgtcgtcgtcttcagcggcgtcggcatcggcatcggcatcgtcgtcgtcttcagcagcggcgtcggcatgcgtcgtcttcggcggcgtcgggcgccgcgtttggggtgtgtatggggggagtgcggcatgcgcgtgtttgctacatcagcggcggaggtggaggtggaggggtgaggtgcgggatcacggtgacgccgccgccgccggtggtagctcctccctcgccggccgccgcccgcgcccgctgcgcccatctgctctctgccagccgcccatcgcacgccgtctcagccggccgccgctcagccccgctcggcgccgcccgttgctactcccccctatcccccgcagcaaagagaactaaaaagaagagaaaaaacaaaggggaaagttgacgtggcacgctgacatgtgggtcccacgctgactcagctgccacgtagatcaaaaccggggtcaaaaccaccaaaggatctcaggtgaccggatttgtatagttggttttgcggttcaaggacgcttttgtatcccggtgacaagttgagggaccttcggtgtactttttcctttgcaatattagatccgatgcttggtgggctcagcccgtttagtacatgggcctgatagtccacatgtatgtttcgttttttgttttctaaaattagtttttgaatttgtttcaaatttatacgtataaagtttctatatataaggtttatacaaacaaaatatattcttttctaggccatgctaacataatgctgaattgatttcaaattcatatatacaaagtttctatggcacaaagttttatatgcaacaaagcatttacgtatgcattttgaatagtttaaatttataaacctttttatataaaatttgtgtataaagaaaaaaaacataggtgggttacctcgtgggctggcaaccccgggaatgagaaaatcactact

SEQ ID NO: 16566 - DNA, 6580 bp, Oryza sativa
cgagtcattgctatcatatgtcttagttaatctatttttagcttctcaatttagctctatcggtcgtggctcgctttagggtttatacttgtttcgattaaattgtcttgctagattagattagctaagacatctaccatcctgaaaaatgtctaatttcttgattgtctagactacatgttccttttcatactttgagatgcatcatccctagtcgtgcttggatgcatgcaaattagcctgcaattaggcattataagaatagtattggggtttcagccgatcttacccaatatgcatgtttcaccccccctgtttaatgtatattcgccacttatatagatagatcgttttatataagcatatcaagctttagtcagtatcggttagattcctaacttcatgcttaatttctatttgatatgtttatatggatcaatctgtctatataagtttgtactagagtattagctagtacgttatttctcttgctctaaatattgtcacatcggttactttcataatacttctgttactttcataatactgtcttaaatcaatctgttaaactctatagatactattacatccgattgggcgtgtttagggtttattattctttgatatatccagtccatagccaatttggtctaactccatcggctgtgaccatcaacgatacactatcggcctatcggccgatcagctatcggttgactgattctgcttttattctttcttgctgattgcaggatcaaatcaactgacacgcccttgacacactcgaggctagccttggacctgcactggagttaagcagatctctcatgccaccgtgttttcgcatcaacaacgctgtagtagtaacatctcggaaaaagtatgaattaccccctgaagaattgtgagtacgaattacccccctaaacctgaaaaccagttatttttcaccctcacctatagataccggatgaaaaaaaaccccccaagcagctttgcaagcggttttggtctacatggcagcccagtcagcaattcttttctttttaaatcagtgggccccacatgtcagtctctcactctcttttacccctcacctctctttctttctcaaaatcctctctcttctccttccctcaccagctcacctcgaggacgacggagctcgggaggacgggaggagcacgggacgatggcgcgcggagtgggcagcggcgaagagggcgcctgcagccaacggcggtcgggacaacggggagggcggagtgggtggaggcgaaggtgcagctgatgcgatagcgcgtgtagggctctaccccgtttgtcagcgcgctgtccagtcccgcccgcaacgctcccttccccagtggtgaaggtgctgcggtggagccgagctcttcattaacggccagatttgaccaatgcgcagcggcgagccgacgcgggagcatgatgcggggatggaggacgagcgctacggacgcctcccagctccgcacatggctgtcttcgccgccacaccttcatcttcgactgtgccgtcgttgcctccgcggtcaccgtcctcgctgtcggtcgcgccgccagttgcgccgctctcgcctccgcctccatgcgtggcgcgctcgccgcttcgccgccggtcgcgccgctctcgcctccgcctccatgcgtggcgcgctcaccgccttcgctgccggtcgcgccgctctcgcctccacctccatgccgggcgcactcgccgccttcgccgctggttgcgccgctcttgcctccgcctccatgccccatgcgctcgcgcccctcctccatggcgagcgtgtgcaggagagcgggccggccaccgccgccgtgctattcagaaggggagggagaagagagagagagagggggggtgaggatctgacaagtgggccctagctttgttaaagaaaatgtttgctggctggactgccatgtgtgctattcaaaccctaaaccgctctcaactgtaccctaggggtttttttgtccggtattaaaaattcatggtgaacgatatctggtttttgagtttaggggggtaattcggtcgaccgctatagtttagggggtaattcgtactttttcctaacaactctaaggctttatctatggagaaaaccctactatctagtgtgctagtatggaggtgcgactagggtttactacgatttttaattgtggcagctaaggtttcgagatgagttgtctcacttccaatccatcttctactcataagcgtcaactcctactatcgccctatgccataatctatcgccctatgccacaatctctatgtaccaaaataagttgattttttaaaggcaaaaattagttgatttctaaagttgaaagtttatcccaaaataaattaatttatagcctcttagctaccctggttcataaatagaacatttttacttcttccatattcttttacttacccacccactaatattactttcttattaatgagcggcacattgattttcttttctcacggttatttttttcttgagtaatcgatttattttggatagagggtgctacaaatgatgatcccaatccggtagcttccctttgtttttttgttcatctcttctcagttttgctccctctgcggattttggcactcaacgtttcacccatcacccatagaaggatttaaaaatgagaggcaatcttaattatttcatttttttccttagtactagaaatgcaataacattatgaggtatctccagattactgagcgataatcctttatttaacgtgttaagttaaagagtccccaaggggttataatcttatgaccctctcaactgattaatccaaaagatcatcacttcatcacaaactaaatcctctaatgacactttatacaccggttcggtcatgatagtgatggcccgtacttgccttttcttttcaacttaacacattgttagttgacaaacaatcaaaaggactaaaacctaaacattaccgagaatatatatataatcagagcttcatccttagtatcccaggaattaatattttatcgagcaaaactatacccctgcacgttgaacccaacaatcgcaaatacaatctactaatctgatttatccattcaaaaatcacccaacatcattctgaagttaccagatgattactatatacacagaaccaagcattggaaattgacatcagaagagaagaaaacaagattttgacaaagaccacctaattttacaacagaaacgaaaatgactgtacaaaagcactgatttctaccatgtacacatctgggctacatgtatatgaatgacataatgctctgcttttttcttgttccattttttattgactaaggctaacctatatactccctctgtttttttatttgatgttgtttagtttatttttgaactaaccaacgtcatataaaaaaggaaggagagagtatatctgtgtctcatgcctactcggagttcttctgcctagccgatgaatatgcagctgcaaggagggcagcaccagtcccagatccctcctccatcaccctaagactaacagtggctgcaatctcctctccaaggatctcaactagagcttcattcagatactctctgaagaccgagtagccttcgaagaggccgccctcgatcgcgaccaccgttcttcttcgcacgcctcgcattgttcgaacctgagttgaaccacaaagggttccatcgcagccgatcttttgcagtatcgcgacaatcgcagccgctgctaggcgggcagctctccgggtgatgatgtcggagactctggcaacaagcttccgggtcttgaggggaacatctggtagctgcattaggaaagaaaaaaaaaagaaaatgtgagagatgtcagtctgaagaagctgtgcactgaacagaaagttgagattattgtgagcagctgtaagaaaccttaagatgttcctcaagtatcttgccgacttctctcaagtccggggaatcatcctcgcggatagcagctaagtttggtgtactggacgaaaaggcatggcaataagatgatcgattttatctttaagtaatctgacaacagagttttgtaaaactcgaaatgaaaagtacttgaccacgaaattcaaccaaaacatagccttggaatgaaaagtgtgatgtttcaatggctcaggccagctatttgacaggccaaattgaagagaactacctacctcagaaagaatctactatacacggaatgcaacgaataaactgatgttcattcccagatctaaggacaagcacaccgtctatgcagaaggtgaaaaaaaccttgcaagatgctatggaaatattcaattattgaaagaaataaggaacagctacaaaccataattagtcactttgttcctattccactaattatgaacaataaccatgctgcatttgtaacattattggacagaactagcaaatggtaagccgacagtgcaagttgataaagcaaataacattgacaaggaaatagatcaagtcaaagctaatgggaaactaaggaaccgaggagagtagcgcaaagagggtagaaattatcacataggagcataacttaaggtactccatattatatactccaatgttttagagttctgttgcaatggagataagagaaacctagcatatatttatttgctaaagcataaactgatctgaaagaattaaattcaagttgggcaccttaagacgaaaggggtcgatagaccatcaacagcagtaccaaatatatctgactcttcagccattttttggaacaccaatcttgcaatttccccaagatacacaccagagatcattttctcaaaaccctacaccaattaaatgacattaatttcggcctaattatcacaaactccaaacttcccatttttcagaaggtcttacctggtcataataattccatgtttcgttgttgaagcatatatcataaggagtcaattctatttgtggaggccgaaaactaccccattccacatttactacctgattcatggaacattgtaatacagaaaagaatcatcagagattctgtctccacattaaaatactgatcaaatcagagatttaaagaaatgaaataaaagattaaaactagcataccgttcgttcagaattggtaacgcgacccaaagatttaataattgcatcgttgcgttcaatatagcaagcattggtgccagctccaataatcacagcagctactgtgtcatcatcataataatgcccgagagctaatgtccccacagtattgttcacctatttgttgaacaatacattgtagaatcaaccagaaatgaatgtattttaatctactagtgagattacatgcatcacacttggaaagcatttttggatcacaaataaagtctcaacaaatatattcaccagagcaaaagaataaatgcaagcttaataaataacaattacatgatctcatcatattcatatatcatatgatcatgcgattattcttagaaaaatacaaaaaaagaggcaggagattacagtggggtaatatacaccaataccatacttccagcaagtgaccaattcaaggaacttaagaatcaagttggttcattttcttttcctagatcctagctagtcagtaatcttcaagccattgtttgaaatattaaacttgtgtcctctaaatgaacatgaagcatattgcttcctagcttccaagtcagttacatatgaaagagatattacactagatgaaatattagcagtcacataggaaatgaagtgattctatgaggataagccaagataagagattcacaaattatctattaatagccacattgtatactcccaaaaggattcacagttccaagtcccagaaaataaaggggcatattttctttacggaccaatgaatgtaaatttatagcacttttgttctttacacatgtgacaattaaagaatttttaaagttcatgctgaagatacactttttggacaaagttcccagttttgaattgcatgtacatgctgataccattttgaaaaaaaaaaacaaataggatgcattgcatagcatccagttgctccaaatttaaactcaagtccataattgaatgtaatcctgttgtcattttgactgaaactcagattgaactagaaaaaaaattagttccattcaaattagaaaagataccaacttaggtacaatttaaggccgacaacaggagtaacaggtcaatgttttagactgaaaactaaatcacagaggaagtgtacctcatctttcttctagcagaaccatagtactttttcgaaagcatgatattaaaaatagtgtgcgcacatacaatggatttatcagttacgaagctaattaagacagccaatgcataaagaagagattgccgatggaataaaaataatcaaaatataaatattcagacatgtcaaatactttttcctttatggaaggagttttttctaatacagtacaagcctgcaacgtaccaatacattgaccttcatattgagtccattccta

SEQ ID NO: 16567 - DNA, 1136 bp, Oryza sativa
aagtgtccctcatctttcttcttccataaccatagtactttttgaaagcatgatattaaaaatagtgtgcagcacatacaatggatttatcagttacgaagctaattaagacagccaatgcataacgaagagattgccgatggaataaaaataatcaaaatataaatattcagacatgtcaaatactttttccttatatgtaaggagttttttctaatacagcacaagcatgcaacgtaccaatacattgaccttcatattgagtccattcctagcaagggcttcatttaggcactgagcaacatctttcccgacctgatattccataggtacaaaaaacagagtgaaataacctaagaaatcaatagtaaaacaaggaggcaagctggcaaggtactgtgtagtgtgtagacaaattgcagcacttcagccatgaaaaaaacgatggaagtaagacgtataaaggtatcaaggtaaatgtaaggggtaaaacatttataagattttgcgttacatattcacaataataaagctattgttgtgatcattgaaaatttagagttttgccagctttctatctatcttgtagtttattgctcatagaattctggaatagaacttacatattacttttctcttcaatttaaatggaaggcatacaatgtaaagcagattaattgaagacatagttttgtaacttacagcctcttcaattgaaaattctttagtccatcgaattaatgtccccgaggaaatggaagtctgtctcacagggaaagaaaatgtaaaaccaagtgccctcccctcaacctccccaccctctctttcaataaaattcttcagtgccgaggcaatgaaattgaacaaatcctgcaaagaaattaaaactcacatacagaaactactaaacgttatagggaagtgaaataaaagggtgaaacatacatcgcttgtacccttagtcaaattttcggggataggctgatgttcaacttttcgattgatgattgtagaccctgcgccaagttctactttcaggactctaaagcttgttcctccaagatcaatggcataactgatgccttcctcgctcctggtcatgtcatgtgaactactgtaagacaattatccaattt

SEQ ID NO: 16568 - DNA, 2066 bp, Oryza sativa
agtgaaataaaagggtgaaacatacatcgcttgtacccttagtcaaattttcggggataggctgatgttcaacttttcgattgatgattgtagaccctgcgccaagttctactttcaggactctaaagcttgttcctccaagatcaatggcataactgatgccttcctcgctcctggtcatgtcatgtgaactactgtaagacaattatccaatttcatatttcttagagaacttgtccacaggtggtagaatgtgatgcaatgactaatagatagaccaacatatcatatatgtaaaaaatcataatgatttcagttagggaaaaatatgatatgcatgaacactacaacattttatacaacaatatctacatcgaatgattcaaatgaatacgaggattacaaaatcattgatgaagattccctaaataaaattcccacaaattctggaaaagtaagttttgagttataagcttatgataagccgtaaaaagttgcattgccaagtacctcaaaatggacctgattttgcttacattgtatcaatgcaagatcaacaaaggaagaagggaaaacacgagtcttggtactgccacataccaatgtcaatgcattgatataccttaattaccatatatcaatgttagtacacacttaatttaccacatatcaatgtcagtacatactcattccagttaccaatttattaccaagaatctaaatctagatgttttggctgaaagttgtactacaaattgtatcactgagacgtgtgttggtaagaagcatgacacatcaatcccgcacttccccctccaacataccacctagcaattaacgtcaaaacagcatccaaccgaagaacaagtaccacaattctcaactgagtgtactatgcctagtggccattatggataccatacaacctacagcccgatgcagacaactgatgaaaggatgtgctggattcattaagaatatgacacttataacaaatgatccatatgattacagggctccaaggaaatcgtaatgtagcataagagaaacatgccataaaaactgttcaaagacttcaggaaattatccatatgattacagggatccgaggaattcgtaatgtagcgtaagagaaacatgtcataaaaactgttcaaagacatcaggaaatgctaacagtaaacaaagcaatggtattgttcagttcaataaaacggaaaatttgcatttcaagaaagttgcattgttttatggaaatgcaaaatcaccattgatcatctccacaaggaactagacaaattaagattctttacagaaaaatgaaaacggccaaatttgactagtgcccaacgcaatcagcactccactcgagggccaggccggtggagtgaaatcagcacaagaattggtaaagacattaaagatcaaagaaacaaaatgcacaacttaaatgtgctgagttcatgggtgacgaaataatagcggttcctttggaatgttctgttacaattacacacagaaggtcaaaaaccaagaaattctctttccccgcacccacaaagaaaaaatcaagaaattctcatcaattcgaaaccgttggaagtgccacattggaatttggaacaaaaacgcagcaaacattgttcgcgtgctcatactccgccggccaaaatggcgagtcggcaacgaaccgagattgcaagaatgaagacaaccctacgtacgacacggtacaacacgacgaacaaacaccaaaacccgagagagagagagagagagagagagagagagagagagaggggaaccatccatgatccggacgcgcggcaacgtcacgtacccgtcggggagcgcgtcgacgcaggtgagcagcatccgcaccttgctcccgccgtcggaggcgaggccggcgaacatctcgatggccagcgagttgaccacccgctgcagcagctccgcgggcgtggcgcaccgctcctccaggtcccgcaccaccgccaccgccctgttccaccgcaccctcgccgcccctcgcctcgccaccatccccgccgccaccgcgcacg

SEQ ID NO: 16569 - DNA, 16632 bp, Oryza sativa
ttatcggaccttccgagccaaaaacaagggatagttttcataaaaatcgctgactcccaataacattcggtcaaattttataaaaataataataataaaatggtctgaattttttaaacttggtcgggaactaagcagttcgcgttctcgagccagtccagtttttatggaaattgacaaggttttgtcaatttatattaaactagaaaaagtgcccatgcgttgcaacgggaagaaaattaaggaaaatctcgctggcggattcggccgtttggagcagagggatgtgagccgctgtccatctcaaggagagcgtagccgatcggtgacactgaagatggcggatgtttttttttatgattttgggtgtgttaggtcttagatacgactcatatgttccgcttgttgctatgctcttttttgacgatttgtgttctgtcacaccctgatttttgtttcagggatttgtaaattatttctaaaatttatattaaattttattaatttacaagtgaagtttaatgtgagaaataaaatttcctaattaaaacatggctatatttaatcattattaaattctccatgattaattatattctttggaattttccaattatttactttaataatagaaagaaaattttagtaattatttaaacaattattaatgattaaatgatctagataaatattttgttaaatactttgagtgtccaactattttcataattttcttgaaattattcgagcattggaagtgttttttaaaattcaaagatcatttcggtgattaatttaaatggaaaagtaattaaaatcctccctccttggatcaatacccatgaagtctgttttctgtccctctcctcctcctttcggtctgtttgctttctttctttcccgttcggtccagcagcaacagagaaagtctagggagcatccctcagtccctcctctctctgtcgccgggggcccacgtgccacagtgtcatcttcctgaactcccatgctcggcgaagccggcactgccgcctcccctttgctccatccatcttgtgctaaatcccgcgaatttcggctcaattttcatcccgcgtacttggaataaacctagttttttttccatgtccaaatctcgtcattcccgagtcaggcttccccaattgacggacgaaaatcaggtgtgacaaaaggaaagttacgaatattttaattagttaagatttgatcgagattcccatgttgcaaaacacccttagactgttattagagttcttttttgaatgtttgttggaagagttagaagcgtactgacatgatgtttgaccattcgtatataaatagtttttttttttacttcttgtgatccactacatacgtgttcctcgtgaattgctctaaacattgacgttggaaaaaattcggttgttttttttggaacattttaccaatttagtaaactaagttgatgacgacatgacgtccaatgatgctagcaaccgaccgagctcgtcgatctccaaaattccaaatcatttcaccctacattacctttttttttttttggaaaggcgtttcactctttattacttgccgttgtatgcgtgagcaagtacgcaggaaccgaggaaagcagcgtacaaattgaggcgggccgggcttaatcattaactcgagcaaggaaaaagtacaccgaaggtcccttaacttgtcatcgacttacaaaatcgtccctcaatcacaaaaccagatatataacatccctcaacttacaaaactgttcattttggatccttcggtagttttgaccacggttttatccgacgtggcggttgagtcagtgtgggacctacgtgggtcccactttcagtctctctctcctgtctttctcttctctccttcctcgctctcgcacgggcgtggggatgctggtgacagggctggtgcccacggcggcgcgcgcggctggagggtggtgcggccggcgacggcggctcccagggtcttagcttcatccaggtggcagcgcgcaggctcagggcggtcgaggcggcgagcaggggcggagctagaaaaaaacaaagggggttctactcgcttgctttactctggtttgaatcaaatttagcttgatacgggtgcctaaatttaaactgacgggatatatatatggtgaaaatagataaactataggtaaaaaaaattttttgaaccgggttcgtgggtacccctccagctatactagctccgcccctggcggcggggaggcttgggtacggtggcgacggcttcgggtcccacggcacgccggcgagccgatgaccatgccgatggtgcagaacgcggtggcgaagaagcccatgaccagctgcatctccatcaccagcgcatacgtgacggcgcggccgccggcggcggcgtgcttgtaggcgagctcgacgagcggcagggtcggtccttgcagcatatactaaacatagttgacagcatgctgtgcatgcatgtgttgtgcagaaaacaaaaggagccaatcaaatagatgagctaaatagtgtaatagagccttgatttttgtttctagacgaagtcatctgcgccggtgaagacgccgagccccacgcccgccagcagcacgcgtcgcggcgtgaggaacagcggcgcgccgcggcggaggtaggacgccgacacgggcactagcagcagtgcgagctttggagatacaacgacggtgacgacgctggctgcgtcgtcgtcgggagtagcggcgtaggtggaggcggaggctgacgctgcggctgtggtgcccccccgccgctccttctccgcccggcctcgcgcttgtgcgtcgtcgggagcggcggcgaatgtggaggcagaggctgacgctgcggctgtggtgccccccgccgccccttctccgcccggcctcgcacgtgtgcgtcttcgggtgtgggcgtgtggccggacggcctcgacgcgccccgcctccgccccgccctgccggcctgcctacccagagaagactgagagagtaggaagggagagaagaggggaaaagagaggtgatgacgtgccaccctgacatatgggtttcatgtgggtcctacgtttattcatctgccacgtcaggtaaaacccaaagtgatccggttttgtaaattgagagcatatatccggttttacgttcgaggacgatttcgtaactcgatgccaagttgagggaccttcggtgtactttttccactcgagcaacaaacatatgggcttcgctaaaagcccaaacaggccggcaatatgttgcaccgtgggctcgcggcccaaccaggcagcctacgggccgagccatgcgtgggctcctgaagctggacgacaagaacctggccggctactgggtcgaaagtttctagagggaagtggaataagtccacttggctccctcgaatatagatatcttaataagtgaaatcaacaagctttctccaaggagaatgagccacatcattaaaattgcaaggaccgtcagattcaattggtaaaacgatatagaccgttgaatcataggagactcatcaatgatagtgaaatccataagatcagtcatgaagcttctagacgaaaggccctttggcagagaactcacgttcctagtcaaaatagcctactcaaataaaatatataatttttcataaacataatactatacaatacacaaatatagatggagagcaccagcagctcatctaagtgacccaaatgacagaacaccatccacccgtagcgccaattttgttactcccttcatctcaaaatatataaaattgatcctacttcgcatattccttcatttcaactaactacaaccatcttctatttaatttcttcatgtacttctttatctcaattaatcataaccttcacactttctatgaaaaaaaataaaacataactttcccatttaattttattgtcctctccttaatcccataaagaaaacgtaaaggtacctactctctatctacaaatataggcattacaaatgcttaaaatttattaaaaaatataaggatttatagaataacttaccttcaatctcacctctcattcaaatttcttttcatcttactcaactattttctcaactcctatcattactcggtaaagagatataaagttttatatgattgaacataatctttgttaaacaatatggaaatccttatatttgatgacagggagagtagtaaaaaaaatgtcatgtaattatcaagattggtcgtcaacttctatacgcaggttatgcgaatgcttaccgtcacgcgaagcatgactaggtggctagtaataatctaatttgtatccttaactctaataccaggtattttaacccctaaaacttttaacttttaaaaccggcgcaaaataactccctaagtggttttggctgacatggcacgttcatttagtccgcactgctgagtcatcgtggggtcccacatgtcagcgtccctctccctctatctctttcctcttttctcacatcctctcccatcgccgccgcgggcgcggtgctcccttcctccgctccgcgtcttcggcctcggcctccgcggcggacacctcgccggcgccaagggacgtcgttgcaacccttgtccgtgcgctccttctccgatgctattcgacctcatggtcctccacggccgcgcctcaggctggcgcgcgtccccggccgccgcgccgtcgtccactgtcgttccgcctacgtactcctgcagctccatcatcaacggcaccctcccgccgtcgccggagccgtgcgccggagcagcgaccgtccgatcgacccggagccatgtcgaggggctcgtggttgagggacctataataaacttattcctccagtgaaatgatcgacacgctacggcccacgtgtggtggggcttgttactctccaacagcagttacgatatgggttttcatgcaactaactaccggtgctgattgctgcaaatgccgttgagaccaaaaacaacacgtacgatgggcacggaaaaaggcttaagttgggtgagattttaacgtcaatcaagtcagttagtagtcagagatcatcaccggaatatgcaacgttcaaagagaaaacccaaaaaaaacaaaaaaggaaagcgaatcgatttcagtactcagagcgcttgacctctgatttaaccatcgattcatcagtcgaaaacaacgcatgaaaagcggccctaacgaccgatgtcaactcagtcgatcgatcgaccatcaatttcgtgaggcaaatgcaacaaactcactcgattcgattcgatcgatcggtatatgtgtttacttgattgatgatgatcgatcactggtgattggtcactgccgtcgccatcgttcgtaggatcggattgattgattggcacgccgccatcgagttagctgtagctagccatcgatcgcagatcgagcttctttttttagtgagccgatcgatggacgtcgacgccgcaacgatgatcgagtcgatgacaatcgaatgctcgatcagttcagttgagccttctcctgttcaccgatcgatctatccacaccgaccgcacatgcgtgcgtgcgtgcgttgcaacctagttcacacgacggcgacgtacgtccggtgatcatgtatgggcacttggcacctactaatgtcctccctccccggccggctttgaattgctatactcagcggcgaacgcagaaaaaagttaccagggattctttaatttgacctatgcggactgcggtagaattctcaggtgtccaatataatttggttggcgtgtctcatatggtatagatatataggctataacggtaaaaaaaaaaacatgcaggtatcccaaggacccctgttggaacttagtaggtacgcataggggcagatacagaacaagatttaagggagaactcatctccttctttcttcttcagtcccccctactatttattttttcactattcttctcctttcgtctcctcttctatcaatggtgatccagcggggtaggagggactcgagtcccccagcacccatgctggatccgcccctgggtacgtacgcccctggctatatcctatagctcccgaatggagaaagcgtttggattgtctagctagttgtaatttgccttgttaattttgagctcacctttttactgctacgatcgctttaagattcgtgtggcactcttaatttagcccgctccatcgcctccttccccaccatgactcacttttgtgtaatcccggccgcccgtgtgctaccaacctctctccattgctagctccttcactggcacctaattcgacacctttaattatgttcgtaataagtgtgaccatacttactcatcatagtcactcatatctctttagcagctggcattttatatttgtcacctccattatactgccgccacatcttaaatttaccatcaccacctattgtccttacctgtatcttggtcggacacaaatcttctgcaattctgcttatacaatgtgtgactgataggtccgcctagacacaacacatatcagtgatagctactatagggagtagtattacattggatcttatcggccttgctaatgccactcaagtgctcctctttatcctatccaatgacgacctaatttaaccatttcatagaaagagatgtcattttcacaaccgtcttcgtattgattcaagatcgagaagacaacagcttcgtgaggttctccttctgcaccatgttgtcaacctcctagcacaagctacagtcacataaaatatgtacaactaatatattcaatactgagtgaaggcacgcgtatactctacttagcttaattagaacatgaatcacataccatggtatgtaaaattaagctggcctcatcagctagagattattacatagtttcaagtaatagtgttattgtaataattagctatagtttctttgaagtaaataccggaatgaattacattatctaaaaattggtgttaatgttagggtgacaacccctttaaaaaatctataatgatttgttggcttgttttaaaattattattccgtttttaactattccttcaataattgacctcaaattatcgatagtgttgatgtgcatctgtttgggagcccatatcctataagaaaaaccataattgattaaccctgacaaataaatttccaaataggtagagataacatgccaataaatcccggtggaattgtggctataccagagggcccttgaagacattctctgcgttcattcgtgttttgattatttgtgtcacaagttaaatttggcgcttatttgtgttcctagtacgaatttgtgaggttgactcttgccatttatctattcggtatactttaaaagatgcatacttgtgggtgtgtacatgtgctgtttgttttgtgtagagtaaattgaatcgtcggtacacgaacttgttaggtagatacagtctagtgcacgaacttataaaatgctttggtgtatgaacttgtctggtgcgtgcggaggaaggcgaaaagaacactacgtggctaatcttattgatttaggggctgattaggatatcatgtaaacatatatctgagaaggttgttattagacatacaccttttcaataaacatggctaattttattgatttaggggttgattaggatactatgtaaacatatatctgagaagattgctattagacatacacctcttcaataaaaaatagaaaaaattgagtaggatataatgatagtagaaaaaagatttaaaaactgagcaatggtataagggttagaattataccaaattcatttttttcatgatgaaagataaaattagagaccaaatttataaatattgcatgtcttatgcatactcactacacgtatgcacgtcatatcctaatcaacatcagcttcgtaaaattaatattgccaagttatttctatcctcgtttgcacgaactagacaagttcgtgtattgaaacgagcattttacaagtttatgttctaaattgcacccacctaacaagtttgtgtaccaccaatgcaatttactcttttgtgtaattggatatcctatctttctatatagttataaagaaagacatgcaagaagccacatcatcaacaattttaaaccatcttttggataaaaaaactacttattcatccaattcaatcatttattaattacccattcatctccctttgcttcaccttatagtcacacatagcactgttacatattttgtggataacaccatatttttcgaatacaattcaaataattgtttaatatgtgtgttttgttttattgtgcatgataagatagcatatatttattaggtatcgttacttgaatctattttcagaaaaaactttagtgaagtagagatgcaaattgtctaactacaacgatacccatattgtgcatgaaaataatattcatatattataacaatataccatgatccttagaaaaataaagcatgaattttatttttaataatataaggcatatataaatccacattatcatatattttatatatacttagagttgcacctaaccatttaaaactatgattttgtttgacgataaaactataaaacccgtgtcaaagacatgtggtgctaattagttataataatacctcttatctgaaattgatagtctaattacttaagcatcgggttaattattttaatatgcattcatactattgcaagaaatttattccatattacttaggaacttaattaaacctcataaagaattacaaactcatattgcattatttctacgactacttgacaacgcactcaactgtcgccaccacgtgatttacaagaataataatattatgccaggttatatcatacacacatatatagagagaggatcagtacgaagatcaaaccgttgaaaaacattatagagttgagtagtataagcaatgatcgttaactagcagagattcgacaggtagtttaactgatcaggtatgaaacttttctttttttgaacggctgatcaggtatgaaactgatgcatatagaataaattctgatatgactagctaatctgtacttatcccatcttttttttaagtacttatccagttatgttaccgttaggaaaaaaatactaaagctagttagtttgtcaagaaactgttgaaaagaaggtaaaagcagaaacagttatctttgaccggtttggccgaattaacctttttcctttctgtattttctttctacagagcctaaccttttctctaaagaactgttggcgtaactttatttggtatatgggcctctaagttttagcttaaattaatcaagatggtaagtttcttttctcgtatatattatataagtcatgaaaggtgtagaaaattaatcatgaaagttttagctcgcacggtgattgtcaggactctgtctccgattgcattaggctggatgcttcctttcaccgactagaacggacggcacaacagataaattggatcaaatcgaatctctatctctactattataaaaattaatatgtttttttttcgatatttctgtacgtcatccgtgtatgagtcagtttttttagtttgttcgcttttggaaatatataaggaatcgtataagaaataactatcggacttctaattgtagctcataatttcctaacaaaatatatatacaagtgaatttatcatagtgaatttcaccttaactaacccatatctctatctctactattataaaaatcgaagatgtttttaccggtattttggtacgtcatccgtgtatgagtcggcttttaagttcatttgcttttggaaatacatatccgtatttgagtcggtttctaagatcgttcactttcggtaatatagaaggaatcagaaggaatcataaaagaaatcatgtcacggagagatcctcaatagcggggaatcgtgagaccccccatttgtgagttcggccggggacggaggctcatctcttggaaatcactcgctcgtccctaggatcaccggcgagcttgcacgcaaacggattatacaggttcgggccgctatggagcgtaacaccctactcctgtgtttgggattatggatgagttttacaaaagatttcttgactctagcaagcgcactcgcttcctccctcctggagtttaggtttttttctctacccccccttctcagtgggcagggtcctccttttatagctcaaggagataccacatgcaccgcctctacctaccctctatcggagagggatcccactctacttttcctgggctttaaaccgtgccttctcccggaagctaagcaacaaccggttctcgagtggaaccaggcgccgccccccgcctgactcgggggacagccctgtcattccctcataaatgaacgatgacctgtgatagcccttcctcgagtgacgctcggacgtgacgggtcatacccacccccactccgccgggtacaagggcgacgtgaggacatggttgccctatccgtcggatgtgacggtgccaggccggtcacaaaccggtcacatccgttagacagaggttagctaggcgcgccgcacgtctgcccttaccgcattaaatgcggtgagggacagttggtgcgtcgcacatttatggctgtttagcctgtgctctcgctctttccctccgccgcgtggaagccgggtgagggcctcggggcgaagccgcgggatagcccgagggggtgacgccatgccccgagccccccccccccccgcggcttccacgactcgcgtgacgcgcgaatgaggctaacttgcagagtcacgtggccggagggaaagtaattcccctctacttcacataccccctagtccatatctccgatagtagcccccggcgctatatcaggtatcgatttcctgagatcgttctgacatggtgcctcacgactcctcgagctggggttgtgggcccggtaggggatccaaaaggatatcgccgcgtggccaagttggcatgccaaccataacagcggtttgaccgccactgatcgcgctcatgatgaagatgcttgaggcgcgataatcccggggggtcagtcagaccacgcctcgattctcccgctcgctactcctgcggaggtagtggtgatggtttgctcagcctgcgctcatagccgttgtgcactccacctcgaatgcgccactgacagacgcactaaaggcaggaacagatagaacgggcgacgtgatgagtgggcgcaagatgcgaagagacaaatgcgggcgcgagaatcgtgggggcaagtatgggagcacgaaacgaggaggcaagtgcggatgaagcgaggataaaagggggcggaggcagagactctgcccctttcctttcgccaactgcccactcgtcctttcgcttctcgaaccctaacattctcgccacctcatactgtctcgcgctccacgctctccgccacttctccgccggttgccatggcccaagacaccggcgacgcagtgctcccttcctcccgcatcacagcagacatgcaccttagcctttcccgcaagatcatgccggacggtgccgtcgtgcgggcgggagagtcgcggccgtgaccgcgatatctggagcgatccatgcacctcttgtccttcgccatgacgggcttgattccgcctttctccagattcttccatgaggttctggatttctacgaaattcatgccttgcatctcgcacccaatgccgtgatgacgctggccatcttcgcgcatttgtgcgagatgttcattggggtgcgactgacgatgcggttgttctaggccttcttcattccgcagctgttgcaaggcgcggtggtggggggatgctacttccaaccccggccaggcacggcgggtcagtacatcgagagccatctctgcaagaaatgggaggactggaagaaggattggttctacaccgcgttgccggaccatccgcgacttcgagttcccgctagccctcctgaaaggtccgccgcatggctggcaacttcggagctgggcgaggaatacgacgcggtgtgggatcgccttaggggcctgcagagcctgggcctcacaggggcgatggtctttggcgattacttttgccgtcgcatcgcacctcttcaggaacgatcccgtggagcgtgggaatacattggtcccaacgaccccatgcggacgcatgtgggcgagcgctgggactggggtgcggaggacgcgaagagggtgattcagcgggtgctgggactagactccgccgagccaacactaatcccagatgggattcttcccctctgctgcgaccgcgaccgggagagcattctggccgtgatgtctgccgtcggcgccggtaggagccggtccagccgaggcggcgccagcggtagcgtcatcggcacgggtggcggtggtgcgaccacgggcgggagccgggccgaaggtccaggcggcggtggctcaagggcgcctggatcaagccgcggacccggagacgattccgccggcgacccaaaggggaactcctcgaggtccgatttgccagatttgcccacaacacggcgagcaactcctcgagccatgaatctccgtgcttcttcaggacgttgtacgtcttggtcttgagtcctttgaggatttcggcattggctcgctcgacttggccgttgctcttggggtgggcaagtgaggcaaagcacaatttgatacccatgtcgtcacagtaatcgccaaacagctcactagtgaactgggtgccgttgtctgtaatgatacggttgggcactctgaatcaagacgtggtgcccctgatgaacttaagagcagaatgcttgtcgattttgacaactgggtaggcctcgggccacttggtgaatttgtcgatggcgacgtacaagtgctgatacccgcctcgagccgccttgaatggcccaaggatgtccagcccccaaactgcgaaaggccaagatagtgggatgacctgtaaggcttgagccggctggtgggtctgcttggcgtggaactggcatgccttgctccgctggacccattcttgggcatcttgtaatgcagttggctaataaaaaccttgccggaaggcttttccgaccaaaattcgtgaggccgaatgggctccgcactcaccctgatgagcgtcggctatgagctcgatgccctgctctcgagaaatacacttcaagagtatcccgttggcggcacgccggtatagggtcccttctataaggacgtaccgtttggagatgcgcgcgagcttttcaacttctgcgcgatcctcaggatgagtattgccttcgagataagcccagatgtcggtcatccacacgacctgacgaggggggttagggttgaccccctcgggccccgaggggcgcgggtcgcccggagtcgagtcggtgggcgtgtcattggggtccctcaaagggctcggtcgcaccgatggttgcgcgagcctttcctcaaaggtccctggggggagtgggactcgtgccgacgcaacacgcgacaactcgtcagcaattgtgttgtcgcgtcagggcacgtaccgcagctcaagtccgtcgaagtggcgttccatgcgccgtacctcacggacgtacgcttccatttgcgggtcggtgcactgatactctttggatacttgatttacgaccagctgggagtctcccaagaccaggagacggcggatgcccattccggctgccgccctcaatcccgcgaggagcccttcatattctgccatgttgttcgtggctcggaagttgagacgaacgacgtatttgaggacatccccgtttggcgaggtcagcgtgactccggcacctgcaccttgaaggttgagggagccgtcaaaatgcataacccagtgcccgccacgaatgttggcgtttggatcctcttcttctccgggaagggaaaaagggacattggacggaacaggttcgtccaccggggtccattccgcgatgaagtcagccaggatttgacttttgatcgcgtgccgcggttcgaagtgcagatcgaactcagccagctcgatggcccattttaccactcgtccagtaccctctcggttgtgcaaaatttggccaagagggtatgtcgtcactacggaaacccgatgcgcttggaagtaatgacgcaacttccttgagaccattaagacggcataaagcattttctgggcctgcgaataccgggtttttgcatctcgaagtgcctcgctaacaaagtagatgggccgctgcacctttcggcggggccagttcgtgttgtcaggggctgatgactcggagcgtgcctgttcggaggtctcggggggatcccggactgcctcgggatcataaggctcggggccacctgccaaagcctccgctcctcccttgggggcctcggggtcctcccgggggctggaaactttgggcgctaggccttcgggggatgaggggccattgcaagccgaaggggcctcccgttcgccttcctcacgctcaactactagggcggcactcaccacatggggggtcgcggccaagtagagtagcaatggttcctccgatcccggggccaccaagataggggggaagtgaggtaagctttcagctgattgagagcttgctcagcttcctccgtccatacaaacggcccggagcgcttgaggagcttgaataggggcagcgccctctcacccagtctcgatataaatcgactcagggcggccatgcatccagtgacgcactgcacatccctaagcttgctgggggggcgcatcctctctatcgcgcgtattttctcaggattcgcttctatgcctcgggaagagactagaaaaccgagaagtttgcccaccggcacactgaacacacacttatcggggttcagctttacgcgcgtggacctaagactatcgaaagtttcggccagatcttgtagcaacgtgtcctggtggtgcgtctttaccaccagatcatcgacatatgcctctacattgtgccctatctgattacttaaggtaatacgagtcatgcgctgaaaagtagggcctgcattcttcaacccaaaaggcatagttgtataacaaaaggtgcccacaggagtaataaaggcagttttttcctcatcttccctagccatacgaatctgatggtaccctgaatatgcatctaaaaagcacaaaaggtcgcaccccgcagtggagtcgactatttgatctatgcgtggtagagggaagggatctttggggcatgccttgttgaggtcggtgtagtcgatgcacatccgtagcttgccgttggccttcgggatgaccaccggttcgccagccactccggatggatcacctcgcgaatgaaatcagcctccaggagccgcgccacttcctccctgatgaaggcctgccgctccggggcttgacgccgcactttctgccggacaggtcgcgcatccggccgcacggcaaggcggtgctcgatcacctccctggggaccccaggcatatctgacggcttccatgcgaaaacgttagaattcgcccgcaggaaggagacgagcgcgtcttcctatttggcgtccaaggttccgccaatcttggcggtcttggacgggtcgtcaccaagggggatttccttgacaggcacctcgtcaaccgaggtgaggcgcttcttggaagcgcgggacgcaggggcttctagggcctgcggctccgtggccaccaccaagttgtctgcgtgctgctccgcgtaggcgagggcgatcttgacatcaccaaggacggtgatgggaccagcaagacccggcatcttcatctggaggtaggcgtagtgggtggcgaccatgaacttcaccaacgcgggtctgcccagaaccgcattgtagggtagattgaggtccgtcacatcgaagtcgatccgctcggtgcggaagttggtggagtcaccaaaggtcaccggaagctctacatggccaagcggccatgtgtgtcccggagtaatgccaatgattgggagcgacggctggagcttcatccctggggccttaagtgcatcaaaggcagccgaggagatgatgctcagactggcccctccatccaccagcacacatttcatcttgacattgtggatggtcggggagaccaccagggccaactcccccccccctgagcaagcaccgtcggatggtcactctggttgaatgtgagcttcacctccgaccagcgtgccttccggaccgcctcatgcgtgggaacaacggccagaaactcccgcttcatggccttgaagcttcggtgagaggcgtgagcgcaagcccccccgtcgagcgtgtcgacggtcccctgaggtatctggaaatcctgatcctcaccgtctcagccatcatcagcaggggccttggtcttggccttccctcgccggtcaccggttgaggtcgtgggggcttttgccttccgtcgaccctgccgcttttcctcattagcccttcggaaccactcggcaaatttttgaccgagcggcagtcggcgaga

SEQ ID NO: 16570 - DNA, 8380 bp, Oryza sativa
gattatacaggttcgggccgctatggagcgtaacaccctactcctgtgtttgggattatggatgagttttacaaaagatttcttcactctagcaagcgcacttgcttcctccctcctggagtttaggtttttttctctacccccccttctcagtgggcagggtcctccttttatagctcaaggggataccacatgcaccgcctctacctaccctctatcggagagggatcccactccacttttcctgggctttaaaccgtgccttctcccggaagctaagcaacaaccggttctcgagtggaaccaggcgccgccccccgcctgacacgggggacagccctgtcattccctcataaatgaacgataacctgtgatagcccttcctcgagtgatgctcggacgtgacgagtcatacccacccccactccgccgggtacaagggcgacgtgaggacatggttgccctatccgtcggatgtgacggtgccaggccggtcacagaccggtcacatccattagacagaggttagctaggcgcgccgcacgtctgcccttaccgcattaaatgcggtgagggacagttggggcgtcgcacatttatggctgttcagcctatgctctcgctctttccctccgccacgtggcagccgggtgaggacctcggggcgaagccgcgggatagcctgagggggtgacgccatgccccgagcccccccccccccccggtggcttccacgactcgcgtgacgcgcaaatggggctaacttgcagagtcacgtggccggagggaaagtaattcccctctacttcacatacccccgggtccatatctccgacaaatccgtttaaaaaaattcacatgctaacttgagacgatcggactcctaattgcagctcatgattttctaaaaatatatatatccaagcgaactcccaatttcattttaactaaaccatataacaataataagattaaaataaacttcacccgttgcaacacatgggcatttttttctagtaatcctaatttttattgacttttgggtcctgcaatttgagttttattgatcaatcgtagcaaattaattaactagtaggttttccgcactatttgacgtgaaactagatataaattagaattatatttgattaaactattttccttatataaacaccaaggcaatagctaggaattaaaggaactggtgcgaaatacataatgggatctaaaatttgacagccaaatttttacaatcttgttatcgtgatggcctatcatgatgactcatagagcatgatcacacctagctctattcggtttagctttacctattcgatcggcttaatattgtgtcctactacttttaattagttatggcttttagtcgtgcctttagtcttaaccttctgggtttttgtattctacttatgtcactaattaagcatgctcccagcttgtttggtaactcgagggaaggggattgggagtttacacgagggaattgatgatgagattatgggaatttgatttttaattccaatatcttgtttggtagaggtgatggaaattgatagggagtttagttggagattaggttattaataaaaacggatggctaagatttgtttaattacctgcccctacctaggtattgaaaaggagggagtttcttcctcaattccccatctccatcccaccaaaattcccatgtctcccgaccaaacaaaacacttaatagcctcatccctctaaaatcctaatcccttctaaaaactccctccaaccaaacaggccatccatgtaattaagatttggggcctctaatttttaggggtcctgaacaatcgcacatcctgcgcatgccttgttctgcgttacactatgctctgccttaacaaacagggccggatctacattattaggtccggtgttagacgatatcgatgactttcggcaaaacctatagcaaaactgcttatccatatattataacactatgatccaagcataattagtatattatgacaccgctagacaagttataacaccaataaaccgatgaaccacatgagttggttaaatgtgtgggaatagagggcactatatcaatcgatatatgtttgtatgcgtatacccatgatgattgatccagggtgtaaatctttcagttttgagaatttttatatgcctatagagtgaacgtacggtgactcattttcgacatctcttaattaatacatatagatgaatcatctaattactaaccactccaaaacttgcagtgtcatgcgtgcactaaacttaaagccgaagttgttgacgacgtaatatacagttacatcattacacataatttaaggtgacaaagacggtgacagaaaaaggcaatagaaacgtatgactgcaacatagggtcaccggcacccatggtattatcttttggcttatacttctacatatcaggcaaaatttttaaccttaaatttgaatctgattttcaggttattttttcattgaagtttatttttcaacctttacttttaaatcgataagaacatatacataaaagttttattcacaaattagtttccgtttgtaactatgttgtttagattatttcacaaataagccaaacgatggcaacgttattatgcacctcttaatataaaaatagataaagtttatgcatgtaagttgttaattaataacgtacggttagctttacaatttttttaaaaaaatgtagaatattattttccctcatgttttgccttaatttctcaatctggtctattagaacatgatgttccattaattgcaacccccctcccccaaaaaagaaatgtccatctctgagtatctcaaaaataccagtttaattttgaactgacaaaaaaacttttcttgtggaactgacggttgtttgaaagctcgggctggtggttaattctgaactgtcaaaaaaaactatgaaccaattagctctgcttttacatataggagtataatttttcttgtgaattggtgtgttactatatatgcatgagtccatcaattattattgtgggtttgaattctacgagcaaattaagattatgaacccaaaataataattaaacacatctatcagtgggacccacacaacagtgaccgttgacactagctactattaatgtttagtggcgtgctcatcaactttgacctcctactgtggcctagcttccaccttatccttgaattctctgggagtagatggcgatcaaattgaacttaatttataactgctaaaatttgatcgggattgtaatatattttctaatattcctacattattgttggtccaatttccgttggcaaatggaattatggcaacatcaatcataggctctgcattctgcatagcagaaagtcaggagcaccttaatatggggttcagcaaacaacagttttcagccaccaatactataactcctgattgcaattagcatctgcaaattaataatcactggtcagtctactttgcaaataacatagtctatcaaaattaattattgaagctgagatgtggggctgataaaaggggggcaaaagctagttagctaagctctgaacaatcataatttcagtgcaactatattaaagctttgccattgatttttcttcagatcttctgagattgcagatattattactgacgacccatgtttaggcctgaatatctaaatttcatacacatatattcagtaaaggatatcattaatttgtcactttcattatcgttgagagggcaatgatgtacgtacctggccgggtgaaaaaggtgttaaagctaaagtttctgatcgagatatctgatcaaagtttatctgcaacaaacatagcagtcaggcaccaattttctcatcacaaccgattcattcatgctatatgtgcagaagcaagagagaatccaagccactttattgagcagctaacattagtacttttaggtaagcctaagacatcatgggagagaccagaccaccggttccagtagccatttaaaaccatatactatacgtctatcaaatcatcattagcttaattgtattgttagagcagccccatatatacaaagtttcatcaaaattaattaggatcgatcccatgcaatgcatgcattcggattaaaagctggtataattagtagctaggtagtagtagttacctgtaagataatatccccaatcaattgaacttgtctgattgagttgctccagcaaccaattcactcaattaaaactaatccagaaagatcgaacaacatgatagcaatgtattggcaaatcaaagaaccctcgtttgcacgccttgtccatcgactatatactgtctttctgcctgatatattaattacgttctgactctccgtgaattggtaattaaattaataaaaaccttaggttaattttcgggcatcagattctcacctatgctttcgtaaatcatataagagaactttaattaaaaaaaattcttggtgtagaagatccagcattttgatttggatggaccatatcctcaagtggatggatgatgccgaatacgtagtacagagataaggccccatccgaatttagtggccaaataaattttaaaatctaaaataaccccccaaaatctcgagcaaaatacgtgtggacaggatcgtctgcggcctccaagaaaatggcgctttcagcgcacgtcacttcgggccggcctctcccagccgatccgggccacccggcggggacacgttgtacggcccacatctgtccacgtcatcgagaaacacacgcacatgggggccatgcatgcaacgttagcgaggcacagttgacgcagcagtaaaatcttttaaattttttctttttttttctcaaacgcctacgtgaggcaaaatacctcgacgtacggcgtacaaatgtacagtattacaatctgtgtacgtacaaaatacacctcctaagtacgtacatatacatgtatatatattgcaaccctctctatatagtaatagtaatctaggaagggaaaatgggggctaattcgcctaccacagcgtaccgtattttgtacctgtagcttcccttctatacataccgtaataatacggtatatatataatatacccaatatatatactatcgcgtacgcatctgacagacgtacacttggtgtacgtgtcctctcagcggtcgcaagccaagccctctgtacaatactgtaatgtacaggtacgtgtacgtgtatactacactacctgcggtcacgtatacgcatacgtatgcgtatatgtgtacggaatgcatcagaagctgatggggtagacgtgctgcatgttggggtagaagaggccccaattctgctcgacgccggcgtccttctggttctcgttgaacatggagaagacgtaggtctcgatggcgccggggtggcgcggcgtgccgcggccgacgtggttgatgaggttctggttgtagatccgggcgttggccggcgaggcggacatgccgccggcggagggccagcctgtctcggagacgacgagggagacgccggagccgccgtgcttggccatggcggcgtagaacgcgtcgacggtggtgtcgaacaggttctggtacccgtaggcgccgtcctggacgacggtgccggcggcggtgaagagcgcgtaggagacgtcgacgctgccctggctgtaggtgtaggagaagtaggggtagatgttggcgagcagcggcgcgccggtgcgggcgaggaagctcaggacgggcgccatgaacgcctgcgactcgccggtgaactccgcggcggacggcgggctgtacacggcgaggagcgcctgcgacaccgacgtcgtcaccttgatgtggcccagccccgccgacaccagcgcgccgcggacgttctccatggccgggaccaggctggacgtggcgccgccggcgacctcgttcccgacggcgacgtaccggaacgacaccgacgggtaggcctggatgttgttccgcacccacgacgccgccgcggcggggctggcggcgaggttggagagcacgtcgttgggcgcgccgacgacgacgctgatccccgtgccgcccaccgactgcagcgccgcctggtccggcgcgtacagccgcatcgacgtgatgccgttggagcggtacatccccaccaccgagctcgccggcggcaggttgttcgcgctcatgccgtagcacaccccgatcgcctccgcctctgcatcaccatcatatcacgttagtaaaattttttattactttaattatttacagcaattaattaactattactaagcttgtggttgctttatttttttcgatgtgcattttaagacttgtttatgtgcgtttgtctagtacggacttatataatactccgtaattggttgtagctcattgagtaaaggctgggattctattctattattaaaaaaataactaatttatagagctgtaaataattatgtttttatgtttagttactgttaatgaacagtagtgcatgggtgtacatgtattactgtttaatattaatctcgttttaaatcgggaaatgggtacacatagcaagaaagggcggccggagagtagtgtagaaaagtgacagaatgcgatgcatgtactactattgaagaagtacaaatacatacacatcctttttttgacttattattttttcgatgaataataatttaaattttaatcttaatctcaagaaaaagacatttaactgaaatttgtatgcgcgcttggactagcttgatttaatttgcatattttttttgtgcttctctctctttctctagactctactactggcagacaaaaatgggatgtttttagctttgttttactgaaaaatattatactgattaagttggtgtcaagtgcacgcacactgacgaggaataatatatatttgcttcttgcttagttgcttgaatgctgcaggtttcctgcttctctagcttgacctagttgtcactcgtgactaaagacgtgtctaaagtgtgtaataactttaacaagtatgctaataagctagctcgtgaccaaggataaccttaaacaacgggataagcttttgaccctaagtggattaatctcttactagctagcaatctcactctactacctaaccctgaaaattaggtctaatagttgaaaactctcccctgatgggtcacctcaggcatctagctatagctcttgatgcaatttttttttttgactttggaaagctatcaagtgtttatcctacaacaaatagcatgtacttgcacgccacttgtcagctaatttcggagatggacaaggaatatactacccaagaaacatagagaaattgagagagaaaaaatgagatagagaaattgaaagagagagagagagagagagagatggagatgtaatggtttggtccaacgtcagcagcatgaccgttggatagtccacgtaaggtcgatgtggccaaaggggaagctagctagctaactaacaaagcagcatctaataagctttagctgaagcttagtttagaccacccgtgtgctaatagtcagtgagtgcagtggagtaatatgcaactactcaagaaacgtacatgtccaattaaatgaagcacacccctacaacttactaattgctccaatttgtcaggtcataacatgctttaggacaacataagcaacacctgtcctaactaattaatttctgactactggtgatcatggatgtgccatgtgtttactactactctctttacagtttagttgcactatatgtgtcaatatttgtgttagaacaagactaatagctataatatgtagtacactatttagtagtatatatccatcattagatattgttagtgagtgagtgagttagttactagctagtacaacatgcatatatcttacttaaagaatggaacagtgttggtacaagatatgggagtttgtgtcaacctggaggaccattggactgggcaggtacaatatcatgcatcatttgaaaaatgtcaagcgatagatatatatatatctagagagagaaaactaaagacgacagataatgagatatggtgtggtgttgggttagggggtggttaagcagttgttgcaaccgaatcaataagggaacaaacgaagcggtagggatcaagagagagatagaaaagcttatatttgtgagagagatagcacttgataaattgaattaactttcatgaatgtcaaaaacaaaaaggctatctccagtagctgaattcttagcctaacatgactactgatgagagatagaaagaaagacagatcataaagctaggttatgtg

SEQ ID NO: 16571 - DNA, 741 bp, Oryza sativa
aagaaaataaatctgacgggtgagtaacacgtgcagataggagagtagatgaaaaatgtgatgacgatgatattacgaatagacgaattataatgatatttatctaaataaacatatttaaaatggcacggatcgaataaacccaaacaagggtatccgggagggacgcacgattctacctgtttttgttatttttggcccatattgagtgggctttccttttacctttgcaataggaaaaagtacaccgaaggtccctcaacttgtcatcgggataaaaaaatgtcctcgaaccacaaaaccagatatgcgaggtcccttaactatacaaaaccggtcacccgaggtccttcggtggttttaacaccggttttggtctacgtggcggctgagttagcatgggacccacatgtcagcgtgccacgtcaaatttcccctttctttttctccttttttttagttctctttgctgcggggagtagcaacgggcggcgcctggtgggctgagcggcggccggcggaggcggcgtgcgagcgcgcggcggccgggaggcggagcatggcgcagaagaggcgacgccgcggatgaacgcgttgccgacgatggtgtcggcgcacgacgcgaggccgagctcgaagatgacggcctcgacggcggcggcctcggcggtggcgggcgcggaggtcgggaggcggagcatggcgcaaaagaggagcgtctcgcggacggtgaggtggggg

SEQ ID NO: 16572 - DNA, 667 bp, Oryza sativa
aagccaaggaagaaagaacattagcatctcaaatagagccatcaaccaccgcaacatagcttcctccaaaagaaacatgtattcttccaaattttgtaagcagcacatcctcacatgggtttctagtctaccaaacagtgcccaataccggtttgaccacgccacttcctgcaccagtccacatacatacccttcaaggttttcctttaaatctccttctctccctccatctccactcccatccctctgctcttggcagtgaacaactgtcctcctgcacattttgtcttcctctcaaaacattgccacagaatattgttcattcttgacacgtagaagagccatgaggccatcactcttgcagtatctgaagctgctcctgttacttgcccttggtggtgtcaccaccatgcatgtgcctaaacaagatgtgccatcatccctggaggaactcacccttgatggccatttcagcttccacgatgtgtctgctgctgcacaggactttggcaacctgtccagcttcccgccggttgcggtgcttcatcctggctcagtggctgacattgccacaaccatcaggcatgtgttcttgatgggtgagcactccacgctcacagtggcagcccgtggacatgggcactcgctgtatgggcagtcccaggct

SEQ ID NO: 16573 - DNA, 2306 bp, Oryza sativa
gattgggagcgacggcgggagcttcatccctggggccttaagtgcatcaaaggcagccgaggagatgatgctcagactggcccctccatccaccagcacacatttcatcttgacattgtggatggtcggggagaccaccagggccaactcccccccccctgagcaagcaccgtcggatggtcactctggttgaatgtgagcttcacctccgaccagcgtgccttccggaccgcctcatgcgtgggaacaacggccagaaactcccgcttcatggccttgaagcttcggtgagaggcgtgagcgcaagcccccccgtcgagcgtgtcgacggtcccctgaggtatctggaaatcctgatcctcaccgtctcagccatcatcagcaggggccttgtccttggcctcccctcgccggtcaccggttgaggtcgtgggggctttgccctcccgtcgaccctgccgcttttcctcattagcctttcggaaccactcggccaaattcttgaccgagcggcagtcggcgagactgtggcggtaagtgttgtgtaccgagcaccacttgtccgccgaccggccctcgctggagggaacggtggggctcggcctatcgccggtggcctttcctttgcgcggggcccgcgtgggcccgtctgctgcaaggacatggccctcgtcatcggagcgggctggtttccttttgcctctcctatctcgccgcttagagcggggggcagattcgggggtagccgcagccgccgcaccggtgctgggagagttctaggcccatgcctcctccttccgggccaccttgtccgccaactcgaagagctcggcagtggtcttgggctccttggaggcgatcttctccagaatgcgattatgccgcacgccgttccggaatgcatatacaaccgcgtgggctggaatgcacggaatagtgttgcggacctgacagaagcgctgtatgtacgaacggagggactcatcatccttccgccgtacatcgtgtaggtccgcctcttcccccgtgcggggatatgtgccctggaagttcgtaatgaactgctggcacagatcctcccaggagtgaatggagccgaggggctgggtcatcaaccagccacgtgcctgacccttgagggccatgggaaagtaattcgccatgacccggtcgtcaccccttgccgccacgataaccgtggtgtagatctggaggaactcggagggattgatgctaccatcatacttctccgtaaggttggggcgaaacttcaggggccaccggacattccggagactcgccacaaaggccctacaacccgtccccccaggggtgagtgtggggggagggccgcctcgtgaagaggagcgtggcgctccagatgaggaggcgccttccccgacatgggcagctcggcgctcgtctcggcgtcgctcaatgttgattcgagcgtcctgcgtcccgtagaggccgtcatgacgcctccggctttccgaggcccctgacgatgttagaaccgtggaccacctcgagatcgtggccgatcgacgagcccttctccttgccgacgaggagagggtgaccgaggtacgcgacgtaccagcggcagcggatcggccactcatggctaactgccgctgggtagtagtgaccaggttggccacgtcgtccagccaacgctgaacaggagtctccggctccaggttcaccgggggatgccgcagaagggcgcctgctgcctgaagcgcgccttggggcgaaccgccatctccatagtcgagacggcgggcgtgtcccggcacgtcgcggcctccctccgccagggggcggagagagagccgaatcacccgaacgagtgagatcctccctccgcgaaggttcgcagcggggaggagttggagaaccatggcgacggtgacgaggacctcggctcgtgccggaatccccactcccgaacggggtgggagtaaacgccaccgcctcctcctctatttccgggacctcgaccatggtcggctaaggcctggagaaaattgggacagaagaaggcgacttactctcggaatgcgcaaccgcccctacctggcgcgctagctgtcgaggagagatcctcaatagcggggaatcgtgagacccccatttgtgagttcggccgggggcggaggctcatctcttggaaatcactcgctcgtccctaggatcaccgacgagcttgcacgcaaacggattatacaggttcgggccgctatggagcgtaacaccctactcctgtgtttgggattatggatgagttttacaaaagattt

SEQ ID NO: 16574 - DNA, 543 bp, Oryza sativa
tcctcaaatacgtcgtgcgtcgcaacttccgagccacgaacaacatggcagaatatgaagggctcctcgcgggattgagggcggcagccggaatgggcatccgccgtctcctggtcttgggagactcccagctggtcgtaaatcaagtatccaaagagtatcagtgcaccgacccgcaaatggaagcgtacgtccgtgaggtacggcgcatggaacgccacttcgacggacttgagctgcggtacgtgccctgacgcgacaacacaattgctgacgagttgtcgcgtgttgcgtcggcacgagtcccactccccccagggacctttgaggaaaggctcgcgcaaccatcggtgcgaccgagccctttgagggaccccaatgacacgcccaccgactcgactccgggcgacccgcgcccctcggggcccgagggggtcaaccctaacccccctcgtcaggtcgtgtggatgaccgacatctgggcttatctcgaaggcaatactcatcctgaggatcgcgcagaagttgaaaagctcgcgcgca

SEQ ID NO: 16575 - DNA, 1056 bp, Oryza sativa
ccatgcagcagtgctcttggcaaggggaaaaagggttcaggcattatagattctagattaatttgttccactagatcaatgagaacagtaggtaaaaaatcaaatgtcagagatatgcattgaaagcaaatattaaggttggttaaaaacctgggggcaaaaacaacactttaataaacaaaaagaaggtaaggttaatttagaaaaaacttacaagattaaatacaaattcaaggaagtatctctttttgcttcatcctctacagataaaagtcgggtgcgcgcctgcttcagatcgctatgcttgttcaaaacttttggtgacaatccagagttattagcttgcttttcaataagtgatatgagcttccgtaaatcattagcagcttgtccataatccctgatcatttcgtataaggtggctcttcttgaaattgcctgaaattaagaagccattaatgaaatccatgcacaaccacataaggctaaaacagtccatatataataaatgtatcacatattatgcatatgtaaatgtgtgcaaaatgataactgtgtatcataaaacaagagctactgcactttaccttcagataagttgcatcaagaaccatggctagtgaacaatctgctatagcatcagtaacttgaccgagtgcttggtatgaagcagcacgattgcaaaaacagacagctgaaaaggggcgtgaatcactattacgtgccaatgctgctgaatattgttctacagcctctgagtatcgacgagcttgaaatgcttcattcccagcagcctaaaaagcaacatgagcacaaaaaatattaagttatcattaacaaaaatgaaaggctatctaatcggtttcttgctcattctgtgatgttgcgtcaaacataggaaatagagatgcactcatagttactaattatcctgggagtcaataagttgtttatttcttgcacatcctactcagtaaaacagtagaagttgctaaagttgaataaaaaatgcagttctgactgcaagaaagaaatcatgtatcgatatgatagaca

SEQ ID NO: 16576 - DNA, 2472 bp, Oryza sativa
ccaacatgttgtgatcattagctatgacgtgagcaccagtgagaaaacaccgtttaaagatgatatgaatgtagtacatgcactgtttgttaggacaagtgatagatagttgattttatttgttgatgtggtggacaagcctatccagttggtgactaacttgttagtttcagaggtcaatgagatagcgatgcatgaggttgtgacaaccaggtaaggtgattgtcacgcccagaaattcccgaatagaattccaagcagaatgtgcattaaaattcccgtccaggaccggccggggtacacaaacgacaaagttgacatacagatccacgtcttacaaacattataaaagtcttacataaatgtagcggaaaacttaaaaggataactggagctaagccttgacttggactgcagcgggaacaccactccacaggcatcctcgacggcacggacgaagcctactcctcggagaaaccaccatctaatgcatactcaaattctgggggttggggaaaatagagcaagactgagtactacccactgtactcagcaagtcataccggaataggggtatgatgcagggaattatcaaggggtagctataatggttcatttgcataaagcggacatttataaacagaagttgaaagcagtaaaacagttgtaataattaatcaatattaatcatccactgtccaacgctataccacgttgcaacaggcccaaccatccacctatactattcaattccagtagactagtctagggtgagtctaatcacggtgaatctggttgaccgcccataaccgcgggcacagctattcgaatagttttactctgatcagaggtgtacaattgtacccacaagacacagccccacgacacgtttccgtgtgccgacatgccaccacgacataccggaaagaggccgtgacaggacccttcgcataaccccctctaaccaaacacaccacacctcaggtttcacccccactcctcgcaaggcagcgggcagtcccctctcgtgccttggtgaatccggaagccgcataggccgtcgcagggcccattcaaactccatcacgcccacccttgcctggatgcgtcggctagaggaaagctacactacaagcccagccgttgcccacgctggcttgtggtaagtacgaggaattcttccagggtttcccgcgaaccggtccttaattgctctgggcgcgaccatcaaaaccatgcacccacggcccaccatttaatattaattaattaaccaacaccggagcagtgagcattaaccgacatcaatcctagaatctgatatctatgcattaatgtagttccccattgtgtgctagttgaactaagcaaaactaagcattccctagtccaatctctagtcatgttatatcccaagctaacaaaggaacatggtacaagatagcatggctatgacagtaggtaaacatcccatagtgatattataaaacaatgcaatatttgaaggaaaacaatggagcatttgcaatataggatcaacatgttcaagtgacaagcatgacttaccttgctctgcagctggaggaacttcggcgactatttcaaggtacaccggagcgtcgggagagccggaatctaagcgacaaacaaagcaaacaatacaaacaggctataagactactgaaacagagaacaaaaccatttttaatggattctacacatttttcttgatttactgagacttgaatgggcttaaacggagctgggatgaattagttataaattttagaagattcattgtgtttttactataaacggaaaaatccttaattgatttattgcgcaataaataaatcccagggagagagagggggcagcgccaacatgtgggccccacatggcagtgacccgaggtgggcggtccacggcggaccgggtccacggaccggggaaaccggcgcaccatgtggtgcacacgtggcgccgacgtggcgcacacgcggcggccgaaccgacggccccgatctaccctacccaagggtagatcggacggcgggtgtggctcgcggccggcgtgcgcgggcacggctcaagccggcccggcggccatggcgcgcggcggctagcggcgcgcatgcggcggcggcgcgagacggtgaccggcggcgacggagggcgacggcatcgcggcgacgcgggcggcgaagcggcggccaagcggctagcggcgcgggagagagagagagaggaaggggaggggggagacctcaccaacgacgaccgacgacagcgagcgatggagggcggcggcgacggcgggacgatctccggaacctcctagcgaacacggtggaaggggttagagagggagagggaattggaagagggcgaggacgccggtcgaaggcggcggccatggcggtgctcaccggcgaacggcgcagagtgggttccggcggcgggatccaacgg

SEQ ID NO: 16577 - DNA, 17434 bp, Oryza sativa
acgtggccggagaaggcgggaacgtgtgcgcggcggcggatacggggcgcggcggcgccggctggaggaaggggacgggcctgacaggtgggccccacctgtcggcgaccctgggagagaggagggaggcggccggctcggctgggcctcggcctgtcggccggcccagcggaaagaagggggggaaaggagagaatgggccggcggcccaattggaagaaaaagagaaaagaaaaaggaaaaagaaggaaaatagattttcctgggattaaatattgcttgtgctcaattttaattggttaaaattatttctagagctctgaaaattccactaaaaatcttgttagcgtatttcgacatgtagaactcaagaaaaattccacatgccaaatccgattattatttgtattaatttattagggttttctcttgcttttacaccgatattttctctggtggattataaattcaatttaggcttgggaaagaacttcagggcgtgacagtgatgctcaagaatctagcagttgtatgttgattgggatagtctagagatagctccaattccacataaccaagttcctcagcttgctattgattgggatgcattagtgatagaacattccacaacaacttggttgatctatgcctttgatggaggaagatgaaatgtatacatttgttggacttagggctgaggacaagagagccaaacaaactaggcttgaagttgagaggcaaagggattatgttcctacaccaggtccagctcataccgaagggaacttgaacattaacaaggcagagattgttgttaattgatgtaatacttggtgaatctgaaattttctataactaggatgatcctcctatggaagttggaagcttatatagtatgattgaatttaggtcaattgtgaggcaacacgctgttaaggggtaatttcagcttgggacaaagaagattgataaagaaatgtttaggggcttttgcacagctgagagatgcccatgggctatcgtggcaaggttgatgcctgatgaaagatccgtgagggtactaacaactaactaaataaatagtatctcatatttcaaatattggtttggctatatgagttgtctcatggatgtaaccatcttatgtgtgtgtgtattgcaggataccataaaaaaattcgcccattctcgtgcatcaacagggagagtaaagataaagatggcaagttataagtgggtggcaaataacacaattccttttctaaagaaggatccaactatgggtgcaaagcagctgatggggacttagaaaccaagtacaatatcactttaagataccatactgtgaatagaagtatggcaaggctaaagataagatttttggtacatatttgtttaacttcaaggctaaggttgagctgaaaatgtctaaaaagtgttgtggagatagattacaagagattgttgatggggtttattttcatatattctattgtgcactcaaaccttcgattgatggtttcacgaatggatgtcgaccatacttgagtatacactccacagcccttaatgggagttggaatggtcaactagcttctgctacatctatagatggacataattggatgtttctagttgcatttgtattctttcaaagcgagaccacttacaattggacttggtttatgcaacagcttcattaggcaattagggaacaatcacacttagcaatctgctcagacacttgtaaggggctggataaagctgtgaaaaatgtatttagtacaacagagtatagagaatgcttttggcacttgatatagaatttcacctagaaattttatggtctagtgtttgggaacatataccctacagctacgtcttacataacagacaaatatgagcattacatgaataattcactagacaaatccagatgtgaggctatatctagaaacttaccacaactactttggatgaggagtaagttcttagaaaagataaaatgtgactttatcaccaacaatctggtagagtcatggaacaaatggatcaaggatttgaaggatcatcctattgtagatcttgtagatggcatcagagcaaaaacaattaacctattggcaaggcggaggaagataggtgagaaattggatggcgctagattagcgtcatgctgaaccttcagggagaactgcaggataagcacggaaacacgctcgccgcacactggcgcgccgtgcgtgccatgggccacggcacacaggcttgacaggtatatatgatgaatcatgaattgctcttttatataccaggattattagcttttttcgcttggggatgtgaccccattgtttgtttgttacacaagttatccttttgatgtggtgtggtatgtaccagaaaaacaaaagaaatattcagaattgaaactgatgtgctcttggtgtgtcatccaagtcttgaaacaatgcgacctctgatgaaaggatcaatatcaccgtccaggacagagttcaattctgacagctggaggcctgtgttgagatcatgaaccaatttctgaggcccaaatttgtaccttcttgtctctcggctgtacaattcctccaccgtctgcctcttgatcgtcttcaggttcgacgatcttaactctctggatataacaagtagctttgctttcagcctgcttatagctttcatcttgtttgcgaagtagcttcgctcacctgtggagatataaagagtcagagctgcatgagagttcacagtgcatgaaacatttggttaatttagtacctgaactttcagcagtaactccagttcgaatgtgttgaaccctaatggctgaatttctgtgatcccgcctcttatgatcactaggggaaggagaaatctccagatcattctcgtccaagtgaagattaactggtctgtctaagaagagaggaattatatcgaccctagctgacgttgcctgcaagctttggtcaactttaggttagccattttgatataaaacagcatacggtgaatgccatgataaagttgtgtgcacaatatgggcatccaaaaacttgtacagcagtttatccaggtctttttaaacacagaagtcaaatcatgttgacattgccactattctactccctttgcttaaaaaatttggatggccaatatttcagccagaccgattaaagaaaaggggtcacagtagttgaaaaccatgtataaattctgaactatttttagaaatttgcatattaaacatgacaagctgaaacttaaacctaagtatgtgctattactttctccgttgtatcctaatggaaggctacgtagttcgacttttgttcagtattttgctgatgcggttctatatgtttgccttggttggtacatacatatcagtcagttctagtgaagtaacaattttaaatattggagtccaggttttctttatttgatattacctgtctaaccaattgcttgaactaccttgcagaacatctcatggttctctatgcaaatgtattagggaattgcaaggaattctaatctcatcactaatgggtagaacaaaattatgataggaactaaatattaacaatagaaaaatgtaatcacctcataagtgccagcattatcgacagaaggatagatcattctgtgagttcctttttctccagtaagggtgccaaacatgtactctgattcaatttctatggctgcagtccatacacgaccacttgttgatgtgatcttctcaaccagcccatccttacaaccttgtttccgtgcccaacttgaatacatgcaaaagatcctctctgcccatagctgcaatggtaaaaaaaatcttgtttataaaaaactcaaaaggtggaaatggttaattttgctcaagaaagaattcaggtaaacatcaacttctataaaactgcaccacagtgctgataaagtaatagctaagaatttagatttggaaggaatatttatagtgaccctccatgagcaattgagcattttatatcttcattcacacgattcttaggcatatgtattccttaatttaatgagcagcatttcaataataacacagattcatggaacgaactgagcagtaacattatggaaagtacaaaggtagtgttattattactttgttagtacaatgttggcgttcttttattcttctctcattaagatccaatgaataattccattaaccaacattctataatcaacttgcctcagaagcagcaccatctgatccagcagtgacgatgatgcaagcgccttccttgtcgtacggacccttaagaagcttgtacatctgataacgatctagaaactcagtagcatctacggaggtcttgtatgcctgcttaaacaactcaacattgatgacatccatctctgagagttgactaatcagcttagcctcttcagcctgcaccgcatatcttaagcatcaaaaggagaaaaatgctaaattctaaatcacaatttctgtagtgaaaaaagaaggataaaggggtggaatttttgaggtggttagagctgagtgaagggcagacaatgcacacagttcagtcctgctatcaagcattgtccattcacacaacagtataggaagctttactttgtccaaatgtagggaaattttctgaagcacatcttgcaacaaggaattaagcaatcaccttatagcgaaggtctttgagatggtcgaccactctgatggcatcagccagagcagagagtgtctcgtgcgatttagctggattgtcccacaagttgcgccccctcaacacctcttcctgtctgattctccgcgcttcctccatctccagtgcactggatgcagtcgtttcgacccggacaacggcatcttcgatcctctttttcaaagagtacaaaccttggtacaatcaacaagtaactgtaataagtctgaaaattctgcggtttcaattttaatgacttctgctcaagttattctctagtgctgtcactatgtttggcctgaaaaattcccttctcttttaacactttagcatgatttccacaggatttatccgcatgaagcaacataatcaaagtactagtagcttgtattttcgttgcattcagattttgcatttgattgaacttgaactatgaacattcaggacagttcttactcaatacaagataacaagaacaggtatgtccacggccatattagtaacattgccactgaaataagccacgctctcagaaacaatttccacaacctaacacaatagcagagggctgacccaaagagggagccgcggggactcaccgagctccttgtaggaggcggcggtggaggcgccgtcgccgcggccgtccgccgggagggcggcgactcggccggcgctggaccaggggcgggagcgggagcagcagcggggcgacgccgcggcgcgcacggacgccggagagggcgccgtgggcgccatggatggtgagcgcgagggaagggggagggggggtttaaagagcggcggcgagcggcggagggaggcggcgcgcaggctgaggggctgggtggcgcggcgtggctcacacgcgcctcatccgccgcccaatcagcgcgcgccaactattctgggcttgggttgtgtgcccgtggccagtgggtgttgaactgttgacaaagcgaaaatggccgaatttttgtgagggctcctttgggacaaaggagaaacattggaaaaaattagaatcattggaaaaaaatttcgacctttggaaccaaggaatgggactggaagatttgtaaggattgcttttccacaccccctattttataggaattctaacatgagcacaaacctcttgttttatatgttttagttaagcctaatgcacactctctcttgctcgggtgtggatcccctagagttggggatcaactccactgggtggatttaggataatcctaaccgtcctttattttgtacggatgttattcattttcttcctcaaatgtttttttattatctagacatccaaaacctccttgacatgattatctaactccgaactggagcgtttcgacttctgagtggcggcatgatgagactgctagaggcagacgagcatggagcataccaagtgggaggtggcacatggtgctgaatctaaagccaaaacatgcccataagggttaacaatgcttcatgtaaatcagtgatagatgcacatcaattgaggcttcggagaacgaaacaattcatcatcagtgcacatcatagctcaattggctacttcttctttgggcatgggaaagggtggacctagcccacagctaaggcccgcggtgccctttagtgctctcacagtaagctagctcatatatggtggaaatttgttgtggtccatggggttttgacaccaagccctagcccatggcctagggtgccacgggccagggtccgcccctaggcatgagcgcatagctatcgtatgtgttttcatattctttgatagtagtaggctggcaacatcaacattagttctccactgaggccgcaatggttgccgccgagaaagaaggcaaaggaaagatgttgcttattccaatctattcactagaaacaatggctacgattaactgaaatctatatggtggagttgaggccagctgcaggggatctgtactaccctgcttgccatatctatactctctctctctctgtattttcaaaatcctgtgttccaaataagcaccaaaagtatcaatactctactatttttttaagtgaatcatgtttaggatcatattttcttacctgatagttctaggtattagcatatccttttactttagactaggtaagaaatttttaccctagattagttgtttcggatgagtggctcaaagcgtacctctcatctccatctctccttgcatgttgctcgtctgcatatataaccaacaaactcgactacaatatgaatgtgatgaaagtaaaattcagtggtataggcctgacactagcaaagcacagtttataccatgcaaagatagagcttgagttgcacgaaactaatatcgatctgtgaaggcctagaggaacaatctcaatgtcctcaatatcgagttggggctagcacaggaaaaggtggaggcagagtttgattgcttgagttgagcaagcatggatctttagctttggatcaatgccaaatggtgaaatggaggtggagcttaaaaaaactgaagctactggtggagggcaatattgacctcgagtggaagccgccaccagcaaatcaaagaacaaggttagttgcactagccattgggcggaggcggaactcgagctacacatggctacctttggaggagatcattgttgacgtgtcgacgtttgatgtcgcgattccgatatttgcatagtatggggattgttggtactaggatatatgcgagacttaggtaaaaaagatggggacgaggatttttatacaggttcgggcccctgaattgtcaggtaataaccctatatccagttggccgaagccggtattgctcttattcaccataatcacaccagtacaatatttggggtagcctatctaactgttgtcgacatggcggtctgaagttctgactcgtagtcgacaacagggtagtcttcctcctcgagttcgtgcccagcgagatcaaagacagcgctagatccctacggccggcctctgtaggtaccggatagggttgatccaggcatatctctgatgtcgatatctggcggcttgtcttagcgtatgttggcttgtatgttgatctttctatcttgatctattgttccgtcccccctctcctcctaggggccttgtatttatacctataggtgcccctttgtccaagtagaactagggaaaccaatatggatacaatccgagtagtcattgtcgtttccatgtagaactctattcatccttccttatgcagaactcctcctatatccgaagattgttcccgtataagacatggtatgtggtgggtcctaccgagattaaatcaactactattggatatgtggtatccataaccctgacggtggacggagcttaagtggtgtggaagcaaagtacctagacctagtgcagtaggtggggtggagctcgggttcacaactacaacgaggattctacaatcaagcgttgtcctagtacaccctgtgcttgtacttcgttcatgttaattaactcatacctagacccagagtagcagatacgaataaaggagggtgtaagagaaggaacatggagagtattctgtaatgtgcgaaaggaaaaatggtctaaagtgaactatgatgataaaaagtaatccaatatgcaatatgcaatcttctagtgaaattcatagcatcttatgcattttttatgcaggtttgacagtatatttctcttaacaatcattaaaattttatatagtttatatagtaagtccaacacaatatcacggaaagcattttcacgtgcagtcaaaatggatctatggaaagcattttcacgtgcagtcaaaatggatctacgtaagcggctcggctctccacctgtcattaaagacctgtgaaaattaggtcttcgtattcagacggccgactgtctgtgtagatcgaacatgtggccatattaaaatgtctgcttttgaaaattagaaatgtttatgaagttgtaatcttaaaatacatatgatatctgaaaaatattcttcgtatgcattacttttgttctaatcctcaagagattagcagcaactagaaaattgtggggtgcctagtgcgccggcgcgcgccgctggcgcttaatttgttggataagataattactagtagtatattagtgttagataatgattgtttaagataattatcataatatataagattttcttttttcacgagatttttttaactaacaaattgaaaataaatatatattcgaagttaaatttttaaaattttaaatccaaatttgaaaaattttaactcaaaatttgaatttttcaagtcaaattttaaaaacgttcaacttttcacctcagatttgaaaacttttaactcaaatttaaaaacttttaacttatatttgaaaactttcaactcgagatttaaaaatcagcatgaagacacggggatgacatggcgcgcgcgccagcaagcgcgaattagccaccgcgagaaaattgccccaactgtaaacttagacgggcccatagcccccagcccaagcgactgaaggcccattcggcagccttcccggggcccaatcaaatcagtctgtgagagagcttgggccctcactcccggtaggacggcagcctccatgtagaaggcccacataataaatgtaaattgctcagcccatacacgtccaggtttccagagagataaatgtggcccatcaattaccaaactaacaacctcaaacaaaataaataaataaataaaaatgagtataattaaaatgaaccgagcgcaggctgcaggtgggggaccacatgcagagtcagcagcaacagcgacccgccgtgtcctcatcgatcatcggttaggccggccccagtggcggctgattacgaccggtggcgccggcgaccgccccatccacccacgcccatacacgcacgcatgctgtcgtctcctcgtctctcttccagcttgtcctcctgtctcattttatatattctatctactgcttcatattataattttttcgagtcaaacttaattttttttaaaatattaataatatttaaagtatcaaattagttttattaaatctaatattgaatatttttcataatatatttgttttgtgtggaaaataccactatatctttctataaactttgatcaagaaatttgattaaaagaaaagttaaatgagttataatataaaccagagggagtagtcatcggccggtcaacatcaattgttcaatcgttccatgtaaagataagatttatgatagtatactacacacatgtaggtttagctagccacgtgtgttgttgctggtatgtactccggccagtcatacgtggcggtagcagccgccgccgccggcggtgtcccaccgggcagtcatacacaaggggctcgatctctggataggccgcgcgaattaatgcaagttggccaagttgtggccgctggatgcatgcatcctacgagtttgtgtgtgtgcatatgctttgccggcttgcaatttgtttactgcttgatcatcagatcatgaccatagttccgaattccgattaattagatcgatcccagctaatcatgatcagcaggtgcatgcatatgtctcggagcacctgatcaatgctgagtaagctaacaatacctactgatctgttcgtgcatgcatacgctgcatgcttgctgctgattatatctcgatccaggccaggcaggcagcttcccgtgtggcctgaatggatcgatggtcgcgtgttgtttgcgtgccgattttgtgcagctagccaaattaagtctatagctagccgagaaacctggacatatgacatgctcgatctgcagcagctgtgacgaacgaagctagagaaagtcacaggaaattaaggcagagcgagcaggcaggaggcagcatccaggtcgtctgagatgtgatgagcgcacgcacaaaatcacgccaggattgcagccggccagccaggtgagctccatgcatgaccgctcaaattttaagcaatcgcgcgcaaagcgcttgattgccagacgcaaatgacgatcgacgcacgtactttcgcctaattttagttggcttgccaaacctttaattttattcgttagattttaaattaaacgcactgaaaattagctctttccttatatgccattgatctaaatttacgcaccctctcataccactctcgtctgttgaccgttaacttttaagtaaagaaaacgtatttgcccttctgagtattggacatggctaacaactcagaagagcaaatatgtcttttttacattagagttaacagttaacacacagtcaacagacggaagtggtacgagagggtgcgcaaatttggatcaatgtatataggagaatagccaatttttaatgacatacaaaggatcagaccaattttcagtaacatataaggaattctctctttcacgaataacttgctcagcccgccctcaagttgtatagtaggtccatcttggaataaggttttcccgcctatctttaacttgattcccgctaattataatcgaaacgtttttcaaattggaattttctagttttcaatatataatgtacaattctatagtagtacttgttaacgtagaaatacaatgcaatattctgtacgtagtactagtacttgtcaaaattaaattaaacgatacatttgtcaaaaagcacaagcctacgaaggctggatatatatttatggacaataatccttaaattaactggctgatttatccaaaatcttaattaagccaacgaaagatcgatcatatcgacggacacgattacttttttacttcaccattaattaattaactaatgcgtgattaacaaatccatgggctccagacgtcatcgagggccagattaactaacctctatacgtacacctactcctcaaattcatatgctttttatactttatttcttaattaattcctcttcgtgttttttgttaagttaaatgacggaggcgcatatacatacgcatcgatcgtgtacgtcattgtttaatttaagccctgtcagcctatagctttgtcgtctctctctctctcgtgcactcaacacaaacttaaacagtacacatatagtctagtgcaaccggtactacctaatataacgacctgcatgtatatactccctccatcccaaaatgtttgacaccgttgacttttttaaaaatatttgaccattcgtcttatttaaaaaatttaagtaattattaattcttttcctatcatttgatttattgttaaatatacttttatgtatacatatagttttacacatttcacaaaaatttttgaataagataaacggtcaaacatattttaaaaagtcaacggcgtcaaacatttagagaaggagggagtatatggtatagtgtgtactagcctttctaatctcaaaatagttagcatatataaatacagatatttaaattagttatcatgcatatataataatcatcgatcgatcgcttgtgcactgctacatttgtagctgacctatatatgtctagcttttgtgatatatatatgccgtgtatataattaaatagtgtgtgttacatgcatatatacattgcgtgtcatatgatcatatcatcgtctctgcttgatcaatatatcgatatgatcgatggacaggccacgtacgtaagagctagcaagtagattagcaaggatatcagagctaggatatatattaaagctaacaagatatgtgtatgctacaaaagggagaaacttaattgtactcgatcaagctacaacttaatcattactaattaattaacaatgtggtgttgcatcatatcgttgcagcttgacacttggagctcatatatcctgaccaatggctgcttagagctaagctaattaagcacgtatagtacgattcactaagtaatagcacatgatacatatatacaagctaagccgaaagtaaggcggctaagacgcctctcgtgacagcaataatccatttaatttgtctatacacacgtaatgactgattcatgtgtgtgtgtgtatatatatatatatatatatatatatatataattcatcttctagaagatcatcatcatcatcgatcgatcacctcgtgattatcgatagatgcactattgcacttactgcctaaatgtatataattattacgtgatagtgcatctctctgatcaagatgcaggcagaatacaatcgttagtggtgaaatcaatcaagatccaacacaatcactgtacaggattaattaagtttttgcaaaaatgttgcgcatatatatacaagtaagtggctagttaagatcagattgtttataacactgaatggtatatgagatgtgccacaatatttgactttgtacacgggttgaactcgacgtcaatgggatcaacaacaatacacgcctagctactactcgtacctactactactactgctactagtcacttaatcaatggagagatcagtggccgagtcttgtaagcaattgaatcatgaggtaatattgatgtttacacgtttgaaaactataaaaccactcatcctgccagctatctatctagctactcccaataacttgatctactctcttttcatcacatcctattttttaaaattttgtggagggaagagaggtctttaagtttggcaagtgtgtgttatcatttgttagactgaaatgattaaaattagtcgtctagtgtttagctctacctgcaccatctttttcatttacacttaaatcttccctaaatgattgagattagtttacacttctactattaatagaaatattgatattcttcattatattagttgttttgtggagagaaaaaaattaatgtagtaacaaagctaacctagcaaggggactgatgtatatcaagcggcgtacatactctttttttaagaaaaaaatgtctcctaccagaacacctatagacctaaacagtgcaactgattaataattaagtaaacctatcttgaatctctctccatgaaggagaatttgtacggcaccaatgctcactgagactgactatttgctaaggaccaccgtataattggatatataaggggttaatatgcttgtttattgattcttgagtattgatgtcgtgacaatttgctagtaacttaggccaagtggattgttgttgtattaactaactacacacaccctttgataattattgatatgtggattatcttgtgatttttcaccatgtactcttatcatacatatgggtgtggacaacgacttaaaaggtggctattaccgaagttttcttattttttgaactttttaaaatttttactttaaaataaacactttcaaaacttagttctaaagtctgaaccttttttatcacgctagttgcgttatttgatcatgccagtctaactggtgtggcgagataaaactgtcacgcccgatatgtgtggtgtgtcagtgttggtttgccaaaccaaacgggctggcgtgattaaaagattcagattctagaaaagttttagaatggtttatttttaaaaataaaaaaagttcaaaaaataataaaaaaagagattaccactacactaagacatagaattgttatggatagccattgggaaaattttgcattcgtgcacacaaactgtctattgggaaaagaaaattacgctagtagacaaactagctgttgaaaaaaatgacgctcttggtcatgtacaaactatttaatttccataaaaactatatgtcaacgattctgtgtcgtagggtgatgtgcccgtgatacatatagtaataaatatgccttaaaaaaataactgataaaattaactttgagtagttacttacttacacagtcaaacctgagctatatatacgtaattaactaccacatacatatatctatatcttagtttgaatatttttggttaattaattaaacataaataggaaagtgacatgtctgattctgaagcgctctctagctagggtgtgtggtcactactccccagtcccagtctgtggcctgtttgaaaagctgagatggggttgcgtttgcgtgcgtgcgcgcgcgtgcgccggacgcgtacgtcctaatcccttgtgagcccccaatcgaccattccattccactccctaggacgcaaacatgtggcatctcctccccacaataacacaatctcattatgagttgatgacaaggccaaagctacaaaacaatatatccatatccatctgattgtttttttaattttttttaatatgccaacatatatttgaaagggaaatttatatataaatcgctttcgaagcatgcccatacacaaacacaaagtcctacaaattaggcgtccgtgtcgacctgtgtgaccgcccggctgctgcgtgcgtgcgtgcgtgcgtgcttctagctagctcttgtgtacaacgagacgctgcagctttccgacgtggcaattttgcagcttatcctttttttttatgatatatactctccctatctaatgtgttcaaattaaactcgatcttttccaaatggacaggcgcgctagctagcttctcccagtttcttaatttgttttgtttctattttaattttgtgtggctattcaaccacgtccacgtcatgcaatgaaacctctagctaaaatttctatggaaaatacgtacgtggaatatataaatgtatgtaattaatgatatacgtacaagcataatcaactatatacaaaaatgcgtgtacgtgctatgtactagctcttattgcattaagctatatatatatagttctttatgtatactgttgttaactatttgtgtacatatgtacacagacatatagagtacacatatatatacacacatgcgtaaatatacgtaccattgtactctcgatcgtacgtatagagatgtatacatgtatgggccggccggggtaaaataaacggcgtggaaatcttatcttatctggatggaaacaacgtaataggggcttcaagttgttcctgtggctgcatgtgcgtacgtggcttatccactcatgtatcatctatgatcctggctagcctagatcacaaagctcaatctactacctctgtctcatattataacactttctagcattgttcacattcatatagatgttaatgacatacatatatatttagattcattaacatatatataaatatggataatgataaaaaatcttataatatgaaacgaagaaaatactgtactactactgtatgatcgacctagctatagctgcagccgccatcaaaagcatcgagatcaacaggatgagatcgatccaaggagaagaagaagctagagaaaggaatcgaagaagaagaagagaagagagaagaatcactggaactctctctctcattcatcaccttgcccatcacactgaaggtgataggaaaggaaagattctgggcaaagtaaaccatccatccatgtgaccatgacatggataaatcaatccatccatgagctgatgaccggtcgagatgtagctagcacacgtttaattaattaattaaattcgtttttatcctcatacacatatttagttctctcatttttatccatacacatgcagcatatgaaagttaagatgcagatagatgttaagttgcttgttgatttatctagctttcatatgatatagtggaaacaaaatatccgggtaatccggcaaccgtggctgtcgatcgatcttagccattaactgctgcaattgtcaggtaacagtggtgggtggtcttggttaatcgatcatcatgcatgactcattcatgcatattgcaggcccccacatattccaaattatgctttatcctcatagatctccattaattactccattggccactaccacctttgcccatgcaactagtactagtgtactctatatatatatgccattcgttttccttcagaaatacttgggcctcttattttctgaggccaggaaaataatcaaaaggcataagcatctttaacatacatgtatgttaatttctcttagaaagataaatgtatatacatgcatggttgtgcacaaaggaattaataatgcactccctccgtactcgtaaaggaagtcgtttaggataatgtttaagttaaacattgggaatataaatcatgaataactctcaagtttattgagtttgaaaacgtaaaaaatatatgaatagatttgtcttgaaaaatactttcataaaagtatacatatatcatttttcaataaatatttttatagaaataagaagtcaaaattgtgttttggagactgtgtcgctgtccaaaacaacttccttgacgagtacggagggagtactatatacccctctctacttaaccctgatgttggtagcattatacaataagttagcatgtgcaccaacttgctgatgtgtcagctagatgagcttggaaggaacacaaatattctttctcagctactgtttggctcatgactttggtgacggatggctaatgcttgtactcctatattctctataaattaacaagagcaagaagacatggaaaaacatcggactcatgtagaatcacagtccaagaagataaccacttcctagagccggccaaggcaaattaaagtac

SEQ ID NO: 16578 - DNA, 1283 bp, Oryza sativa
aatgcttattaactttagaacataatgtaggcagtacctgacatgctgagaaaagtttttgcaacagtagaaaaaataatgaggatgaagctttaagaatttatcacatggaagattcgatcaagtcacaagtcattatcaatcagatatttatacaacagctagataagtgaggaccgatgatccatacacataatgcaggaaacacatcattttgatacttagaatcattaagaaaaagaccaaacatggaaaggaatgccaagctgccatccaaagaagaaaagaaaactacctcctggacatagtggcttgtcagaatcattgtgctttggtggttcacttgagtagaaggcattactacggggaagctggcaccggaaaaccttcacgctgtaacccacagcagtcaaaatcagcacaacaataggctattagcaaaacagctgtagaacttcaattcaccttctacacggattgccttgtctatgtttccactggtcgtgctggtctcggagtaagcatgccattgacgggcacatgaacatgaacaaagtgcggtgaaatgatgccgcattgtcctcaatcggtgcatatatctgcacaaaattgaatcctatttgtgattgatttcacacccaaacaacaagtagtcagctacaactgcactatccacaaagcaaacacctggaggacgaactgcaggggctcgccgcagaagccgcagcaacgcgagttccccgatggcaagttcacaggatccaaccacgcctgcaatacagcaattcacacaaaccacaacatcaacacctggtcgacgaattgtaccaatttagcgagtgaagttcatcaaaaacgcgtgcaatccgtacgcaccgggatgccttccgccttgctagggaacaggtggcggaagaagaaggcccgggtgcttccgctttttcaaaaaaacaagcgtcacctccgctttttcttcttcttcttaacggcggtcttgtagcccgcgccggccgcttccgccgccgccgttggcgggtggggatcggtggggcagttcgggctcgtcgtcttcctcatccagcgaggtgatggtgagaccacgaagcttctcggcgttggactccatcctcggcggcggcgtgggggcaaaaatgcgtgcgtgttcggcgactcgcacttgagagtcgagacggggaaatggtttgggcgaaaaaccctagctagcctcctctcgggaatctcagccggggtgccgagtaggaattcaaaattcaatgggccat

SEQ ID NO: 16579 - DNA, 4443 bp, Oryza sativa
ctgctcaagagctgcgttgcttttcctcggcatgccttctctgtcctgcaaactctacagcaagtgtgctggacgggcaaccaaatgctcttctccaatgaaaatctggattagatggccatggtagctgcctaaactcatggaccaagggcaccaacacatgcaactggaccggcatcgtctgcagcacaagtgatgatgccccaggtattctcagtatttcgcttaactcgtgtggcatctccggcaatttggacgggttctggtttgcagaattcccccatcttcaaggactcgacctcggaaacaactctatctctgggcctatcccatcaagcataggtcgtcttgtcgacctctttgatttggatttgtccagcaataggttttctggatccatcccaacaccttaggtaatcttacagtgctaacctctcttgatctctcttccaatttgttgtcacaagggctatctgattcaggaattggcacactagacatcttggaggtcctcgatataagcaaaaacaaattaaccggctcaataccttatagcttgggaaacttgtccacgttgtattttctagaccttagcttcaataagttttctggtcatattcctcatgagctagggatgcttcaaagattgatatccttgtatctatttagaaatgaaatcacgggttccattcctaatgagctagggatgcttcaagatttagtatcgttggatctatccaataatagaatcaccggtttcattcctaacttaggaaatctaacaagcttagtgtcattggttctatccgataatagaatcgccggtttcattcctaacttaggaaatctaacaagtttagtgtcattggttctctccagcaaccaaatcacaggttccattccttgaaccttacggaaattgaccaatatatagcaatactgggatttgagctagtccaatgagtcaagtggtgtactctaaagaaaaaaaatctaattaatttaaccacctaaaatagcttttccttttcctttttgggatttatcaccctaaactacaattcataaatcccaacaaggaaaaaaactattttacgtgggtatattagacttttttctttagagtacaccacttaactcattggactagcgtccaagtagcccaagttccatatatagtagaatgtggttttagtaacccctgtgataaacgaaaaaaaaggatgattcaaagtttagtgacgttggatcttgcataaaatgtaatcagcacatttttagggtataattgtttcacagaacaccatgttttgagcccagttgattataaaaagaaaaccgaaatccgatatcctgccgccctgcctttagctgacatacggaccccaccagtcagcttcaagtctctcttccttcctcctcttgttagatgggctgggcattgcagagatcgccgccgatttgcacctgattcagtgcccattcttcagatttaacaatggaaggaaagagcagatctgcgactccgctacaaaattttggtaagggaaggtggtagcggcgatggaggagctcgtcaaaccaaatgcttcatcttcgtcgtgatgccacatcactgtcaaagaggctgtcaagtaaaatgggcaggaatggctggctctggctgcctccaaatccaataaaaaagagtgatgaccttgattgtgatctcaagtctatagatgtaattgatctctcttttccttctctttacctcctgaaaatctgatgtaatcgtgtccatgcattcgtgtgtaatcttatatacttatgttgtaccaaagtactccccccgtttcatattataagtcgtttgacttttttcctcagtaaaaattatttaggattgattaagtttacagaaaatttagcaatgtctatgatatcaaattagttttattaaatttattattgaatatattttgatacaatgtttgttttgtattgaatattactatattttgctacaaatttagttaaatttaaagaagtttgaattaaaaaaaatcaaacgacttgtaatatgaaatggagagagtacaacaatttgaagcaatagttttggttccctagctacatgagcacagcgccgcctgccttagagcaggtacaatagcaggctattagccagctataaacatattataatgagataaacgataagagagaagagcagcgggctataaatctgtagccagctgcagcacggactccaagacacactgtgtgtatgataagtgggaccatatattaataatatagtaagcaactattgtatgaattaactattagattggctatacatgaattgaagctagtagtgggctatactattagacttgctcttatgtcaattgccaagtctcgtctgaattccattgcttggctggtaagagggaaaaggtaaatatatcatatatgtgaggctggctggtggggccgtatgtcagatgatggcgcgcagcctgcaggcagaaaagggtaacggattttggttttcttgagttggtcgattgggctcaaaatatggtgtttcatgcaacaattactaccctaaaatctgttattttgggatagttttgccctcaaatcgtacggtgggacttgagtcccatcagatgatttacgtgcactgtcatcaaagtaggtttatttttcccacataattattctagcaccacaggtagcatttcacctcagagatataggacaatgtcagaatttgatttacctccacctttcaagaattttattttcctaagaatatcaggtaacttagggtgtgtttgagaagaaaggattgggaagattggtaagatacgcaaaacgaggtgagccattagcacatgattaattgagtattagctattttaaacttcaaaaatggattaatatgattttttaaagcaacttttctatagaaatttttttaaaaaaacacactgttcggtagtttgggaaacgtgcgcgcggaaaacgagatgattttctctctcaattccccagattgcctaggaacgaacgaagccttagtaactataacaggtccaaatgtccaatactgcacgagagcttgatcattgtattaacctgtatgaactatgaactcagatcggagatagtatcagagcatcaccaacataatagcaataatctatccgcaaaatttgacttttgggtctcctaaactaaaaataggaaatgaaaaaaacttctcccttcaaaagaaagcctaaattctatttctaaaaactaaaagtgggcatttctattaaactacaaacaaaaatttccattttcttccttccccccacgcagaaagagatcgcacccacacgcgggaatgggaggagagaggcggggagcgcatgattaggagctatgccaccggtcagacaaaatatatatagtgagtgtgggttattttcaaatctagtcaatatttcctattttctatcttagataccaaatttatgtgtcaacattttggtgggctatggcctgggtgagctagtctagctgagcaagatctatccaaaggtccaaacgtaccctaagaatctgtccataccttaaaaatccttgaaaacaaaattttgaggatagattgttgggcattattaatgatgttcttgttaatttgccgccgtggtaaacgttcttgttattttgatacccaaagttagcagtccctctgaacttttgccaatttctcctctctttttttttagaattttttttccaatttctcctcgtcctattttcattttcgttttcaatcttttagtctcaggctctcagcacctgcacagccaagcctaatccttttctctctctctctctctctctaatctctccagggtcgatcgaaggaatgagggaggctgggctggccggccataccaccttcttccccatcttcgtcgtcgcgccggcgccaccgccggcggcccaccatcacctaacacctgtgtcgctactgttgccctacctgaagaatggggatcttctactacaagtacccagattcttgaagggcgggaaggattcgccaactcagagagtcagagtactgaatcttgccatggttcagttatcccaatggtgaatcattttttttttaaaaaaaaagaggtactattcccctctatttgctgctactaagccctgacaggattcttgtgcgattctgctttcgtattcagtttgcctgattggcgtttctctggattttgcttatattccacactgcctagagcttagcattttggtaaaaataataaaaagagcttatcctagttcagtcacatatcagcattggcgttgttttcttcattcccaaaacacaaaagctatacgtacccgagggaggttggatacatacatatatatatatatatatat

SEQ ID NO: 16580 - DNA, 1417 bp, Oryza sativa
  unsure (1)..(1417): unsure at all n locations
aggagtttagctgctttctanatacctggacannggatactttggggtatcattacgaaattgttactgacgcagcaacgttgtagggctagccgggcagcggcatttttttcccgattgcagtaaatgcaagtgacgagatcgaggcaaacatgagccggaactcttatcttttcgctatgcttatactccctccgtacttagagaggcgtttagaacaatgtttaagtcaaatcttaagaatataaatcatgaataactcttaagttgttgagtttgaaaatataaaaattatatgtatagatttgtcttgaaaaatactctcataaaagtatacatatatcacttttcaataaatacttttatagaaataagaaatcaaagttgtgttttggagactgtgtcgctgtcctaaacgacttcctttacgagtatggagggagtacttatcaaccaaaatttaaattttcaaccttaaatttaaagatgtttttaaagtttttttattgaagtttattttttcagcctttgcttttagatcgctaagaatacatatataaaagttctatttacaaattactactttcttcatttcacagcatcaatatggatgtgagaaatgttagaatgacttacatcattttacaaatatagcgtttgggggggccgctggattctggaagtaaccgaagaatgatcaagggaaaactcgtcaagttcttggcactggtcagagtgaaattgcgaaatactatccccctgataatgcgattactagatttcctgataattacccggacggggcaagccgtgtcagggaattcggtttgtgcttccaaggcacgaaacggggtgaagtgaacagagcggcacgtcggggcgacaagggcccccccgttcagtttcagtggcacaaaccgacgcgacgcgtgttcgcataacccaccgcattccgcggccgtgcaaaaagtgtgaacggtgaacctctcccctggccccggggccccaccccccaatcatcttctcctggccttcagcctccagctgatgccaactgccatgtcagcaactaacgcgctcgcttccttcccgcctcgcctcaacgcaaagcgagatccccccctatacctattaatacctcatcttgtcgtctcgtatcatctcatctcatcacatcagcacacatcacacgcgccgattccgaagaaatcaatcaaccaactactagggaaagcaagagcggatcgggtgctgcatttcgcggtcgttttcttcctctgaattctggtgtttgcggttacgaaaatggcgttggtggcggcagcggcggcgaatccgaagcagaaacagaagcagcagaaggcgtggggatcctctagagtcggcctgcaggcgagcnagatatgcatcttcagcg

SEQ ID NO: 16581 - DNA, 2540 bp, Oryza sativa
  unsure (1)..(2540): unsure at all n locations
atagagactatactaaacttgagagatgaatgaagcttcttgcttgaggtgtgtcttgaaatggagaatgaagctccttttatagcctcctaatgacggttgtgacggttggaatggtcggaaataccctccaactgtcattgggagctaatctacaccgcccaggcaaagccctagatcaaacggctgcgagggggattcggccgaaccaggttttggctggtggcctcctctcttgctcccatatgccgacttgtgaattttggcctaattggtcgtgtcatttctgagttcttggcctattcattgataaatctgattctcgacattgtccgattgattgatcgtctattttgatgttgattctccttcattttatgttcattctctgcaagaggttagtaatcctaatgctagtggaatatttattaattaaacacaaatatgcattacaaccatggctagttctcttttatttggatagtattgaccggcaaaactgatcactaacgaccgtcaacaccattttgaacaaccatggaacatattccatctatggttccgtagagttccagattgtcgttccaaaaaattaagctaggaacacgttccacctatagttccgaaattttggaagaggtatactcctctagttccatgcttttggaaaatggcatccaacgttccacgttccagttcctcgttccatcgatccatgaacttttgagacttaggtttagccaaaatttggatgaaacaaacttgtaatgttgattattcaacctagtagtcatgctgcctattgggaccataccttgaccaaatatgctctaccgaatctttcttcaaagcgtagtgcgtacctcgatcttgtacacgttgatcatgttggaggactgatgtcggatggggtcccgatcttctgataggtaatttatcttcccataaccagaaaaaaaaaatcattcatcctttgagtatgttttcagagtgcagagttgtgcattgattcatatctagtccttactgttgtcaggtgcttacttgagctagagttgagtctaggctaggccagcacattgactagtactttgaactattattcaattttgcattttttgattagcacaattgtgttcctctgctactatatattgtgcctcccaagctccacatatatacttctggtgagcaccactttgatccttgcaatcgccacatcacgtccttcaaggtgtcacaaaccagccaccggatgtaccgtccttagcactgctggtaaggcacttgtaagagcttgataaggtgctccatttggctgagttgttgagaggcaccactacaccacatagcagattattagggataaccttcactgtttgttgttgtttttgtgtttgcaatcacatgtatgggtggcgctcaaaatcagcgataccaacaaggtgacaataatcgcgtgcccgatgatccttattctaaggttaagtttaaaataccatccttttcgggttattatgatgctgagaaatactttgattgggatatgacagtagagcaaaagtttagtgcccaccttgtgcctgagcaacatagagttcgacaagccagtagtgagttcaaagagtttgcttatatttggtggtctgggttagctgtagagagagctttacctactacttggaaagaacttaaggtagctatacgtgatagatttgttccaccatcttatcttagagaattaagcaagaaactgatgcgtttagaagaagggaataaatctgtacaggattactatggtgagctacaaaagggattgatgcgatgtagcatagtggatggaactaaggattccatttgtcgcttttacatgggattgaggcgcgagattcaggacatagtagataataaggaatttaacactgtcaaccagttgtttcagtttgctatgcttgcagagaaggaattgcaggggcgtaatcaacaagtcaagaacaaggcgagcatgtacacgctgcgggcgaagccatcttcggggctgcccaagcccatctctttctggacgaccccactagcgagcaagcgaccaattgcacccggagtttctgcagcgccaaaaccacctcacccacgacctgcagattcaggtaaaggttcttcgcaggtatccaataagagtgcctcatctgtcacttcgacgggacgcacgcccaggattcagtgccaccgctgccatggatttggccatgtgtagaaggtttgcctaagtcaacgggcatacgttgctacggaagatggctacaccagcacctccgacgttgaagatgatgaggaggaagagaagaaagacgaagagaaaaaaacctatctatagctccatgcatgcttgaagaatgttcaattggacaagcacctataatttgtgaagatgagaataaatgtaatgataatggtgctacaactaatcaaggtatgcatatttatgatgtaccaactatatccagtncttgtgcggcggtcaagagtaggatgtcagcccc

SEQ ID NO: 16582 - DNA, 3435 bp, Oryza sativa
  unsure (1)..(3435): unsure at all n locations
ccccccgctttattgagactacttttttattcttgtataactcctttacttactatgtttatattgttctttaaacgctcaatcgttcaaaaaccacaaacccccccgcggtttgaattgactggcaccttggcannncncccgcagaatagagttcagcctttttttttttggcaaatatagtagtacgtattttttttccctacttctatgtaaacgtacgggagtgtttttttttttgtaatgtacgggagttaggaggaagggatttgccttcttagatctaatttaatggtctaaaataatgggtcgccgatttaagtaaaaattgacggttagatattttctttgtatttaaaattgtagaactttttagagatatgacatgtggcgatctaggagtgtttgtaggagtgccacatggtgatttaaaaacgtttatagaaagttatagatggtgctgccgccggggagagcaaggccaagaaattcctgaagagggcgttgtcgttcacgggtagctcgtcattggggagtgcgatggtggggatcctgtggcctcggacggagtcgtgcacggcggagcagggatcccgacgtccgacggcggcgcagcgagggcgcttaaattataatgagatggagactgggctcctaccccgcgcgtgcgcgggtgattaaatcgcgcgcgggatccgcagcgcggagtcgcttttcattttttctgttttcctttcgcttttctctaagaaaaaaaaataacctttagcacgaagaaaaaaaaaacctttagcacgttttatttcttttttttttttaaggataggacgcggaaaattaggataggtacggagggttaactgcaacaaacttttaaatttaagatttaaaactcttaactcaagatttgaaacttttaacttaaattttaaaaaaattctaagtcaagatttgaaaacttttaatagaactactattaggagtgcagcgcgctcctaatattccaagcgccaaatattcatcagcccaggctcaccccaccccacgtcccgtcatccaactcctaccgttgtcggagtaaacgatttactcctatcgtgcgcctcaaacatccacctttattcgagtaaacgatttacttcgataataaaaacaactcccctgcttccgatcccaccccacgtcccacatcgtgcacccaccattatcggagtaaatgatttactatgataaaaacaacttccggtatatattctatttttcccgtacccaaccaaccactctcgtccccactctattttttacttttttttcggatctgaatcgatccactatcctagcccacagatcggcgacacaccatggagaaggacgacgacaccgtggcggttgatgacggtggccggcgagcggtggccggcggcggttgaggcaaaggcactacttcgagcctcgctgccagacgctaggcagcaccataaccagcaaggaggtgttcacctgagccaatagcaacaaccagcggctgctccatgtcggcgacattgatagaacaagcaagtaaggaaatggcactctgatttgcatctgcatactctccttcaacttcacgcatgaagccctaattttttttgcaaatcaaattaacatgcaatctccaatatcacctgatctcaattgatgggttgcacaagtcctacatttgcacatcgtgctccatgtggctggccgtagaggatagggtggagtccaccggtgatggagattgtttgctatttttcttttgctcgtcatctgtattgacatgaacgagaatgtttttgcatttttttgtgcttgttagatgatggatggctgctattgcgcaacgtcaagctcatctctatactacaccgctacatccttccatgatggatttttggctgaatcattttttttcttttctagtttgattcacctgtgagtaattttatcgcttgtgtgtgattgagcctataattttttcattcatacgactattttgtgatacagatcaacaatactcttagtatcagtttttacactaatactatatattgaatacatcagtaaacatattactacacagtggctatgagatcatggctatatcgagaggaagatggtaattgttttactcgcagaccacgaaatctaaataatattggtaaaagaagtactagagttgtaagctggtagtaattcttttacgaccatttacgtatggcatcatacgatgtagagacattcatgcgaataaatttgttactttagaataagcagatgtgggaggctgggagtaaatgaaaaactccatgagtaaattcgttacttttgaaacgtgcggagatattagaaaaacggaaaacttggaaagaaaaattagacagtaaatattttactaaaacgcgaaaacagaaaaactttagagaaggaatgaataacagaaaaatctggatagttaatattttaccgggcccattgatgaagcacagataagacggtaaagagaaaaaagaaacccggaaggtggggtggtaaaaaccgaaaaaaacaacccgagaaaaagtgggatgcgaaggacaggtggggtggtaaaaaaggggaaacccgaaagaagaagccggtgtgcggcgctcgaattattattccgcgctgtagcgcgtggaatagcgctaccaaacttttaactcaaatttaaaaactctcacatcaaaattcaaaacattcgatttaaatttgaaaactttcataccaaatttaaaacatgcaacttaaatttaaaaactttcaactcaaattcaaatctctcaactgatattgaaggtgaaagattcaatttacaaaatatcgcaaagaaaattgcatgtgtgtgtggagaaaaaagggagtgatttccaagaaaaaaaagagaaactagtgcctatttcccaaaaaaaaaaggggggaggactagcgccgtgactgttgacagtgtccgtgctgccaatgcgtacgcgctaattagcaaattcactaggattgagggctgagaggtgggatttaggtgtcttcctattttgagggtttagtgctggttttgttggatcttgattttttcctcttcacccaaaaattatttggggtttaatttatgtgccctgcaggacatgcaaaagttagattttgtttgcgtagctttttcttttttttagataatagaagctttattgatcttagtcatccaaggatactcccggcctctgcaccacgacagtgcacacagccaacaaactccaacacactcaaaataaaagagaataaaaacagcgtgcaagatcaaggccctacaacccgaagactaggtcgccacccataggggatcctctagagtcgncctgcnggaatgcggactacagtntgttcatccaaggccat

SEQ ID NO: 16583 - DNA, 5268 bp, Oryza sativa
  unsure (1)..(5268): unsure at all n locations
agacagtgcacttcgnnctcgaacagaggcagcaacattaatgaagcaagtggttaatcatgcattttcttacccgcataaacactcgtttaattgttcattttctttatggcagcacaaattaaatcttaaaaaaatatagatttgggaaaggcggaaaaaaaaacccacttccctgtcctatttgcatccttaattaagaggacagctataccttctatcaaagtcaatagatagtgtttggttgtttgctactctctccgttttatagtgtaagtcattcagcattgtccacatttatatagttgttaatgaatctatatatatacatatgtctaaattcattaatatctaaatgaatatggataaggctagaatgccttatattatgaaacggagggagtactatagatgatgacttgcaagtctcttaagtttcgaaagaaataatcacgcaattctgtgtttgactgtttgctactccctccatttcacaatgtaagtcattctagcattttccacatttatattgatgttaatgaatctagacatatatatctatctaaatttattaacattaatataaatatgggaaatgctacaatgacttatattgtgaaacggaggaagtactatagatgacgactagcaagtctcttaagtttcgaaagaaataatagcgcaattccgcgtttcaaaaaataggacacatgcatttgtacagtttttttccttaattcctaaggctatgtctttgtacagtttttcctcttacttaatgcaagtacaccttgccggatttaaaaaaaactccgcgtttcaacaacttgatatattgactcatgcaagcacacgtctttgatcatattgtacgactgcagtttataattaaaaattcaccatgaaactgacaactttaccccttttttagctttttcctggaataaaacagagaaccactttaaaatcattaggtacttatatcctatccataatctatcactggtggagaaaccctttgtagtcccggttcgtaaccccctttagtcccggtttccaaaccgggagtaccaatccgggactaaagatcgctatctttagtcccgggtgaaataaccgggagtaaagatcgatctttagtcccggttggtagatggctcagccacgtggccggttgagccatctttagtcccggttggtgttaccaaccgggactaaagatagagctgaccttttttttttgcatgcccctcttgctgcatggtttatatatatatatatatataacccatgcatatatatgtttcaatacatatatatgcatacatatatatatgtatttatacatatatatgttatgcaaatgcatatgtatatagatatatatatgaacaaaatatatttacattatagaaaatgtgtacacatgcatatagaaacatatgtagtcatgtattaattacaatccattatatgtcctagctagctacgatttcgacgtagtagtactcgctgctagctcagaagctaaggaccggtgaattgtgtttccgtcgtagtagaattcacccttgggatcaaggatttcttcgttgatgaatcccatgagttgttcttgaaccaccgcgataaattccttgtgtgtggtcaggttatccctcatgcgaataaactatatgaatgtatgaaattgattagtaattaaacaagaaatcgctacgtaatgaaattttgaatttatttgtacgtacatcgagctctcttgtggtgatgatttggtctgcaaggcagtggcaatactcgcacatgtaatagccgcacaagttagttccctgcttttgctttgcgcactacaaataaatgacaaacaacgagagatctaattaatatacacttgtatgtatttgaatcggagaaatataaatgtagagcatgtgtactcacaggaaatttgaacttccgcctaagtctttctctccatttgccgcggaccaaatgacggaaccgataccaagccctacatggagtttaaagctatgattcgtagtagcaattaacataacaagattttcttaattaacaaaggaacttatgacggtacctgtctataagttcgaaaaccttgtcaaacgtagactcttttttatccattgagtcatatacgttgacggtgcaggcctccaggtcgatgagtaaaaacacccagtggaatctgcaatgtgcgtgggatgcattacatatgaaacacttagcaagttcgtacgggaatgaaatttggtatgtaggaagacagtaaaattaaactaactctgtgttgtatggcaacagtatgaacgtcttgtaatgctgcgccttcaggagatggatgagattgtcctctgtttcttgtggatattggtcgagcattgcgacgtttactttccgagggtcgatgaatccagtatcgaaaaccctccgccgtcgggccctttgaatctccattctacaacgataaaagggagtatattattttctatggtctacttatatacaaggacctaattaattaaaggagacgtatagtaagaaatctaactgaacgatatacttacaaaatccagcaactcataatagagacgtcgagggcgtccagctggtatagttcgtagattcccctgaaattgatccagagaatgtcatctccttgcaagaagtccgtgtccctgatcctcgctccgatcatctctctaccggtggcgctcatctccatgtacagctgatggaacttgtacatttgtgtgggtagggactgcagcagctcaggcttgacaagcggtttaccgagttcgtacatgtatttcacttccgccttttcgattggtgcgactcctagcaattgatccgtagttagaccggtgtcagtaataaattgttctatcgtcatttctttaccggtcaccaacggctcgatctcctggtttggttgctctccaagctgagggactggtttggactttccagaagatgctttcttcagcgttcgctcatagtccgatagcttgatggcctccttgacagatgcagacatacccctgaagaagttcctgacactggggtctataggaatcttcttttctggacttcgaggcttgaattgtctcttgacttctgatgcaacgtaagcgtcaagctcctcttgcgtgcaatcgtaccccgggtccttgttcttggcggcgtcaactttcgccttctttgttgcccttatgtgggcaagcggtggagctgggggggcccttgactttgaaggtgccggaagaggagcttgcgggggagtaggtgtaggagcacgaggaggagtcggtgcaggatcctgaggagtagatgctggagcctgaggtggagacggtgctggcggagcatgaggaggagacggtgcaggatcctgaggaggagatggcggagccggaggagatggtgcacgagacgccgcttgtcgcccagggaggatgatgtaccgcctgcgccatagaataatggcatggcatgtgtctcgtagatgcatctcaccgtctcctccagggtaatccagctcgaggtcctcgtacgcgccctcgaccaactcaacttcgaccttggagtatcctgctggaatcggcctgcagtggtaagtacctgaagggtccgttgggatggccatgcccgacgccaccttcatgttgtgagagattatttattagtaatcaacatatataagcagcaactagcggaatggctaaatcttacctttattgataagttcttcaaaggaatatgcagctcacatggtgtccgctgagtgatgtcatcaacgggacaggtcgattcgtcctgtgtttgcatggcgtccatgctctgtgatcctacctgccccgttgaggcgcagctgctacggtttcctgacgggctcaccattgcaggaggaatggtcggctggggatcatgggaccgatgtgcggccatgcgttcatcaaccttccttgccacctcctcttgcatgttgagttcgtagctcgatacccggaactctaggtctgcaatcttcgcctcggtatctctcttgctcctcatccgactcctgtacgtgtggatgtcctccttgaaaccaatcttccaaggaatcacccctttccctcgagttcgtcctggatgctctggagtctgcagggcgagtgtcagctcgtccctatctctgtctggtcggaacgtgccctgagaggaggcttccactgcatctgttagtcgtcgcgcagcctcttgtatctgatagccgaagaccagtgagccatcagctgggttgagcgttccaccgtgagcatagtaccagaacttcgatcgttccggccaattggctgttgccggttcgatacccctctcaatcaagctagcctccatctgctcccacttcggcatcgcgacgctatagcctcctgaccccaagtggtgatggtacttcttcttggcggcattttctttgtttctttccatcatcgccttcccttgttcacctgtcttatatgcaacgaactcgtcccagtgatcccttagctttgggaatgtgtcgaagttcggtgtctgccccttcagtatataccttctggtacagatctcccttgaagctctgaaactgttctgccattttcttcagagtccaccttttcactttgtcctctgtacccccaggaagggtgaatgtctcgagcattgtggtccacagcatctctttctccgaatttgggacaaagctctcatgatctccgcgtgcccttaatatttgccagtacaccgtactgacaggcacattatcccgcacaacccaaccgctgtgacgtacatagttcttggcggcttaggacggggcactagacgtccatatttttacctttccgtattgatgggcgaccctcaagcttggatgcctggcaggtcgactcttagagaatcccggggccccgagctgaaattcgcctctagcgagagcgtatatacaaattttataaacatgtggcccccccgtcagtattttttattatccaaaaaaaccgctctcgtcttatggtaaaaacactttgtgtgggggtggggggtaaaaaataaaaaaaaaatctccccctcccgcccctggggaaccaattaatggctgtgggaaattcctcttttacagctggtgtaataacaaaaaaggcccccaccataccgccctgtgatccctgaccccaaatttccccccctatagggggggttttaaaaaaa

SEQ ID NO: 16584 - DNA, 6700 bp, Oryza sativa
  unsure (1)..(6700): unsure at all n locations
cagagtggctttgcaccctgctctgnacccatatatatatatatatatatatatatatatatatatatatatatatatatatatatatatatatatatatagccattgctggctgctagcctattgctgcaccctcctagtctaaaattcgaaatttgaatggggtgctgtcctagagggcatccaaactgaataaagcataaaggaggcataaaggagatgctaactgctgctgtcctactaaccgcagctgtcctagcaactgaaaaatatgctaaagggtagatgctgtcctgaaaaaggtgaaactacccaaaagcaaaaagaagaatcacgaccaaggaccacaaagacttatccaacattctccccctaagtcttgtgcgtcgtcttgtgggcaagttgggccatcccgatcctggagcagagctcgaggaacttgatcctcccaagaggcttggtgagcaagtccgcaagctggtccttggtattgatgtagctcgccttgatgctcccttcctccaagtagcttcggatgaagtggtacctcacccggatgtgcttgctccgttcgtgaaaaacggggttctttgccagggccagagcggacttgctatccaccctgagctccaccgttccagtgtctctgccggggagatcactaagcagtcgagcaagccagagcgcctgggtcgaagcggcggaggccgctatgtactcggccttgtagctggacagggccaccacttgctgcttgtccgactgccagctaacgaggcacttgccgaggaagaagagaatcctgctcgtgctcttgttggtgtcgatgtcgccggcgtggtcgttgtcgctgtacccgacgaagtgtgccttgccaggacaccttgggtagtagagaccgtggtcgagagtccccgcaatgtagcggatgatcctcttcacagcctgctggtgctccatcgtcggtcgctgcatgaaccgactgacgtagccgacggagaaggccaagtccggccgtgtgtgggtgaggtagcgaaggctccccacaagacaccggtactgtgtagcatccacctcctccgctgtgctgtcgcggctcagcttcagtctctcctccatcggagtgagagctgggttgcaatcggtgagcccagccagctcaacgacgcgcttggcgtaggcggtctgtcgaagcgtgatctcggagtcgtcctggtgcacttcgatccccaggtagaaggagagaggccccagatcactcatctggaaggtggccttcatctcctccttgaacgccgcgacctctgcatccttggtgccggcgatcaccaagtcgtcgacgtagacacccaccagcaaggcatttcctccattgccccgctagtagatggccgcctcgtgcgggctttgctcgaagcccatccctttgagcgtggaatccaacttggcattccacgccctcggtgcctgccgcaagccgtagagggccttgtgcaggcgtagcaccttgccctccttgccggggatcacaaatcccggcggctggtgcacgtagacctcctccttcaagttgtcgttcagaaacgccgacttgacgtccatgtgatggacgccccagccttcctgatcagccagcgcaagaaggagtcacacggactccatccgtgccacgggagcgaaggcatcgtcgtagtcgatcccctcctgctgcacgaaaccgcgtgccaccaagcgagccttgtgcttgacgatggctccggcttcatccctcttcagcttgaacacccacttaagggtgatcgcgcggtgaccacgagggaggtcagcaagctcccaggtgcggttctcctgaaccgcgtccatctccgactgcatcgcggcacgccatgccgcgtgtttctcggcctctgcaaaagaccgaggctcaccgtcgttgcacgcaaggtgcaactgcgcctctaggtcgcgaggcaccggcaccggctggtcgccgagaagatcctccatcgtacggtaccgtagctgctcgccgtcgtggtacgcgtcgatgcgctccccgtcgtgggagagcggagtagcgaactccaccgggctgcgctcaacacgagctggcgtcggagtagacgtgcttggaggagtggctgttggtgctggagcatgtggagtcactggctggggtggtgtcaacgaagagctcgtcgtagtcgaagtcgtggcccgagggtgtgttggtgtcggagtcggtggggattcgggggctggggtagacacgctcggtgaagaagagctacctactcccccagctccctcgaagtagacgtactcgacggtgaagtcgtcgtacgtcggagtcgaaccatcgtccaccgccttgtcccatacccaccctcgcccttcgtcgaacacaacatcgcgcgcagtgcgcacacgctgtgtctccgggtcgaggatgcggaaggccttcgagcccttcgcgtagccgatgaacacccttggggtgctcctgtcgtcgagcttgccgatgtggccaagctccttggcgaacgcgaggcagctgaagacccgtaggtgggagaccgccggcttgcgcccatgccaaacctcgtacggtgtcctaccatcgagggccttggtaggcgagcggttgaggatgtaggcagccgtcaccaccgtctccccccagaagatggccggcatccccctctgcttgaggagggcccgagccatccccacaaccgtctggttgcgccgctcgacgacgccgttctgctgcgggctatacggcatggtgtagtggcgctgaatgccctcatcagcgcagtacgacgtgaattcagccgctgtgaattcgccgccgttgtcggtgcgcagcacgcgcagcttgcggccgcactccacctctgcagcagcctgcgcatgcctgatggcgtccgcagcctctcccttgctgccgaggaccatcacccacatgtagcgggagaggtcgtcaacgagcagcaggaagtaacatcgtcctcctggtgtggccggtgtcactgggccacacaagtccccgtgcatgagctcgagccgttccttggctcggaagctcgtctgctggggaaaggggagccgccgctgcttcgtcaccacgcagacgtcgcagagctgctccacatggtcaaggcacggcatgcctcgcaccatctccttggcactgagctgcttcagggcctcgaagtggaggtgcccgaagcgctcgtgccactgccacgcctcgtcgtcccgacgagcggcgaggcaaactggttgtgcgacctgcgcgctgaggatgtagagtcgattagtgcctccggttaccttggcaagaaggcgacgacggcgatcccaaatcctcatgagtccgtcctcaaccaacacgcgtgagccgttctcattcagctgtcccacgctgatgatagaattcctcaacgtggggatgtagtagactccggtgagcagcctatgctcaccggacttggcggtgaaggtgacggagccaacacccttgatctccacgccggaggcgttcccgaacttgacggagcctcggacgctggagtcgaactcggtgaagaactcccgtcggccggtcatgtgatgggtggcgccggtgtcgaggtaccacccatcagccttgtcgttgctggagccgttgcagagggagacgagtaccttcggctcatcaaggtggaggaaagccgctgcggccggtgccgctggaggtagttcgatgcttgcgtgagccaagagcagagccggctttttctcctccacccgtgcgacgtgggcctggccgcgtcgtggctgtcgacagtctttggcccaatggccaagcttgccacagttgcggcaggcgtcgtcttgtgccggcttgtggttgccggtggcaacgccctgggcgcctctgcgggcgccaccctcggcacgttttcgcgcccaccgtagctggacaccttcccgcaccttgcgcggcttacggccgcctgtcgaggaagatgactcccccttcctcccgtcaccctgagaggcctcccactgctcccgagtgagatggagcttcccgccaatggtgatgggccccgagagaggctgtggctcattaccatcgacgaccttgaggcgacctaacgcctcctcgagcgacatcgtggagaggtccagcagagattcgatcgagcgagcgatctgcctgtacttctcagggacgcagcggaagagcttctcgacagctctctcctcgtagtaggtgtcgtcgccgtactgcaccattttctgcaagagagtcttgagacggagagcaaagtcatcaatatcctcacctggcttgaaggccaggttctcccactccttgcggagtgcctgcagtgtggacttgcgggcgcggtcgttgctgatgcgtgccgcagcgatggcgtcctaggcctccttggcagtccgcttctgggaaagcgagaactgcatctcgggcgggactgcagcgatgagggcatccagtgcccgccgatcctcgtcgtagtcgacgtcgccgtaccggactgcctcccacatgtgccgcacctggagcctcaccctcatcaccgcggcccactcgatgtagttggttttggtgagggtaggccacccaccgccgggaccaaagtccctgaccaccgtctggacgccgtggtgaccatggcgcaggtcaagggagagagagccgcgctgcctgcgaggggcgcgtgcgggctccgggctgccgctggcacgcccgcgcccgtctgggttcccgtcggcgggcgcgcggtcccttgggccgccgccgccgccgtggaggtgggctgctgcccaccgctctgcccgctcccgtgcccttcctcttgccagctcctcaagctccctgtcggcggtgatgtcaccggcgatggagccgttgatgctgctacgcaaggtctcaacctctacctccgccgcacgtgccgcatcttccgccgcctccgcctccgccctggctgctgccaactccgctgccgccagtctggccgccctcgctactgctacagcggtctgagccgttgctcgcctgcgctcttctgctgcagcgagctcggcgtcctgctgacgccgagtgctcgaggcgaccgaactccgagaccgagcgtcggacatggcgcacctccggggggctgctgcgtggaggggggaaagggaaaggggaaggaggagcaaccggtgctgctgctgctgctggctgagagctcaaccgagcttgggaaggggtggaacaagagatgtttagcctacaggaaagtgtggctctgataccagatgttagaatttcaatggttactctcattgaaaagaggatggcactcgagatggggcaattttctggttttcttcattcacaaaacacaaaagccatacctacccgagagaggttggatacatatatatatagccatagctggctgctagcctattgctgcaccctcctagtctaaaattcgaaatttgaatggggtgctgtcctagagggcatccaaactgaataaagcataaaggaggcataaagaagatgctaactgctgctgtcctactaaccgcagctgtcctagcaactgaaaaatatgctaaagggtagatgctgtcctgaaaaaggtgaaactacccaaaagcaaaaagaaaaatcacgaccaaggaccacaaagacttatccaacacaccagcagtgctgtcaggaggccgacggctaggtgagctagcacaacctggtgcggccggccacatggctttccgggtgtgaatcaagatctggatctggaaaaaggagacacttgccttgcggcgaaaggtggttttcacaacctgaaaggagagcagagatgatgggcgatgggaaggggttggggcagtggaagtatggggtggtaggatggatgtggaggcctnntttctctccccttccttgccgttatcgccgccccctgggtttggtctttgttgtcaggctttggtgtccgtgccatcctctcgaagctaaattccctccttgacataataaaagtccctatctgatgggggttaatgcttattattatagagcgcgcttgatcccattttcatataaagaatgctgtctgcatacctccaaattctctattcgccacttctcacctacttcaaactacttggtaatctttcgcatgccaagaaaaacaatacatcgacccttgtcatcttttcttaaacaaattataactacctttcgcgtcaaaaacagataaacgctaccactgtttcacttatccaatctcaatgcccacgtctcaatcctcccttattaaaaatatcactaaccctccgtgctttcctctttcaataatatggacttcgctagctccctctatcacttctatcaatatctcaaaatatgccgctgctagttagctctctcaccatagcctccaataccgtctcgtctgcttcttttcatcaacaattattactaanccgcggctgtttcttctgctatatatcttacataaatcgctcaattttcgcggacgcctctgttaacctaccgaaaatagactacctactatcgttcgcgctgactataatgttcaatacatgacatcaacacactatgtaccatcgtttaactacatagcttttatatcttgcgtcgactccacggccc

SEQ ID NO: 16585 - DNA, 2627 bp, Oryza sativa
  unsure (1)..(2627): unsure at all n locations
gacgaagagggatagaaaaacatagtgaaaaggtagggtccgatgtccgtgaggaaaagtaacggtaggatggggcgaggcgagcagggtggatatgggcacgttcccagatagtggaacgcataagagattagatcgcaaaggcaaacacggttaagtagaggtcaccgggcgaaaatttagggtcaggtggggccgacggcagaataaggatggacctggaagcgtcgcatgggaaggtatcgataccaggcgctgtcacccagcagtaccgttgggcacaatgcggcacgggcagggcccttgatcagggaggggcctcctcctccccctccccctccacggcggtggcggcgcccgtctacgcccccacgccgcgggaccgggccctgcggacgccgcacagcgggtaagccgtcgcccggagactgatcatcataccctcgattctgattcagaaatgtaggattcagtttggattcctgctttagctcggattcttcggcaatccttttaacatcatgcatgtttgagattcagtatgcctaattgaaatgatgtgatgggatgatgctgtcaggtatcactatgacggcacggcgaggcccttttttgagggatggaacttcaaggtgtccattcccgagtgcaggcagagcttctgcttcatgtacttttgcttaaaaccctttgtttcgagatgggatgagtgatctggaatcggttcatacatggatcgcgcttcactggcgtcggggcacacattcttggcgcctttgataagtacatatgccagttcaccgagaaattcaataacttttggggaagtaagctacttttttagatccagtctttttcacattcaccctcaaagacatttcatttaggatatttttatttccattcaatggtgaaaggaatacatatttgcgctaacaatcagctttttgttctgcgcaaaatcctaaccggctgactgtaagatatttaataaagcaagaatagaagaaaggttattaccaactagttcaaaacaataccaccaaccgccctgaaatcatagccgctctttcatggttacctgaactcaacgaacttgttgcatttcccttccatccttcttgtctggtgcagattgatgaaaagaagcttgtcacagagctttattctgaaccatcacctgaatttgcaacggaaaaggttgcttagtacgatgcaagtatgcaacatgtcctctttcacgcacctttagaatttctaatcagcctttttgagatgagacctaatcaactattttgtaaaagcaagctttcttcatattagagattgatttgaggaaataaatttgtgaaaaaaatatgtttataacaacagggaattatattgtgaaaaatatgttgataacaacaggggcttatattagaaagaccttgtggtctagttctcgaaaaagatatagatgtgtacctgtgtagctcatcacaaacctgttctgaccaataagttggttccagtcttgataatagtgttgtgctgccgaatctagttaatgtgcttaacaagtggttattagttagggatacctaacaattactactttacagccttctgtcattatcaaagttaactaagatgtcaatttgacaacaattcctattggtttatattcgcaaaacctaataagatcagaactaatttgaaatcatgttgttcttttgacggacatacttgtactttcatactcatcctacatcttcccaaacagttcaagtgcatatattcttaggagtcttatttgttttggatgtagtgtgcattccatgcatctataaaggtaaaaagtagtaaacaaaactgcagatcaaaagtcagaacaatgcaaactaagatgcagtgcagatattgattacttcatgcttctgttatttgtagttggtattgtttttcctgttcatatggaactttagtagtgcatcacagtatgttgatttccaaattaataagctgcatttcgataggtaggcatgaactaatgctcggaaacactttcattcccaataatggttcaacacccccagaaggggaggttccccctaggtagattctttatggattcttatgaattgcaaaaactcatataatgatcttgaactattcttcgacttaacattttttcctattaacatatttttaaatgccattcccttgagctactccacatttatttgttattcagtaatttattaaaaaatcttagttttcttggttaaattgtgggtataacggactaactcttatatctagcaatggtgggtccttatgcattaaaatttttttgattatttcacaactacctaatggggatgaattttctttcaataacagaataatttccccttccatttaattaaaaatataaggtggcctaaaatgttaacttacactttcttttgttaggggtctgtatttgacactccttggctaattgtgaggcttttgtttaagaatcagataaaaaatgtttttatcacgcgggtgctgaagggaattaagatataatttggagtttgttctttacaggngagtttttatacaaaagagggtttatttatgtggcaccctatttt

SEQ ID NO: 16586 - DNA, 7168 bp, Oryza sativa
  unsure (1)..(7168): unsure at all n locations
tatatttatgatgtggtgctcaccaccgtatagaggagaagatattgaacgtcatagtaagatcaaaatcccaataaaagccgacaggattttctcctctctcttgtataatatagaagtattgttttcccatataaaagcttatagagtcgccacattattttttatcatatataaacatcttttcaatgagatggatagaaatacgtggagaacttcactttcataaattgtttcactcccgacagagaaggtgtctccacacatggaatattgtaagtgatttctagaatgtcaaaaatcatatttaatatttttgcattatattgacgaataaattttttttcctattaaaattttttaagagccaattcctataagttccccccaatttttataatccaagtatttacttaaaaaatttaaattttcctgtttaaattggggtaaaaaataacaacccttaaaaatcaagcaaggttggttctttatgacataaaattaattatgattttttcccaactactaattgtgcatattttttttttcattaaccaaatttatttttcaccaacaatattaataataaatattaatgtatgtactaaaatgcatatacttaacatcatctagttgtttaggggtgctgcttattgtgaacgttccttgtccatactgtgcagtgcttctgtattaaagaattcaagtaaaaaaatgtttatttagtaactggtgtgcctgtaagggagattcgcagtatacattcttgtaagctttgatcctttctcagcgtgcaagttttttactaaataatgagatgtcttatctattattctgtttaccctgatatttcctctgatttgtaacttatcactctctacattgctttacatgccaatggctttcttcaagtaatcaacggttattatgtttcattaggaattttctagtcgagttttggaaggcttccaagtgacaccgatttggcatcaaggctttatacgtgatgatggaaggcatgtgcatcttgatgtttatctaagatctattcttgtaactattattatgtttctatgttttattgaaaagtcattacagtttacttactgagcttttttttttgccaatttagtgcgaaatgcttctttccatagctgaactataaagaatagttggatctgcatgttgagaatttatttatttttagctcatcaacacaatgctaaatgaaataacctgagaattgtattctggtcaatcaaaatataatattgtagaatcatgtacaaaatttgaaatatctgcttagtacgaaactatttggagaggaaggtttgcttgtttgtacaaaaggataatagatattagtatccttcgaataccatgatggcaggattttctgccaatctgaattttgaaatcaggcagatggatttcctaatctgtaaaatggaattatgcatttatgcaattgaaaatatgacaagacaaaatgatgagtaaattttagaaaactaaaactatttgtcaaaactattaatttgctacaactttagctaggcatttcagagaactgcaactacattttatgattttatcataaaactacaactttatttgcttgacaagtttggaccaacatgctatacacatataccatactcatgctcctgcaagttgggcccacatgtcataaacacatagggggataaagtcgtagctttcttataaattcgtttgcaattgttgcaattttgtgaaatatgttgttaaagttgcagcaaagtgatagttttaaccatataattgctgttttgttaaatttaccgtaaaatgataaaatgaacatagctctttcgctgtcacttttgaagttcatgaaagcaaacacacttgatacgcttattgccttgtcagaaagggatataaaagtttctatcctttaggtgctccaaatttcttgaactatatattgtgcccaaacacatttttaatagcaaattcaactgtagagaggaaaggtgatgcgacaccatctttgctcatacattgcacttaacttaatataaattttttttaggaaaaaacagtagttcgtgtgtaaccacgattgcaggtaattaagaaaattgctctggatggtttgattgtatcgaatgttacatattataagaaaaaaaaagaccttgacaatgcttttagatttatttagtaatgttatgcaatgtgtttattactactatgatgatgcttatattacatgcaaatcctagagaacaactcctagcagtttatgtcaggactggatacaataccgtaattaatgtttcccttcaaaatgtaaatggggattgagtagaaaagagagtttacactttattgctattaaatgaacaattaaaatttaaattacctgttgctcccctgtcaggtcaaagtatgtgccaaatgtccaaacagctaggtgggagtacagcactcgaccagtatatggctggggtgatgtcacgtcaaagcagaaatcaactgctggttggcttgctgcttttcctttctttgaacctcattggcaaatatgcatggctggtggcttatccacaggtttgtatttctttgtatttgataaactgaacagagagatatttaatttttctttttacctactggttttcattctaggtagatggcacatgtgccactgagtaatttactgaatgatacattcatctctcatgtgtaaaactatcatgtacgatggagttgtatttcttagcctaaaatgtgaaaattggttttccattgatgaagctttatttcaaattttttctttaatatttctgtaggaatccaaattgcactaaaaaataccaggaaatgtggctagtcctatctatatgtccaatccttttattccattcagtatgatttctccagttcagtcctgtagtagcgcacgattgattgaggtgatatgatatagtgttaggaaggttataataatattaagttaatagttcaatactaacttctgcaacttaactactcaggatggattgaatgggacggagagcggtttgaatttgaaaatgctccttcttattcagaaaagaactggggtgcaggttttccgaggaagtggtattgggtgcgtttttctatcttctttctgaccattaatcctgatgtaatggatacactggaatactgaataagttttgcttcatttacagatagaaaatatgctgtttcttgctgtaattctgtgttttgtgttgccagtaatgttcacccgtagtagcttttgggctgtttagatcccttgcctcacctggatttaagagtttaggcctccagtaacaacaaaaatgcttgctttgcctggcaatctcacctcattgagcaaggatattgttagttccttgctcacagggcaatgtttggcttgcatctcatcctgcatctctttatcaaaggaagctgggtgaaggttctgaacaaacccaatatgcatgaaggtttcaagaatggcatgcaatatgatggttgtagtggtcatgataaaaaataccttctttaaacatagtgtggtcggttgaaagtagtcaattttactggtacatttagtcatagttatagaggttatgcacttttaaatattcatgatatagctaggttacaaatacttgtcgcttcacggttcgtaatgcacattttccaattttatccatattaattatctagttagttgtggagggtaatatggtcatttaacatgaaaacaaatgattacacaaatttatgtgccatggttaaaagtgacaagtaaacgtgaatggagagagtatgttttagtttgactcaaaacttcacatgaatgaccaaacttactgattgaacacctttgctcatacaggtccagtgcaatgtcttctcaggcgcatttggtgaagttgcattaacggctgctggcggattaagaaaaattggattgggcgaaacctatgaaagtccttcactggtagagtcctgatactttcagcttttaatctgatgcatacttctaatttgttctgcaacttagctcatcatgcaagcttgattgctggatgtctgccagactgccagtaaggcaaaagggaatattattgatcaaccagttggcctaaaaattttgactgacaaaatcttatccatttccgaagtatgggtttattttcatttcaggactggtcattgatacaacattttatggatttagtggataaatgtattgctggtgatggttatgccacaaattagaatcccctttaccgcagtggttttaagtttagatcttttttgtgtatgtatcatgaaagttacactaattgtatgtatctaggcgacttttcatcccacagaacatttacatctagacctttgacagtcgaaacaaccaacgtacagaaaagccaccagggtgagtaaaaagcattggcagcataagcttgtgtgcagcctgagacagggttggaataatctcttgttccaaaaagaagtgcagcatgctttgtttcctttaaatgtcctgtggtgtttctgtgatgttattatggattcttcctcttttatagaaggtccaacgtcattcttatccactttcttgctttgcttttgtactcacatccacatcaacaaaaccatgtatttattgagaccaggtaatagatatattttctttagccagtaatttcaatacgatgcttgtttgctttgtgccctgcatattaactttcataagaggaagcatacaatgatcagacagaagatttacgaatttaactatgcacatacataacagttctgtttgttccctgcagattggaattcattatgagggaaaattctatgaatttgtgccttggaccgggacagtgagctgggacattgccccttggggtcactggaagttgtccggcgagaacaaaaatcatctggtaattatcatccagcgtgctgaaaatgtaatgcagtgcctgtgctagttggctactgttcacattcgagcaagattcccacttagctttcttacttgtattatagattctcttaggttgtaaggttacttatgtggttctatgttccttgattagcattcaatgttctaaaagcagattatctaggtgctaggcagcctgctggcctagtatccaattaagtgccaggagctgatctatcaccggactagtgcctagcacctggtgaatgcgacccttaacatgcattgctacttttctacaggttgaaatagaagcaaccacaaaagaaccaggcactgctttgcgagctccaaccatggaggctggactagtgccagcatgcaaagacacctgctatggtgatctgaggctgcaaatgtgggaaaagagaaatgatggtggcaagggaaaggtatgcatgcatgataataaggccatcagaatttttcagatagctgatgtattattgcactattactcttgttgcaaaatctaaggtgccagttgggttagctgcctcgaaaattgaactttattatgcaattcacaaggagggccagatgtagcatataatatgcaaatcagtatgcggcccaaaagtccactactaccttcgttccaaaaagagtttatacatgaatttggacaagcacttgtctagataggtgtagagaaaacgaactcttttgggacggaagtagtaatactatttttttctagattagcttggggctgtttggatgggactaaaatttttagtctctgtcatatcggatgtttggacactaattagaagtattaaacgtagactaatgacaaaacccatttcataaccctggactaattcgtgagacgaatctattagccctaattaatccatgattagcctatgtgatgctacagtaaacatgtgctaattatggattaattaggcttaaaaaaattgtctcacgaattagctctcatttatgtaattagttttgtaagtagtctatgtttaatactctaaattagtgtccaaacatccgatgtgacagggactcaagtttagtccctggatccaaacaacctaatgccactattttgccttaggaaatattgaaagttaaggacacaatgaactctgatggattgatggcctctatagttatctgcccccggagcaactgaaaatttattaattcatatatgataatatatgcatgatactatctgtcctgtcaggctctccatattcaaatactagaaaatattttaataacactctttagcctttacctaagcacattgtgggatcaatttctgattctgcacatacatggtcactgttcagtatagacacttttattgaacagaatatagtgaccgacttcattgatagtcatcaaggcatgtaaccatgatccaaatcaaaaaaactctgcttatttactctaaaaaactgtaacaagattatatggtgcattaccaacaaggctacaatgtataaaaattcctagttgttttcagatgatactcgacgcaacaagcaacatggcggcactagaagttggtggaggcccttggttcaatggttggaaaggcacgactgtttcaaacgagattgtgaacaacgttgttggtacccaggtcgatgtggagagcctcttccctatcccatttctcaagccccctggtctgtagcattgttcaggtcgagccatcgataggtagagatgaataggccctccaatcttgtcacaccttgagtcttgatctgttcctcacttagcatcatgttttcagccagagaactacagaaacagtaaaccaatcagcatggagtttattctcgttgggttagagaaaggcgcctttcgggtgaaatcatgttgcacaaatttttacagatcaggaatggatgctgtaattcaagaaaataagtataattcatcttaggcagttccatccttttgtgctcatctgaacttctgaagtatcataaagaagtgatagctggatgcccgggcctgcatctgcaattgtggaggtctttctggtcagaattggctggaaacaattgttgttagcacacttcatatggtaaatctttggggatcctctagagtcgncctgcnggctgcgggatgcagttgtacaaacaaagccag

SEQ ID NO: 16587 - DNA, 2071 bp, Oryza sativa
aaccagcgaccccaaaaaattcatgacaaatccatctatcatataatgctatgccttttcttgcaacgccataatcccctaatatacattcctttccaaccattgggccaattctgcccctcccaatgcattcagtcaatacttccaagcattccaggaaatccctcgacctcatgcaagccaattctgccacctccaatgcattcagtcaatacttccaagcattccaggaaatccctcgccttcatgcatctgaaaaagctgccagaaaatccctcggcctcatgcatctgaagaagccgctcagtgttcccccctgtatgtcttcacttccaagcattccaggaaatccctcaccctcatgcatctggagaagccactcagtgttctccactgtatgtcttttcaagtatcagtcaccaaatatttaataacccctcatagaattttttgagatacactagtgaagttgaagctggaattcttacatactcatcttgttggtcagcacaaaaagcatatgctaacatacgcataactgcagtacatttttataagggtgaatgtcctggccggccaagtacattaagacgatgtgtgaagtatgaagtggctcaacaatacgaaagaacaatgggtttcttatgcgaaaatgatgacgaaagtttctcttcattgtacactggattatcctgttggtattttttatgaccacaaataaattcgcaagcacacgaaataccactgttgcactttaccttcgggtgaccccaaaaggattttgaactcagggaacatgtataatctacctaaggctaagacaatccaaggacaacaactattggtaggctagctaggctaaagaggactttctatgtgttttaattatttaagctaagtaaaggtaatttcctatctgctgcttcgggcaccgacccttgctagtctgccagcatggttccggctatagctctatgatgcatccgaacgtggaggattactaggataggattcagggctgtcaccaactgtcgtttacctctgacaaatccatgggatacacaataaacaaaggtaatctctaacctagacaccatgcctaagttattaattactaatctaatacttgtgcagaaacttccttctttatccagagtctagtattggagcactcagtacgaatactaaacaatgaacccgcaaatatgaaaatctatcttagactaaataattaaataacataagaaaagatcccgagcagagtgtaccgacagctccggtactcctccagaattcctcctagaaagctacacccattgaggtagaagtcggagatagcgccaaactttcgggcactccttcagagcttccccttcaccctctacctattttttaatgtacaaaagatacaatagagcctcttataattcagctcaaagttgtgtgtgttgtgaagtgaagtgagcttcttcttttatagcctccatatgatggttacaactatgggaattgtccaaaacaccctccaaccgtcattgggaataaatcaagagcgtaaacgtggaagatggcgatcaacggccttagaacaggtttggccgaacccaaaaacccacattttggccactcctttggctgggaggttgttaatgggcccccaacatcatgtactatgatttggcccaattataagtggttttgattgacatatgggccctccaatccatgtaaatgtgtcctgattgtccggaggtgtattttgtcgtatgacggacgtgttttctccttaatatacctgcattcaaatatttcaccaacactagtggaaatgattaggaataatccctaccactaagttggataccatattttatttcattatatacaagtattgatggtcagatattatgatttaagaatcgtcaacagtatgatatttccttccattgccctcaatgggatcagtggaattgttgagccaagcactaaccaacaattcaatgtagtggggtaaacatactagtttcactcaccttaatatcatcttcatttaaataaaatggaacaaatg

SEQ ID NO: 16588 - DNA, 1292 bp, Oryza sativa
  unsure (1)..(1292): unsure at all n locations
tacatttttactgcaagaattgctacttcagtagttttaggaaaatgtaaaagattgggcttcgtgcagtcagttctcactttctggaacatcctatcaccaaagtctatcatcatggtgcattagatgaaactaatcgcatttctgatacaatattttacagttcacagcgaacaaacagtaaacagaggaaacgcacaaacatgcaaatttgtccttgttcatgaattgctaagcctacattaagacttgaggaaaatacacagagtgattattagcgttcaacggagaaaacaaatggagatgttccgcacctgtaggccattacaaagcttactctgtgggggcaaataaaccataaacattatcatgaccttgtggttggtgtagggtataactgaacccatgcaaattcctccttgtagctgacattttgatcgcatgatcctttacatgtgtacacaacaattgtttgccaatcaagagagtcttgctcatttttcacaccaaaagtataaagcagctgtggcattatctgcagtacaaataagtgtgatatgtaagcatgtctgtgtgaaaaaaggggtgggtgcctgtttgccccttactgtcgtacaccttaggaatggtaggtctcactgattaagtagaagaaataatttgaactgatgggatttgaaagaaaataccaaactcaacataaaggctgcagaagtatttgataatctcatttacagtactattttgagcagggtatgaattcccactaagccatggtttattggataccagcacaagccagtaataacaaagagccaccgtcgggtatatcttggctcagtctggcctggtatcacaactggttaacaggcagttgagctagcagccattaacttttgggtcttgactctaaaattgatgcattggtgtctgacaatatgcacagtatgtacccagcgaataattcatacagcaaagatataagggcaagatatttggcatgagggagtagggtttgcaaatttattacttgtgttgcaatgtgcaactggatataagtgtatacccactatatttcagtgacggaatttgccccagaaaaaaaaagaccaacctgaaattcatagcatagtggacctctacagtagctacatgatgggatatcggcatttgatggacaaccagccgataacgcccatagaggtttggcattctcttctcgacagtatctgcataatgtaagcaagtttattcgaatggggccaagcaggattccatnntcaaggcccgcg

SEQ ID NO: 16589 - DNA, 1067 bp, Oryza sativa
ttaagaaaaataaactatatgtaggctattatctgagaatagcagctagcttcccacgagattctaaggaaggacctgttaaattttttgagtggtacggaataatcacccaccatatgctacatgctagactcaatcccaagttagagggactaacccagacgatgaagataccacgctgtctctcgacggcgactgatgcggtgacagtgggtagaatggcctcaccggccaatagcgcggtgctgtttgttgccggatccaccaaatccttctgcattaaaccaccaatgcaactcgagcagaaaaaccattagatttcaaccgcatagcatatgacatatctctctactattattatcaaagtgcagccatcctagcttctctccgtgtctctattaggaaaaaagaaccattctaccaaaaacggtacacccccaaaactggcaaaccgagaaaaaaatggacagaaaaattgaaccccacttaaaactattaacccgtcttttcacacaccatgttgtaattccacaatagtaatatcagctaattgacatgtatacccttgatcgcgtgagtaggtgtatatatacctgcatatcgatgacgagcatggccgtctcactccactcgtcgccggagccggccaccggcgccatggatatcaccaagattcgcacggccggacagctcgatctactcgatcgggattatattaatcctcttgcgatgtagtgtgtgactgtgtgtactagctagcatatatagcactgcctgatcatggagagaagaaaatggcagcactggctgggtcctttttatggttggagaggagcatttctataggtatagcagcagcagacatgacatggacggtgatcggcagcgaccctagaggtgcgtgatcgacggtaggtacgtctaatcctcgtacgctggaggactagtctcatggtggcgacacgtacgtacgcccctcctctaattacttttccacactccatcgcgtcgatcgtctcatctatcgatccccggtagtcaatcaggggcagggcgcattgccaacc

SEQ ID NO: 16590 - DNA, 1381 bp, Oryza sativa
  unsure (1)..(1381): unsure at all n locations
gtgggatgaatgctatacagcttcgnacccnagaggcccggtccatccaaacttgcggccgcatcgcggcatccaccaacgaggccgtcatctcggcccgcgcgcgggcattgggccacgggggcatctcgggcattccggcccacgtatcggtgtaacggcgaaatcactagccgcacacgcgagcggagccggaggaggagacggagccggcaggatccaccactgctccagctttctccactctcactccccgattcgccggcgagcaggcggcggcggcggagctcaaggcttcctctccgctccgcaggtaaacaccaggcaccatcccctcggctgtggctcccccgttcctcttgtcccactctctcttggccccgaccctcgggagtccggcgctaccgaatccgtcttccccccggagctgtcgaaggagcgccgcgtgcggccgtgctactcccaccgacgccgcgtcacctcgaaggcgaaggggctcttctcccctcccctccaatggactgaggcgtatcccgtctaggccgatttcttctgttgagacggaagccctaacatagctagattgctttttccaatgatttgtcgcttgctaccagcaatcaaatccttgtgttattttttgcttgtctggggccactccaatccacacatatagtcgcatatttgatttgattttattactcgaatggcagcttgctttgcaaaattttcagaagcgcaactgaaccctcgcgcctgatatctaaatagctgctcacgaatccacctcccttattgtgtaccaggtaccaagatgaaggtcaagattcttcagtggcattcggtggcttcttggacatgggacgcccaggatgaaacctgtggtatatgcaggatggcattcgacggctgctgccctgattgtaagttccccggcgacgattgcccgctcatctggggctcctgcaaccacgctttccatctccactgcatactcaagtgggtcaattctcaaacatccacaccactttgcccaatgtgccgtagggagtggcaattcaagggctaatggcatctgaaattatatcactagtatctagtttgcatgtttccttgtagacccctgcaggaaatcttttctgaaacataaaaatgttgtcttcaagtactatgtactaatattttctgcaaatgctgatggtcacaatctgctaagttntnctgtnancccgtttgttnnntgtcaaggtcgacatgcattcaacatgnnngggggnnnggaagagaagaaattaaattttatatatatagacaaaattcgnaattattattatgannaaagacgcggaaatttttagataatacgaacacctaatttgtg

SEQ ID NO: 16591 - DNA, 1381 bp, Oryza sativa
  unsure (1)..(1381): unsure at all n locations
cgacgcgccttgaattgcgacccngcttcgnacccgccgnaacttgatgatccatcctcgcaggacctcgtttgccttcgagcgcccctagcttcggatcagtgcgacctacagcaccggtttctcacggtacagttcagcccagatattagttcatttttgtttcagcttttgcacgattatgtcaccatgttttaactgcacgtttcctcatcgcaggacctcgtctgccttcgagcgcgttcgcaggcacgaccggcgcttccacgagctccgcaggggcgttcgccacctcttcgggcgcgttcgccagctcttcctctcacggagcgtcgatccctcgcccacacggtactttactttttattaatactgttaaatacctgtacgaaactgatggtccttgtccagcaggatttgcagccgggatcttcgggaactggggcctcttcgtctcacgccggtaggactggtcctactagccagttctacgacgacgacttgcacggtgcagaccaccacgacgtactaggctcctctcagcttggaggagctccagaggcgcacactcaggagcagccagaggtcacacctgtacaggcaggacgggttggccgtgccgtaccagacggagagcaaagtcatcaatatcctcacctggcttgaaagccaggttctcccactccttgcggagtgcctgcagtgtggacttgcgggcgccttcgttgctgatgcgtgcccgcacgatggcgtcctaagcctccttgcagtccgttttgggaaaggagaacttgatttgggcgggactgcacgatgaggcattcagtggccgcgatcttgttgtaatcgacgtgccgtaccgacttgcttcacatgtgccgaacctgagcctcaccccatataccgcggccactttatgttgttggtttggtgagggtggccacccaccgccgggacaaaaatccttgccacgcgttgtacccgcggggaccctgcgcaagtcaaggaaagagaaccctctttcttgaagggccgntgcggtcctgtttcccttgtacccccccccccctttggttttcgtcggggggcgccgtgctcttaggcgccccgccctcccggaggaggtttatgtccaccatttgcccgtctcggtgcctctcttgtgcanttctcagaacctgttgtggagagttcacgccgtgtgactcttgtcttctcatcaaggtatacattcatctctggcacggggcgtatttatcgccctccctcgctcgggtgtgaacatccgcggcgagatgagcccttcttttctacgaggtgtggacggtttctctctctttttggtaaagatctatctctactcctcactctctgaggacct

SEQ ID NO: 16592 - DNA, 3316 bp, Oryza sativa
  unsure (1)..(3316): unsure at all n locations
gctcactcgcttttattatcatctagtaataaaatttaaagggttgcgcgcgctttttttttaacaacataaaagatgtgctggctgctcttttttatnnncataacccccccccccgtggcatgatttgcttttgacnatccacttggnacccgnatataaggggattatggcgttgcaagataaggcataccatcatatgatagatggatttgtcatgcattctttggtgtcgctggttctaacaatgatataaacatgctcaattagtcacccatcttcaccaaaatgatatttgggacagctcctagggtgaggtacacagttaatgggtatcaatttgagtatggttactacttagctaatggaatttatcccaaatgggtgacgctaattataacaataagttaccgcaaagtcacaaagaccagttgtttgcagctcaccaagagtcaacaagaaaatacattgagtgtgccttcgacatcctgaaggcgtgttttagggtggttgttgtgccttgtcgattgtgggaaataggtggcattggattgatcatgatggcttgtatcatattgcacaacatgattcttgaagatgagagagatctcccaccctttgatcataatgacaacaatggagagttcgaggttgacgaacccgagtataattaaggtgcactggatgaatttgaggctgtccttgatgaggacacaactagctcagatataagcatgactaccttatgtattaatcaaccaaaaggtgcatatgttctatattagatttacttgttatatatttaaacaaatgttgctacacaatgagttttgggtgttttcatttccagaggtacttgcttgggcgaaagaaaagagaccgaacgtaagaaatgcatggatgattgaagaagttgattggggaccaaaccaagatcttcttcaagtcttctttcattttaccacgttacttttggtccatagaacacaagagacaagagacaagaggaatgcgtggtcccgatcttccgataggtatagataaacaatcgatttgggcggagtcgcggcacaactcgattcgggttctgaacgaacacgctactgagccctgcaattgtagcaccacgtctcctttggttatcaaccgtgccgaaacccggttgacctcgccgagaaggttaatccctgcatgcgaatcgaagaacacaagtatgaacaagataaattgcaacacaattgcatatgaatgattaagcactcgaatttggggttccacaaaccgatctagcatcaaaaaagttcttgacagtttaatctaagcaaaacccgacactaaacgatgacggctactgattaagtatgattagggacgtcctagggttgctctagggcgcacacccccttgggctaagcccacggcacaattacaaggcccaaaacctaaatcagattcggactggatgagatacgtggctttttttgcagattcccggcagctcggtaggaattttgacgtgagaccaaaaccatctgaaagtagattccataagatttccaacaagtactcatgggccctgaaattccttctagataagcgactatgtccgtttgaagttgatgctgtcaggaggcccgaatccaaattcaaaacctgtacgactttatctcttgtcttctatggaccaaaagtgacgtggtgagatgaaagaaaacttagagaaggtcttggtttggtccccaatcaacttcttcaatcatccatgcattccttacgctcggtctcttttcttttgcccaagcaagtaactttgcaaacgaaaacacacaaaactcattgtgtagcaacatttgttcaaatatatgacaagtaaatctaatataaaacatatgcacctttggttgattaatacataagttagtcatggttatatccgagcttgttgtgtcctcatcatcctccctttcttgattggaaaccgtcctcggtttcaccttgtcatggagcgtattgaacttatctttatctatcacaacatccggtgaggaacatttcttgatggccatatggttggattctaaaatctttgtagtcgaaaaaccccaacactccctttcttgcaaattaacttgtaactcatttaaacaactagaggaactagaaagagaattacttatacgcatgcggtcctctagaaaatacattttatcatgaaaaggaggtatagtcaaattcgaacaaatatatactcgatgcacattttattctcctttactatcataattgctaataatatgtaaaatcacataagaaggacatggcaattcaaatctagcaaataatttcttctctaaacagttgagtggacaaagatcatcaaattgaatataaccccaagtattcaaagaagatagcagtttaagctcttcattctcgctagcaatatgaataacatgtttaaactcaacacatggtggctttactatagaaccaacatgttcattcactagttgtggcatggatataagtgaagcatcgcacaactcttttttatcacaagaaacatcaagcaaattgttttgtgacaaaggtatttcaacaatcgtttccctatgggttgctctaatgtagcacaagtactggatatagttggtacatcataaatatgcataccttgattagttgtagcaccattatcattacatttattctcatcttcacaaattataggtgcttgtccaattgaacattcttcaagcatgcatgaagctatagataggtttttttctcttcgtctttcttctcttcctcctcatcatcttcaacgtcggaaggtgcttggttgtagcccatccttcacgtagcaaacgttatgccccgttgacattagagcaaaccctctctcacacgatgtgccaaaattccaatgagccagacgggtgggacaacttgaaatccctgaggcggtgcggtccacgtcggaaggttgacaagatgagagcacctcttattgaatacctgcgaagaacctttacctgaatctgcaggtcgtggaaaaaataattttggcgctgcgggtnctccgggtccncttggtcgcttgctcgctcgtggggtcgtccgggnggtttgaaatgggcggccccgtggttggtttcgcccgcggcgtggctgcctcgcctgtttgtnttttnttngccggnggtgcacagttgtcacatgaccggggggggggggggggagaatttatcctgcaacaacacacgaaatttataaatagagngttaaacagatataataaacgttttacatctta

SEQ ID NO: 16593 - DNA, 6500 bp, Oryza sativa
  unsure (1)..(6500): unsure at all n locations
ccggatgaaatcaantctgtttgccagcacgctgactctagaggatccccttaataagttctttaacagcggggacctcccttgcggtatttctttcaaaaaaacacacaatatgatagccgcattcacattcatccaaatacacatccaattcacatccattcatcaactaacacacaatatgatagtcacattcatcacattcatagccacatccaaattgacatcaatttcacatccacatccatatccctccccccctcccccccccccacacacatattggctgagttctttcccccaactttcccaactcacctgcctcgtggttccgtgcgcacgcttttcaaactactaaatggcccgttctttttgcaaaaagtttctatacaaaagctgcttaaaaaatcatattgatccaattttgaaaaaaaatagctaatacagtacttaattaatcatgcgctaatagactgctctgttttttccatgcgcaaatgggtttccaacacacacaaacgaacccaactatacaggagttggaattttacacctaggtgcatatgcaccagcaatctgcaccattcatttgcatgtgcggatctcaaagtaatgtacgcttagccccggtaaaatgtaccaatctagctttgtccccttatagtaaaagtagaggatgatacataatgcatttttttatgactgaaatgtccttcaagtagtactacagtgcaattcaatatgtagtttttgaatttcttttttgttgctgcatgattaattcatttcacatggatgctcagatcctgcaagcagtatgtcaatacacaatgatagatgtatcttcccttgttaaaaaatgatggtatatatcttcttgctaaaaaaatgacaggagtattattattttgagggaaggtcagaatttacagcaatatatggttacctttctaaacacgaaattcacacttttctgccatgtggagattatgatctgagtatagtgtgatgtatcttttgtataacgacacctgtgatataaactattactgtagtttgggatatgtatggtgtggaattgatcgatgaagaaaaaattgtgtacctttgttggcatcaaaattcggaatgtcatgagttaacgggttttagagatatataaaacttttagtgtttagttccatattatgttcttaatgatgtttagtgatacatcatttacaaacctatcattaagatttataacttttgttcattttaagataaaaaaacttgctaggagatatataatttgcaaatgtcattgtatatcttgaaaatgtagagaaattttgctattccaattgcaagggaattcttatttttgttttgggtcataccacagggtctttcttgtgtgtaccttcagagcgctttgtaatttatagcacgataaagtcccaacgcaattgtgtttctttttcctctaatcttcatctctggtttattccagtgaactgtgaattgggaccgtataaaccacagtccacattattctctatagattttaataaaattaaattttagcatgttggcaattagaaaggatgtcctatatgtacgtatgagttttacctatatattttatcgctagtgttttttgcaagttacatagacaagccacacctgcaaaattagatttttagcatgtaggagcagtgaagaaaatctaaatagcatatgaagtgaaaaaatcaggtaagaggggctagctgaggggcaaacctggaaggctatggtgaggctgagtgagaggttgaaaagattaaatatcacttcaagaataccagtagcattattagcacttgatctctctgtatgtatgcactatgcacgcatcttatgatgaaatgaacaaaaaaacaaattcctatgaaatgcacgcatcttatcattttaatggcccatggtacgtttgactaatcctcatgcatacacgtgattttggacaaggctaatggagtaggcgagcaactgttttcacattgggccatgctaacgacatctcaacaatataatttgtcctagctctatgtacttcatttatttactcttttggaacacatgatttgcacccaaaaaaaaagtaggattcaagtggcttagcacttcaaatactaaggtggggaaaaaaaaactttggaaaattgcatgaatgatcatttagggttcctttgaaaaaaaaatagaggatttttggagaattaaaatccgttggaaagttttcctacatgggactttggaaaaaaaggaatgtccctccccccaaatgctttaaaatccgtatggaatagttcatttcataggaattttggaggaaaactaacatgaggaaagacggtcccaaaactacaattcactcttttatttatttcaacaagctaaggcacagctgcatgaatacactatgcgtggtaaacggcaggcaactttactggaaactgttaggtcctcatcgtttggcttattaggaaataaaaataaatttgtagataaaacttttataaatgtgttcttcgtgacttaaaagccaatgttgaaaaagaaactacgttgaaaatatctcaaaattaagtttgaaaattcaaaatttggctttttctttggctgattaggccatccgatgagggccttagattttcatcttacaatttcaaaaatcaatcgtcaaagtagatatcaaaatccaccaggagatttactttttctccaaaaaataaaaggtgtcccaaaaaagaaaaaaaagggcttttcatcacacaactttcatctagatatcaagaactttctatcaggacagtttcaaaagacttgtaaaaagaaggtttttctgtctcacaactttcttctatctagaacaaatcatctgcaattctgtgtgctccatgactctaaaacacataaaactgatagcagtaatcccaatatgatcaattttatataggaatggttaggagttgtacagttgaatatatatatatatataaacagtatctgctgttggtctacctgacataaggttaatataattacacccactgagatggaaaggaacagggatgtctccaatactttggagttgagcatgtagtatatcactagaaacagcaattttatcgtcgccattcttccaaggttggtgtttccactccgatattcttcatatctcttatatttgctggttaacataaaatagtaaccttcagtcaccagtaatctcagagaacagaataaagacaggaaacaaactccagattcttttcgtcagctgacaaagcaggaagaattatagttgccaacaagagctgtggctgattattaacttattgtaacctaatacttgcaacttcgatgctaaattattgcacattgtgaatatatcacatattgaaactatatatttattcgtattgaataggattttacaagtttccctaccctttgattcctacatttgtaacgcattcaaactgtactaatatttatagaaataaaaggctaaatcacctgttgtccaacatagcatgcgatctgacaagcagctctagagaacgaatcaagtcactatgcaataagaatttgatggaaccataacatataaagagtctatcattaaatgagcttagctctctaggcctacgtgctattccagaatttcagtgtttacccagtaacatttacatcaccgaagacaaaatcgggtcgtgaacaaaatctggtatcttaaaatagagcacttaattggcatggaaagttgtcttttagtttgaaaaggtgcatctaccattaatctaaagtctaaacatgtcatgtccatgtcaaatcaccaagatcaagaagaggaagtgagaaaaatgattactcacacagatggatctctggcctagcagcagctgttgcatcaataatgactgtcactttctcatagtccaatgctacagcatcaaagactgtctgccggatgcaatttggtgtttgaacccctaaaaaaccataaacacttaagtaatgtgattctgagcaatgcggtagagatcctcaggcacaaaagaaaagtatcaatatttgtctgtaatgtactagactacaaaacagtactgtgcaagcattcaatttcgggacttttcaccacttcatatgatagtttttactgccattatatgtccacttagaacataaggatgttgaaaattgcaaagtgaataaagcgaaaaagaattgctacccttaaagaacaaacacaaaacaacaagaatttattgtcaagctaagaaaacaatgttcacctctgtctcgatagatggatatcagtgcttaccaacgataaccaatttctttattcctgaggttttgaggacagaatcaaggggtgtcgcaaagaaagcactgaaccttgtcttcaccaacttgtattccccttctttgataacaagcccatcagctagatcagcacctttcaaacctttcactgttgggcccttcccaccagaataatagcgtctccgaaaaatttcaacatctgctccagaagggtcatgctctctgaccacctacatgcagtcatcatcaaccaaggtctcagaactcaaaactatgaccacatgtaaatctattggcattaaaatccctacctggtgaagcaaaatgctttgcataggaagggggaaatgtagatcacattaatacaggttagctgctagttttgcaacacgtccaatgattatcataatagcatgtttagtaaaattcaaaattacatttaatgaaccatgaacatgtataagttgcagaagccaattcaaaagaaccaaattttagtttcatagtggaaaccgcacctagcaaattattcgctttgtagattttagaataatgtcgtgcagcgccaaacattaaacaacacacctaccttctgctatttagagatgaaatagagggagtcagtcacctaatccagcaaagcagcgaccctccaatatgaaaattggttttcatcagataaaaacaaatgtgtgtctactataccacataaactctgttctttgcatacactcatgcagaaaataatgcataatatctggtttgttgcctagaatatggttctaaatgacctgacagaacaagaaatcaaaagataacttctattcgtcaatcagtctacagagtgaggaaatgtgagcaaccattgcaattccacgccattaaacgttgaaatgctggcagatgctgcacctgcaaaccgaaacgacgagcaggatggtcaaaaaccaaaggaaatccacccacgaattttgatcccacactgctgcacatacattgcactgaaccaagaaatctgtggcacttgcttagagcaccacaggctacacaagattcctcctgaatccgaccacgaaattcgcagtcctcgtcgcattcaaccaaaccaagcaaccgagactaaacaaattattacacgaggacgaaatggagcttcactaatcaacaagaaccgagccaccccgcgagaggagagagagagaggggaaggaagcaagaagtgtacccagacgacgtagatgccgcgctccctcgcgacggcgaccgcctcggcgacggtggggaccaccgcctggccgccatccaccagcatcgggctccgcatcgccgggtcaacgaaatccttctgcaaatcccacatcaaccatcaccaacccaacatctccaaaagaaaccaagaaatttccccacacacacacacatacctgcatgtcgatgacgagcatggccgtctcgctccacttggcgccaccgccgcccgccgccgccgccgccatggatcgccgcgatttggacggggaagtcgagatcctcggggagagccagcgcttcttgaggtagtggaggaggaacttgtcgagggagaggagcagcaccagcaggcacgacatcaacgccagatgtgatgtcataaatcaatcccaacaacaaaaaaagaaaaagaaaaatatgatgccgatgcgatgctgcagataatatgactttgttttcatcccaaagctcactgtttgaaaaagaaaaggaacgaatttgtcaaaaaaatggattttcggaatgctgtggtggctcctgcagaattgtgaatctgggattctggatgggtttgaagtgagtgagattcagaggattgtggtggtttggttggaaggagttggtgagtggtagtccttggaggttggaccttgacgacttgaggagtaaggttttgacgtttgtagtgaaaaaaggatattcttttggcttttgttgtctgacggctgctggtttgttgntatgtntgngtggggncaagcgactgcatcaactnnnnnnnggggnggtgagattattttaaaatcagcacaaagtttttgtnttaaattaacaacagcgannttattataatattataaacaaacctacgccgcttgtggtgttagtga

SEQ ID NO: 16594 - DNA, 1676 bp, Oryza sativa
  unsure (1)..(1676): unsure at all n locations
gcgtatgaatctcatccgtggcctcacgtcgactctagaggatcccctagttggatgatcaagatagtgaagcattccatataaagtaagatataaacaagaaactgaaaccacacgtgaaactaccttcacgacaagctttgcagccagctctgcaggcaatcctcggcatgcctgagcagcagcttctgaggacagtgcatcccaaattccatctgatgcaattattagcctccctccagcatttgatagctacaatttcccagaatgaaaagcatacacagttaagttcattgcgataagctactccttgcatttgatcaaactcttaaaatttcaccttcacttgcttgacatgtggaattggcacaatgaactccccaacgtcagtatccccaatcgatcttgaaaggcacaatccacctggccagcatctgagaggtcccacctaaaacaacagcaagatttcacatcaaaacccataatgagaaatgctttgacagcattgaatgtatccttgaagttctttccaagaatatttactagcagcttacctcctgtccaccacacaggttgagccggctgacctcccttcactcgcggtgacgcgctcccgctctctacatttttctcgagacgatggtccacggttagcagcgagatcacaccgccctgcgtggccaatatgcacctggagtccccaacagacgccaccgtgaccgtgaacccatcgacgacgaccagcgtcgctgtcgtccctgatgccttccctgcaatcacactcacacaacatcccccaaaagtaacatcttcacagcggcgatggtccaggctttcaagtttcaacggcattgcgaggatcttctctcacccttgcgttggaagtcgatgtccgtttttacgaaagcccgcgaccagcgcgcgcggcagcgcctgcagccagtcgttgcggccgatgccctgcggacggcgctcatcacgtgctccagcaggtgctccttgctgaaaaccgccgccgacacgccattgtgtccgtcgaacacctgccttaccgcagttccaagaccaagatcaaaaccggacgcgccatcagcatctgggaatcccgagactagtccaaaaacgccacacggaggtagggcacgtccggcgaagtcgaagaaggcggaggaaggttcgcccagtacgcgaagccagtcgggcttgacgagaaagtagtcctctccgcgcttggcgaagctaaagtggccgtaccgttcgatcggccgctcggatcccccgccacggagctcgcgtccgatcagggtcgccaggggaagcgacggggcagccttcccctcctccccggcggcgctctccatcacagcctctcccgagccgccgcactcctagtcctcctacccaccaagcatcatcccaacctgccaagaactcacggaaacggcgccatttcttccccggaaaaaagctccggcttgctgccaagggcgggaggaacccgagatggatctgatttntcncngnnngtgccggttggaggtgagtgcaaatcatcggggngagngggaaagagacccttacacttatttaattaatacacccgtcccctacataagtattatntaagataatatctacccttcatatatatataatattagaagtgaggtggtggt

SEQ ID NO: 16595 - DNA, 3623 bp, Oryza sativa
  unsure (1)..(3623): unsure at all n locations
ttggtccataaaagcatcctggaaagttaatcatggggccagtactttgtctctagctttacacctttaataactatcactgcaaacttagctttgattaatcacttaataactaatacaacaccctctttatgtgtggttccattgtacgagcagctcctacatgacaatgccgtgaaaaagagaggacagcctgatcaagtgagtcctcatcccttagaacgatacatgtactctcatcgatttaaatttcatgtaaattacaagtatacataatttagcaaaataattgtaaaatactaaatggtgcctacgataattttgtgtgacaataattaactcgattaattaattaattaatcaggatgaaagctgtgaggaagcgaagacgatggatctgaggagcaggggcctgtgcctggttccggtgagctgcacggtggacgtcggcgtcgacgccggcccggcggactactgggcggcgccgccggctttcggcatagggttcggccgctagatcgatgcatggtccggtgatctttgtgggcgccatggccaatgaaatggctggctcggctggctaattaagctagctgaagaatcaatggaaatatagagatcatatcttacatattacatcacatgcatgcatgcttgcatttgggttaattagctgcataacatcaggagcagccatcctgctgaaaaggctggttcctcttgatgctatgcacgtgtatgctcatggtttgatgggtgcaacaacagagtatataactggtagtgtgtgtgtgtgtgtgtgtggctcttgtctagctagagattgatctctttgggtggattaatggattattatgcactggaagaatgaaaaagggttaagttgtagacagctgccatagcgcacctatgcttgctatagcttggtgttgatcatcaaacatcagtaacacccttgtaatttaagtcttttatcttggagaatgcatgcatgtcaccttgcttgttcaccaaaataatggtcatgaatgtgtaatgcatgcatgtgtatctacgttttaatttattgcttgctgtaataaagtctaaatggtttcattttgcgagactggcccgttcctttttaaggaaaaaaatttgataaaattccaatttattaaactctgctctcatctttttttagaaatacactactggaaatttgttgtgtagttgccgaaaaatcgccactccggtatgtgcttttcctgtactatacagtgatgctcctcaattcatagatacatatacccttttctcctccctccccatttgaggaactaggtcccgatttttcgataggtattgataacttttaatttagcggaaacttgacagacacgatcctgccctgcaatcacaacaccatgtctcctttggttatcaaccgtgctgaaacattgaccttaccgaaaagactaatccttgcacgcgaattgaagaacataagtaagaacaaggtagattgtaactcaatctgaagatgaatagttaagatctcaaagttggcattacacaaatcaaactagcaacgaaactgcaatgatagaaataatctaagcaaaatcttattctaaactatgatggctactgaataaatattcttagggtcgccctaaggtgcacaactctttgggcttagctcatgacataattataaggcacaagacccaaatcagactcgaattggatgatgtacatggcttgttttgtagattttcgacagcaaagaaggaattttgtcgtgagacaaaaaccatgtgaaagtagattccataaaatttctaacaagtactcatgtaccttgagaatccttctggatcagctgctatgtccgtttgaagttgatgctgccgggagacccgaatccgaatctaagatatgcatgaacttcatctcttgacttctatggagcaaaagtgatctgataatattggagtagacttgtggaaggtcttggtttggttcccaatcaacctctatgatcgttcatttcttccttgcgctcggtctctttccctttacccaagcaagtacctttgcaaacgagaacacacaaaactcatagtgcaatatgtaacgcgtaaatctcacatagaaagcaggcacctttgcttgatgaatacataaggtagctatggtcatatccgagctagtgttgtccttatcatcctccctttcttgattagaaaccgtcatcggtttcatcttgtcattgagcctgttagggcatggccgacacggggacgtggaccgcacccccagccctccacattagaccatccgccaaaaagcgtcgaggagcacgcgcccgtagggaggcgtggaccttctgcacgtgcgcgcacctctgcgcggggagttgatgcgaggcaaagctttgggtctgggcaccgcgttgtgtaggtcgattcctcgcgttgttggagcggtcccccctctctcaatccacaggggtacaagcttgtcgctcttgcccctctcgccattcgctcggccggtttgcccctctctttctgcctgggttcacctcgccgtgcgacgcaccgtcggtcatcgtcggccatcattcgcaggcattcccgtaggtcgcggcgagcctcgtcgagccccatcagagaaaacccccaaaaaggttagttctttttatcctgaaccctaggtctgtacaccctagtcgccacccccatttttgtttgttgatttggttttcctttgcggttctaagaacaatctgtttgcaggtcgacatggatccgaatcctcccactggcttccccaacatgttcaatgacccagatctggtcaccaatcttggcaaatcttcgagccaacctgcctttgtccatccccagttcatgttcccctatgctcattcacagtttcgtgcattctgcactcaaccccctcccctctagtagtgaattcacgggcagcagcacaaggggctcaagatcttgccagcaccatagggtttcagcaaattcccacccccaagtgccaaatccctagctgccaattccagatcccccaccccaagctggtgatgacgggagggtcaaactctactacacacatgatgaggacctaaggctggtgagaatttttgtttcatcctatttattttggtttatgtattgatgatgctactgctgtgatgggtgaataattggttggttaagtcaattatttgtgaatgttgtacatgtggtggatgagtatcattggtttatttgttatttgttagtgagttagtttgattacttcaatgatgatgatttttggagtttgtagatgatagatatgatgatggtactgagatggattagtttgatatgatgatgttagtgagttgggatatttttatagaattgttaactgtgagtattgattggttttaaatttagttacttatttagggtgccggactttctgtnaaagggtttatgcntgtaggtgccagtgatatgcaaatcaaanccccttggnggggggnngttnnnnnaggaggaatacgcgncccgggtaagcgcggccgcgtttaggcannntttatatcacaaaccacacttatatacggccca

SEQ ID NO: 16596 - DNA, 4169 bp, Oryza sativa
attttatcatgaaccctaggtctgtacaccctagtcgccacccccatttttgtttgtctgctagttaagaaaaaaaacttttctatactagtatttctttttatgaattaagtgtccctttgaactgtaaaaattctacaagatttttgtaccgatcagttcagttccagccggaatctaaaaacttgccaagttacaaagatattttgcttgataaatcatgtcacattgtcatcttagctaaggattaaaaagtatatgtacctggggctatgtagccacatgtccctgcaaagatagtgctccagctagatgaattgtccttcaacttctttgccatgccgaagtcggataaataagccttaaaatcatggtctagcaagatgttgctacttttaatatcgcggtgcacgatcggatcatcacaatcatggtgcaagtaagagagagcttgagctatgtccatcacaatagtgactcttttacaccaatcaagttcctttgccaattcttggtcattccaaatggacgctaaacttcctctttcgatgagatcgtatacaagaaatttgcactgtgaatgagagcagtaaccgtgcaacttgacaatgcgacggtgcctgatttttgtcaacacttcaatctcagcaagaaatgctccaatgtcaaagtaatcttccattctgtgaagcagcttgatggcaaatacaccttttccttggatctcagctctaagacagatccataacttccaacaccgatgcagtatttttcatcaaaattttctgttgcgtaaagtgcatcttgaaacgcaacctttgcatcaaagttccatatggaaacgaagtctccagggatgatttctttgcccttttttgcaagttttcttctccaacaaaccactgtgatgcttccacccacgagccagatgcaagaaaacattgcaaaggcaagaagtagcctcggaacaagatgtttactgtcggaattttcatttgtatgtaaacctgcaggatttggatttgaaggttgacatggtgtcaagccatataatggatcaccacagatacctgtattatggtctagtgaaactacaaaaaacgcttcagttgtgtagaaaccaaaaatctgccgcccaaactggtgtatgataaattcagctcaagtaaacggtaaagcatcatgaaagtcattggtatggcaccacttaaattatttctgctcaaatccaactcagttaggtcggtacaatacccaagctcttctggtattggtcctgtcagtaagttgtttcgcaggcgcaacaaggacaaatggtgaaactgtcctatctgaggtggaatgcttcccgtaaactgattgctgcttagatctagaacaaaaagattacgtagaaatcctagttctggtggcagtatagcatttagcacattggactcaagtttcagtgttattaaagatataagtttcgaaaaggttgaagggatggggccaatgattcggttgttggaaagatccatgttttgtaagctcgttagatttcctatactttcaggaatggaacccgtgatttcatttgtggagagatacaattttattaaactccttaaatttcctatactttcaggaatgaaacccgtgatttcatttatggagagatacaattctattaaactcaaatttcctatactttcaggaataaaacccgtgatttcatttgtggagagatccaaggactttaaacttgttagattccctatggttgtaggtatggagccattgatattattatgatccagatctagcgcaactaaactatgaagcatccctatctcacgtggaatatgaccaaaaagattgtaaatccaagaactagaaaatacaatctagccaggtttcccaaactggaaggtattgggccagttaagctgttgtggcttaaatcaaggtactgcaagttatgtaatgtgtcaggcaagcaactgagtatcccttgtgacaaaaaattgttagaaagctcaaggaatcctaggttcgtaagaaacctatcgatggcgggatggatccagtgagcttattgtagagagatccaagtacgagagctcagcaagacgaccaatatcagacggaattggtccatagagagagttaatgctaaggtcgagaaagacaagatgaggcaattgtgcaaatcggagcttgctcaaaccaccggagatgttacatgagaaaagtgtaatgtttgtcacaactaggatggcatcacgctcatggccacggcgcaccttgtagctgcagtatatgcctgaccagttgcatgggctggttgcgttgctccattcctctagcccgcagtaggagagatcgccccttagaccagatttccattggagaagtgcttcagcttggcgatccaacgcaggatttgcaattgcaaggcaggaaagacactgcagcgaaatcagcagaaccagcaatagctcctgtgaggcaactagtcgtctcatcttgtgttttgagtggcagtgtaggtgaagctctaaaacacacatagtacatattgatgggtcgacagaaagcgagagccactttaaccaaggagaccttgactctgactgacttcaggtaaatggatcaataatgcacgctcttgacaggactagtggagtcagtcaatgccccaaggaatgaggtccacctccatcactccatgtgcaagacaatgaaatccctggctcatacaagaacacatcgttggcacgtttagaaaggaaatccgcatgtagcagttccataagttcatgtttagttgggaggttatttctctgtatggatatctttaacaatattccaagacattggttagagggcaatcgcatgcttttcgcccaccctaataagctttaattttttcttttggctgctcctcttaaagtttttatagcatctcagcaatagaccttattttgaagcccctaaaagttaaatgtgggctgcccccatttcccaaggacaaaaaaaaaaaaacctccaactccaccagtagcccctatttcttagcctctattcatgtttctcttgtattttaaaatacaatctatgtttacactatgtttaacaccacaataattcaaacttaaatatttctgacacgtataatttaaccatacttaaattcacaatttcaaagtacacaattcaaattcaaaatcaaaattttcaaacatgtaaatatggtgtggtggcaataccatatactcatttttcaaacatgtaaaatttttggagcaagagatgcaataaaattaaaatagactagtagcaaatgccaaaggcccatatactgtacactgctgctgcttcttttatgcatcaggtcaggaaaaagaccttgttttccaagtttttagaatattgagttattgatccaacctgtcactaattgatgcaattatcgatgagtaatgcacattagcaatagaaggttgatttctgcagattaatgattaaattacaagattcataaccatggaaataaaatgcaaaggggaaaaggggcagaaggaagtggagcagcgatgtgcaaagtatagatctagacgagcggcagcgtgggatgttgatcgccggagttgatgagtgcgaggttgacgacggcttacgcaaaaaaaaaggagaatggcagcgacggcgccatccaaggcgcgagagagacgagagaagtgcgcgcttgggattttccaccgcgccaacaaaaaagaggagagataggggctgggcctagagtccccaggattaagggctaggaggcgaaatttgggagctttccctattttggggccttttataggagccctggtggacctttatttttctttcccttcacctcaaaaactctttgggggctttaatttaggtgctctgcttgaagatgctcttcactctttgtggctttcatttgatttgtaatctgcaaacctttttctgttttggccatgtggtcaaacttttccatctctcaataccgtcgcagttttttttttaaaaaaaaactttaacaatataaaccagaagctcattgttttgatggagtttcttgatttttcttttatttccccaacaaaaaaagtacctgtcctatattgagctttgcataataaaaatgcaca

SEQ ID NO: 16597 - DNA, 700 bp, Oryza sativa
aaatatgaatcgtagaaaggtttatagaagaaataatgcaaggcattagtacctctatgttttcaacgtcctccattggttgtctgaagttagtttggctagacaccaactcacaactaccctgtcgcctatttgaaaagccaggtgaaggcatcttcatgttaaatgcctcagggtcacggttaatgttttgctctgatcctgaatctttcattgctaatgatgatttgagtcgagcaatctggatagagatagaatatatgcataccttaaacaacaaatgcagtgagaaaatatgatacaaagcatagtagcagaaacaaacctgctccttaagttctttaacttctccagactctttgttcaaccgagcagcgccaagttcaacagtggatacacgctcggcaaacttcaatgtgcttatgctttctcctaaagcatcactttctgggcttatatgaacaaacatcaaggttttgccctgacctcctgtagacgcattgttaaaattcgaggaaatataaattatactcagcagtcagtgacagcacatttaagaaattgcaagaaggttaaatcttaccaagagaatcttgcagaagttgtgttaatttactattcctgtaaggtacatgcgcactcttttgggcaagtgaagcaatcacatcccctaaagccgacatggattgttatatgttgg

SEQ ID NO: 16598 - DNA, 742 bp, Oryza sativa
ccgtgaaatgaaatctgaatgtcgatgcccgcagttcgactctagaggatcccccaccctcatcgtcgattgctttaggcacactctcttgtggagcctgtgattttgacgcgcgccttttttttgcctttctgggcgcagggagggaagagcgccagggtggtgaactgcgtactggcattgaagtcgtacggtgactggaaacaatgtggtggcaccgggccatggaaatacggggggaatttgaagccgtcggcttccggcaagtcgttcgtgaggaagaactccgagccattccggaggtgccaatcgatgaacgagggcgaggtgccttacgaggaggctggattcagcggtgattatcatcttgattccggtgacatggttagctccgtgcttcaattttgaagctgctttgtatttgtcttgttttgctagacgatatgcggctaaacggttaatgcttcgtgcagtcgacgtcacgccctttgaaaatgttggttagtgcagttttgtccgacaagaggcccgacgaagttccacaggtaggccaatcaggttccccattttttagtaagctgtttactggttcaatgggatacatgcaagcagctttccctttcatgtgatgctttaccggttccttggagtttttatgctattgtttgcctgcagctcttggagtccatgctgagtaaactcgtcgaggaattcgagattcgattgactagccaacatgaat

SEQ ID NO: 16599 - DNA, 4993 bp, Oryza sativa
  unsure (1)..(4993): unsure at all n locations
taatggtaatgctgtcgtatcgctttatntttaaancctttaatgtttaccnttttatattatttnnncgtttnncgtttgntctattgctttnnccccnnccccnnnnnncctggtgaaatgaanatcncatcntcgcagcccgcaggncgactctagaggatcccccaaaataaaaataaatttacaaataaaaaaatattatttttttaaagtatcctatcttactgtaaatttacaattcattaaattctaaagtgcagcatgtaaagataccatatcattatccaataacaattattacatcttaaacatcatacaaagtatgctataattctataatttattaaattttagagctctagaaatacaaaaatattaaatcatcatccacataattcacataatatgtcaacatatctctccatcattttttattcctcacttaattaatgttatttttctcttctctcataagtcgtatcaaattaattggttttagcctttagatgaataatctttaatccaaattatctccttcatttttttctctcattaagccatatcacctcaactgtttttagctcttaaatgattaattcatagtccaaattatcttcctatagttcatcctcgcttagttaatgttatttctctcttttcttattaagctgtatcacattgattgtttttatctcttagatgattaatctatgatccaaattatttgcctcttttcttctctcattaagccatatcatctcaattgtttttagcccttagataattaatctatggtgtaaattatatccctatagttaatcatcacttagttaatattctttctctctttgcgcattaagccatatcatatcaattgtgtttagcccttagaattaatctacggttcaaattatcttcctcattttcttctctcattaagctatatcatatcaactgttttttagaccttagatgattaattagtggtcaaaattaattatctctctcattttcttctctcgttaagccatatcatctcaactattttagcccttagtgattaatctagggttcaaattatttccctccttttcttatcccataaagccacatcaccttacttttacatttgaatcatcattattccatatactatttaaattatcataaatcatatcaacttatataagctgattccacctagttatccattatttactaaaggctcacagcaacgcgtgggtttcacctagtattaggagaaagagaaaagggaaaaaaccaaaaaaatggacaggatggacacccaagggcttataactgaagaatttaaccaccacactattgcggttctgatcaaagaatatgcctgtgctactatttaatccggggagacctcaacgccaagtcatttcacactaagctatgatgacttggcaaagtcacaacacctcggacgagagctcagcaccaatattgatggcactaagacattatagcttgatcagcgttatctaggttagcactaagccaacggttcatttttcaataagatttttttcacgggtcattcttcgaataagttttctaaaattatcatttttgtcaaaattttgggtacaacgtggccggtagcccccactgctacggaaaccatttctagataaacagctaaaatgcgtttggaaaggtggtgcagatgatggcctctaataaaaagcatgtgaaaaatgatgcaaaggacaacgtgccgccacagacggcaggcaaccttatagcggccgttgttggaagtcgatttttagagatgatcagctaagatcaccagctaggaaaatagggataggcggtcgactttaactgaccgtttctagcctctagaaatatgtttccacatacagccggtgacacaggccccagagctagcatatactgcacgggtaaattcccttatgagccgtgcacctgtgcattgtaggggaacatcatcaaaagtcgtctttattagtgcccaaactccatgccgttggagcaagatagctgctcttaacaaatcaaaagtactctagctaaagcagggagaagaggacagcacccaaaaaagatactttggtgccggttggaaactggtcataggtgtcggatttttcaactgacccagcagacgacactaacgacttcgattatcgtcgctgtagacatacatgtgtcggtttttatcaccgaaacctatatgttattcgatattataggtgctagttctaaactaaagtgtcatgtgactgtttatataggtgccggttctttaaaactataaatagcatatatgtgtcggttgttgaccagtctagacacgtggcaaagactataggtgtcggtttttaataaaaccagaactttatagttggcaagaaaaaaaaaggcagaacctaccaatttcacatacaaatcatacaatcacaaaaattccaataaattcacatccattcatcaacatacacacaatatagcactccgggatttagatggcgagctcttcggctctaggaggcgaccccccatggtgatctctcgtagccggcgatggtcacacctgcgcctttgagaggatgggatttctccctgggggattccatccgtgatgaggcgtggcggtgttttggttctccggtgcatttctcttctcacttcagttcttctccgtttcgtttggtggtggatgttccaagatctacttttcggttgacaccgtcttcggtggcgctttacctgagggccactattcatggttctccatcgggttttcaagttcaatctctaactgattggagtttctcgtttgtggtgatgggatggaggagagtggtagaagctcggggagaagggagtgggaggcggggcccgttcagccgccgcacattcctccccacctcatgtcaactccatcctccccgagcagacaccagcgaggacaaccccacgctttcccccgccgaggacatgctcgagcgcaccaagctcgcccaggttccactcacttcttcaggcttcggctaagtagagcagtaatggtgaggatgtgtgatgtgatgtgcccttgtgcttgctggtggtctgtattgtgatgtcaataagtgatgatgaagttgattcatttcatttatactaaaatttgcttttttttgttttgatagaactgatgaagatgacaatgatgaaatataaacaccggcgacgaaagtaatatgtgtagctgcagtgagtagcaactgtggggttgatgagaaaggtatttactttcatctataacattcatctgttttgtgggaaaatcttgccacaattaattatgatgaacgttgccttcacttatttttctccctggtagagttagaagtttcaatctgaatggtatctgtggaagattgtgggttatttttctaagttattatttgtgttgtaatgcttcaatgcggtgaataaaatacaggcatctccacattttattaactgaaaaactgctcaagttacagtgttgagttagatattgacagtctaacagatctagttatagtttatccattgagcaactagtcttagtttccattgctatgttttgcttcaattgtacaaccttttcatgtctttgcctatttgtttcttataactttatcataattgcaagtatattcaagtatcaactctaggctctgtaccatcaatcaactaaataagttgtcgctagttcttgtctcagtgctttgagtattgctttaattgacatgaaccatgaactgcttgtatgctaattaatcttaacctatgtttactgaaatatacacttgttctttttattgtgttgtatggtttgtattgcattagagataaatgtatgggacatgatgtagggcttgctgatgatttgtatatattgtgatggaaaaaggggtaaaggaattacaggtagtaaaaaaaagatataaccagtgtatacttactgggtaaaaaaaaatataaccatcctatatgcgcttttcacgtgaactcaagggaagtccacacagtaaactggtgaagctcctatgtcaccgttaccgtgagctggcacttggtaacgccgttatcgtgcattttttacctgttcccgtgtgaccctggggcacacaggagccttccggtctctagtagtgccttagtaatggttgatgggataagtagcattctagaaatcattatatttgtggataaattttactgttaaggatgctaatgtctgtgggcatccaccactccatatttggttggcacggtcagcactagatgtgatgccatggacttgtgacttaagttgtgtgctttgttcagttaactctatcgaggacctgctttatctcttctttcaatgttcttttgcacagagctattggaatgctcttgtttttctgggatacttctctgagcatggatagtatgatgattcatgcaaaatctcactatcagggatagtgttttatggaaaagtttgtgtatggtgcatggaatatttggaagcagaggaatggcttcattttttaacaaaaaattttttgctttgctttcctaaaagcaaacttttaaaaaggaaaccctcccccttttgttggtttagaaataagtggaaagaaataagggatgtaactcttaaaattggatataatttgggttgaaaacttttctaataataccctttaaataaataaaaatttctttaacaagcggggaacctttctcttgggggtttttttttttcaaaaaaacccccacattattgtttgccccgattgtcaatttaatccacaaacaacacaccaatttaaaaatcctgttgtttacattaaacacacaatatttagtgtgtgccaattctttcacaatttttaacccccttccacaaaggaccgtaattgttacaataccacatccttattcttcgccccgatatgcgctaaaa

SEQ ID NO: 16600 - DNA, 2479 bp, Oryza sativa
  unsure (1)..(2479): unsure at all n locations
agcttttaatcagatggataactttcttgaagaaaggtggacatttatttcttttttcctagttaagcttgaatatatatccttcgattagactgaaattgaaaatttaccctcataactcacatgcatgtaacaagaccccgccatattatgtcattggtacaagaggttaaatccactcctaatttttatctgagagctataaatgtgtgtacgacgacgtaattaacattccttttgaatatataatgacatgaatccaattaaccttatagagtagtattctattgggtatatatctggtccagattgtataatatgccaagcgcgcgcgtatagtgggaaggtataaagttgctggctgtctgtctgtctccgttgggtatgcatactcctacttaaaacatcattaacaaattatctataattttcgtctaaaaatttgtttttgtttcctaaactgaaaatagaaagtgaaaaactccttccttcaacagatagcctaaattcaatccccaaaacttaaaagtgggcccttctattaaactatcaatagaaaatttcgttttttttttctttcacgcgcgcagaaagatcgctatctcccacgcgcgggaacgaaggagagaggcgggaatgcgtgattgggagcgcctttcgcactactacattcaagatttttccaaacgggcattttgatttttccgtgcggttgtccggcccgcctggagccaatcgtctgggaaaatcggcattttcgcgtgcggacggtccaaccgcacgggataatcgatttatcccgtgcggttgtgttataccgaccgcacggaaccaaaaaaaataaaaaaaagtgaatcggtcgctcgctgccgccgcgtcgtcgacgtcgtcatctggcccgccgacgcgcccagctcgccgcatggcctggtcgcggccacgcccagcgcctggctcgcccagccggcgccttgcccgctcgctgtcacggccggctcgccacctggcctgttcatcgtcgtcggcccactcccggccgccgccttgcagtcatcgtcgtcatcgcgcacacgccacttccggccgccgcctcgtcgtcgttatcggccgggcgcacgctgctcccggccgccgcctcgccgtcgtcgtcatcgtcggccgtgcgcacgctgctcccggccgccgcctccccacgtccgcccgccgccgttgagcccactgctgctgcgcctgccagccgccgtcgaccctgccgccgagagccgcctggaggagaggaggtgtcggcgccatgcacaggaggaagagacgaggcgttggcccggccccctcgcctagccgccgctggccggggaggaggcctgtgggaagtcggagagaagaggagaagagataaggtagagagagaggtggaggtgggagtggttgagggagaacacataccgtcttggctggccgccgcccaagttctcctttcatctgcctatgcctcctgctccctctccactttggcttctctcatcctccccctcgcacacgcctcggcccctcctcccccccgcactcccccttcttcattcttctctcatccttcactccgccctccttccctcttctccctccgcgaccctcactcatcccccaccccccctcctacgctcgacctcagccctccaccccctcacccctcctctccacacccatactacctaccttctatcctttcactgcgcttcccacctccttactgcgattatggactctacgctccgtcaactacctttacggctcatatctgctcaatccttcccctaacctcttccctttccctcctgtcttatgtatactactcagtcccacgttcactagcgttggtacgctctagtaccggagttcccttccaactggtacttagcccgccctctccttcctgattagtcttacgcactcttatctgtgacgctcttcctgttccctctgtctcttctgccactgtgtccctaacgctgaatcgcgtcgcctgttctacctcgtcccagctttcttcattactcacttngtttaccgtacctcgacttcctcaccggttagcgtctactcgactcgttctcctctacattgtctctgtgtttccttactcgtacttagctcaagccgactagtgtcacctcgatacctcttcgacgtcctctcctanctcctctcactacttgcctccggccatctaaagcactctcgctctagcctagacgctaccagtcctacaagtcatacgctgccctctctcttgccttaacaccggtaaccgtgtantgctacactggccncaagcgtatgcgcggatactctcgtacctcgtatctggccgttctgctctttattggtcttcgggacaaccggtgcaagcgcgatacgctctcatacgacatctcggcggtatatctctcttatgtcgcatgtttctcttacatagctctcc

SEQ ID NO: 16601 - DNA, 3738 bp, Oryza sativa
  unsure (1)..(3738): unsure at all n locations
gtctgtcttcactacatctgtgtctacgcgcccccttcgttgtgtttacgtgcgtttgttgttaaagcatcgtgtagcgtcataagcatctgtttttatctagtcacgccccttcttgtatttgtttgtgaggtgtccgaccctactcaccaaagagaggtgttcgccacttttttttagcccaccccgccatttgttccaatatgaggcatgacagatctcccattgtatttagtgagaatcatctctcttttaagggtggtacatctttttattttttcgtggggcgcccttttgtaaaaggttctcgtcgcatatgtcccctatcttgcccatatggtttttttgtttcttatcaccaaacttgtttcgtatagacgtatgtataaatccctctccaccggtttatacgtatcgttcaataaatggcctgatcgggtccccacaccctgtacgaggaatctcttgtatcaaaatcttgttctgcgatttatctttattaagcccgttcttattgtccgatcagagcccctatccgttccttttaaacccaatgtttgaggtttagcccatgttaatatttgcttataattgtactattgtctggttgctttatactccctccgtcccaaattataaggcctatatttttttacatgatcttcaatgatatactttgaccaataatttattccatgttatgttcccaatgaatatgaaattagcatcacatgaaaataatacaaaatatgaatctagtgatataacatgcataatacttagcatagatatggttaatatgattattagtcaaaagctattgagtttgatttcctaaaaaagagagcgtcctataatttgggacggagggagtactttgattgctttatactagggcaagtaagtgtccatcttaccatcaattattagtactttgattgctgtatactatgcactataggttctggtatacatggtaccgatcaggtcgattaatcgaggttgatcgacgattaatcatcctggtcggtcccttggcgatcaggatcgatcagcgatcagataacattgcttctcacatcatggttttatccaccttctctatatgcatttttgtaacactaaatgcatttcttagaagattaagttcaccttaaactttccaacagattgtggtaaatcaattttctcgtgtagctgcaaatgaccgctgtcaattctatgggaatgtaacactaggaagggatgtatctctatcagagcttcggaagacatatgatgttgtaagttttagactatagccaagtggctacctttttgtggcaaactgatatatatcttttaccatcatttctgactgtgttacactgatgtatttactgctggacaggttgttcttgcttatggtgcagaaagtgataggtcacttggtattcctggggaggtatacctaacttggattcccttggtctctatgtcaaatattgtttatgggcaactgtagtattttgttatttgtgaacaattgttcggaatttgtttatgtatctttatgagatggttgtgtctaggtatcgcttaataaagagagtgcatataacgtttacaaccatactaacacaaagtgaaagagacaagataagttgtgtaatcaccaaataattgcatgcagggaataaaacactgaagaaacaaaattcatgtatttatgctgaaacaggatgtcacaagccattgaaataacaacttttttatttcggatattggcaagattgtgtagtgctatcaatttatcttatgattttcgttttgttttttcatcatgcgtgtgagttgtttattctcagtgtcatctttgttataggatctgaggggaatacattcggctcgagagtttgtgtggtggtataatggacatccagacatgtgcaacttggcacctgacttgcaaagcacagattctgctgttgttctaggccaggtgtgttgattttatgattgccaacaatctaacatgctgccaagataattgtttcatatattctatttctattcaaagtacagtctgtctatggtttcatttgaattgaagaactcttctggttcattaaaattggcagatttatttgtagatatatcctgtagaagtattcccagaattttaatggagaaaatcttcctttcatatatgatttctggctccttccatttgaggtttatgttgtctgcactctgcagtgcttacacttcagcattatatagctgtgttagacacataagttcaagtgttcattatcctgaagaaaatttgttttgtttctgctaacttactgcaaaagaaaatatccttttatgggaaatgtgtcatgtgcccagttaaatattcttttttttggcccatcctttaataccagttttcttctgtgcttctgatgatatgcagggaaatgttgctcttgatgttgcccgtattcttcttcgttgtacatctgagttggctgctacagatattgctgattatgctttggatgctctccgtggcagcacaataaagtgtgtccaatcttttgaatttgaaacaacatgttccattttttcaatcccttccatcagttcagttttaatggatgataatatttgtattgcattttttttgtatgtaaaggaaggtatacttggttgggagaaggggcccagtacaggcagcatgcacagctaaagaactacgtgaaattttaggtagtttgttttactgtttcattagctgtagcttaatgttgtctgtattagttttctgtcattttaaataatgaatgtttgatgcatatatgcaggtttgaaaaacgtccatgtcttcatcaaggaggctgatcttgtgaccttgcctgcagatgaggtttgtacaatgacatgaggtgtttcatgttgctactggacctgtaactgttcttttcgatatttattctggactagagacctcatttcctaatatttaaattcataacgaaataaaacttactcatccatgttggtagctactacagtaccttgctgtcaacatgatgccaatttggttttcggaatgttccatccaccttctctcttaggttatcttgcttgtgattgtgatagagcaaagcaatctgattgcaggaggagattaggaatagtagaattaaaagaagggtgtacgagctactatctaaagctgcaattgcgcataaaggaaagaataataatggccaaaaggagcttcactttgtgttttttaggagacctaccagatttctcccatcagaagatggtgtgacagttggtgccgtgcaacttgaaaagacttgtttaaaaggtcagatgtcagaaacgaaataccatatctttgcagactttttttaaacattattctgttggttatatagatgatggtgtggctggaaagcaggtcgtagttggaactggtgagtttgaagatctaaaatgtgggtaagtgctttggttcatactttcctgagtttttttgaccaggcagctctatggggtttcctagattcatttaatgtattttgtgtcttctgggnctgttcttnnnnngtttgngttgggttggaccnacagnctaataaacatggggggggggggngggnggaatataaataaccaaaaaacagcaaacangtaggaaagatgaaggatagnaaaaaaatacatagcaaaaaacaagttagtaatgagtgaaga

SEQ ID NO: 16602 - DNA, 1498 bp, Oryza sativa
  unsure (1)..(1498): unsure at all n locations
ccatttacccaatagaactttattcataatatctaaatccaggaacacccaaaccctaacttgatctatagaagagcaaacaagaggccattaaaccaggtggtattttttaataccttggtcttcttgccacaaaagtcttctcctgaaatagtccatcctatccctaacaccctgtggcagtctatagaaatagatcatgtacaaaggaacattggtcagacttgaattgatcagcactaatctccctccaatagactgaagtcttccttgccaacaccccagtttatgctccattttattttcagctttcttccagtctttatttaagattctctttttgtcaatagggatacctaagtaagtcatgggtaactccccaatcttgcaagtgaaaatctagctatatagaagctgattctccttagcctctccaaaacaaaacacctcacttttgtcaaagtttattttaagtccagaaatttttgcatctgacaggatgtttatgttcaggttgcaaaggttgcagtgtagtgcaaggtggtttgtcaggtcacaatgcccacctcagactacaaaactttttcaaggtttgtttgacacgctagtattttttttcctgatgcaagaagcgagtggtcagtgtgcaatgcctacatagcaggacatggtcttttttcaaagaaataccggatgccgttcgtgctgtcatggatcagaaacacggaaagaatggacgttgggcagctcagaaagaacgggtggaaaacaccctggcttttctggcctgacctatccatgttactgctgggaaagaatggatgagaggtatataggtataagagcatccccagcagcttctctatctggtcctccatccctaatttgacgcataggagcgaaaaaaccacctccagcaaatgcgccatccagtcatccaaaactagcgcatgcgccaaaaccggagagagaaagggtaaatatagcgtgtctctctcctcacgccatatcacaatggccgcgctcccgcccctatccggagttccgcgacctcccctccatcatcgtcgtcgctggcccctttttgattttttttttacacacgtcacctggcacttcatttgatcagctgccttgattcccaccaacactatgccattcactcgttcatccatccttgttagattggttgtgtgatgtttttcattattgcaatttgcaaactgatctttcccaaatttcccgttttagtacgaagattcgccaaggcttttgtgtattccctaataaaagaaaaggatgaaagaaaatctcagttgtaatattctaatgctcttttgttnnnntngtggtcgacatgcattcaaccggnnnggggggggntttaatnagaattctcaaattacgtaaattgcaagtaaccaanntnaagagtatatgtgtancgtaatgtacgtttagtataataatctgctcgaagttgcacgttgtgcggtgt

SEQ ID NO: 16603 - DNA, 1358 bp, Oryza sativa
  unsure (1)..(1358): unsure at all n locations
gcgtccanatangactnactcggtcngcacgcccgcaggtcgactctagaggatccccgtcctcacaatctggcgccgctgctggagagcagcagcccgcacggctgggagccgctgaactgcacgtcgaaagggtccctcgcgtcgacgaagccgcccgctccgaacgacgacgctatccatggcagctcgccgctaccaccctggtgttggtggtggctgccgccggctgtctggaggacgtcttccagcgcctcgttgagcggctggtactggagcggattcagcaagcagtcctgtgaagagctcggcagctcacctgtacaccaaacagtggcgagttctttctctgtcagtgttggatgatctatgagggctttgacctagctaagacacctgatggaaagcaatgggcaccttgaggtaggttcagaatctgtgcgttctctgaagccggcatctgcacggactgggactggatggtggttggtgatgactggctggtgcactgggactgcaccttgaattccactatgcggttggggaacttgtaggcgtcttgctgcaacttcaccaccagcgcctgcaaattaattagcaatattaattgggtgacaagacaattatactgccatgcatctgaatcaattagtaactacttttggacgctgtccaggtgctgctcataatgaggatgtcctttcatctgtgcatcaggcatctttcgatgccattgatggcaacttgcaagtctttctcagaatttcaggtgtttaccttctgtgttggagtaagagcattcagagtgaagcagtggcttccaacgatcacaccgacaacctcatggatgcagttgaagagaaggattatcccatgcccgctgcagtaggagtaaagcttgtcgtccagaacgcactcccgtgcatgctcaagggtggtttccacaatcttggttggcacttccactggccaagttaacactgggaaaaaaaaagggggggacactgtggcgcgcggttttctcccggaggggatttgtgggggggagaaaaatattatttttttttttttttgtttgtgcgcccccacacctcctgtggtggggggggctgactcattaagtggacagagaaggttttttaaaaaatagaagatttatttgggaaaagggaggaataatattcttacaacctacggagtccaaatgggcgcactcacccaaattctccgggggaggttgtaccagggtgaattctcaaaactgaaaagcttttggtncccccccccnnnnncncccccttnnnnnnnaaggggccaggggncatangcnccnnnttnnnnccnnccaggnnnccccc

SEQ ID NO: 16604 - DNA, 1311 bp, Oryza sativa
  unsure (1)..(1311): unsure at all n locations
ccgccccttgttgacttgcatagcangacgcccgaggtcgactctagaggatccccttgcacattgttgcaatacttcacttgttacagctttccattctagcttttccgggtactatgccaaagtcagttgaaactttattcctggtatctctataagagcagaattggctttaatgtaattctacaagacatgctagagaacaaaattgactgccctcactttcatccctagtttgaagccatcaggatttcattccaggttgttatcttctctctaggtttgttcttcagctcacctgccatcttttccttagaatcaatcttttcccagccatcaaaaggaacaaagcggatgttcttttgttctagaatctcaaggagtcccctcctgccttgcttttttgaatcagaaggtcccatgaacaaccccttcttgtcatcttcaaggatgctcgccacctgtatataacagtaagtacaatatgtagatagtctgttagtgaaataaaattatcagctaaccaagaactataactcctgaaaaagagtcatcatgattatttcacaagaacagccttcctctacaaagtagctattccattgcaaagacagtagtggatgagcaaatccacaataattgaggatttgaggtgtatatggacctaatgaacttccatgttggaactttcaaaacgaataaatcaagctactccaagatatatttgaaggcatttgttgagtaaaccaaaaaaactactataagatttaaggtaagcaactataaagttacactcaggcatcagggtgcccataaaccttctcaaacacaatgatagaacataagaaaacaaaaaggcccatactgtttcttcggcacaatggagatttgtggcaactatgccagttggccctttttttaaccatcccacccaaacaggccttggttcactggggggatttctcggaattttacatttatccttctaaaaaaaaaacacccttggggccgcctcttttttaaaaaaaatattttgtgggggggggggaacacacaaacaaacaaatctattttcttcccctccccctctcttgcctaataaaaagatgtgggccacttgtttccacaattttttagggttaagtgttaaaccaacccacaaagctctctgggaggtaaaaccaaaggtattatttggccctcctgttttttcaaggggaacctctccgggcggggttgttcctcatntttttnaanannnnnnnnnaatcatcnntttncgngggnnnnnnntnnaaccnttacacccca

SEQ ID NO: 16605 - DNA, 1237 bp, Oryza sativa
  unsure (1)..(1237): unsure at all n locations
cttctccccctatccttttccttggatgattttatcatcacctcgaagcaagcgctctcttgattgctgtgacggccatggctggtttggggcctgatcacggtggagacccatccttcctctgtgcaatggatttttgtccaagaaccaaattattccattagccttttcttcggtttgtttgcgtttcatctttagaagtttcagcatattgaaggacagccacaggaattcagcaactcacaaactggtcactagttttggtctatcaatatactgttctacttggaagtagtagtagcttgcaagaagaagcgaagatattcatttgttcctgcaaaatttctctcatctgatctggattccggtctgttgttttcttcagagccgtgggatcttggtggagttcagtttgggttggaacacgatacaagcctgcaaccatgtgcaaggagtgtactcgtactactaattttctgccaaaaatgccgaaggatttgtccaagagaccgaggggaactggtcttgggtggtcaaggtataggaaaggaaaagaaaacctgttaggagctttcttgatgagattgcttctcttgccgatgcttgtgttactggctgctaatctagcctaaatttttcaacaattttttctaagagggagttgaatttttttcaaaggaaatcgtaccatttgcatgtagacacatggatcgctaatcttggttggacctgatcttgtgggacgcctataatttgaatttcgtacgaaaacccttgcaaataacacgggcggcggtatttttattttattttccgtaggggtttggattggacaaaattacacttgtgttacccccctgatgagaggcttgttcaacccaattgttttgcggatggaaggaaattatttgtatttgtttctcacaatgaggacctcttacaccactggtggtggtaaaagcccaatccccgttataagccgagctctcccggcccaatgtcgtggttacccccttgttatattgctcccagggtggccggactcacgagaactcaaccctggcatgttggtgttgttgccctttttacagagcgccaacaattcgccgcctctattatatatatatggcgattgccacacatgagngaatatgttgtattttcggtgtaaggcgactaattacaacacatcctcgtcggcgcgttttcaggtataatggacaattactctgcgact

SEQ ID NO: 16606 - DNA, 622 bp, Oryza sativa
cgtggggaagaagctagacacggtgcagtgcagcgacgaaagaaagtcatcttcgccgcccaccagctgcaggggcccgcatctctctggtgggaccacttccaggctacgcagccagaggggcagccgatcacttgggctcgcttcaccgccgctttccggagaacccatgtgcccgccggagtcgtggctctcaagaagagggaattccgagagttgaagcaaggcaaccgctccgtgatggagtatttgcacgagttcaacaacttggcccgttacgcccctgaggatgtgcgggaagatgaggagaagcaagagaagttcttggcaggaatggaccccgagctgtctgttcgtctagtctctggggactatccggattttcaacgactggtggacaagagcatccgcttggaggccaagcacaaggagctggaatcgcacaagcgccgcttggcgaacttccgcaatcagcagggtgctaaccagagggtccgctacaccaatccctatccagggggatcctcctcgcaacagcaacaacagcagcagcaacctcgcccagcgccccgaactcaattcgtggtgcgcgtcccacagccgcagcagcagaatcagcaag

SEQ ID NO: 16607 - DNA, 670 bp, Oryza sativa
agttgctgtggaccccgaaacagtgaccgccgtcaccgattggaagcaacccaagacagtcactcagattcgcagtttcttgggtttggcaggatactaccggaggttcatcgagaacttctccaaaatcgctcgacccatgacacagttgttgaagaaagaagagaagtttgtgtggagcccgcaatgcgagaaggcgttccaaactctcaaagaaaagctggtttcctcgccagtgttaatcttgccggatactcgcaaggatttcatggtgtattgtgatgcttcgcgccaaggattggggtgcgtgctcatgcaggacggtcatgtggtagcctatgcttcacgtcagctacgacctcatgagggcaactaccctacgcatgacttggagttagcagcggtggttcatgctctaaaaatctggcggcactatctcattgggaaccgctgtgaaatatatactgatcacaagagcttgaaatacatattcacccagtcggatctgaatcttcggcaaaggagatggttagaactcatcaaggattatgacgtgggaatacactatcaccctggtaaggctaacgtggttgccgacgctctaagtcggaagagccattgcaatactctcaacgttcgaggcattccacccgagcttaatcaacagatg

SEQ ID NO: 16608 - DNA, 15738 bp, Oryza sativa
  unsure (1)..(15738): unsure at all n locations
aggcaagtcatccaatatgtttgatcatattgtacccaatttataaatatcccgcatttctattaaatgttgcattcttttacaatgtcatgtgggatgggtcctactactcagccatatattgatttccttatgccattgacaacttcggtattaaaatgactagatgttggtttaggaagtgcttagccatgcttagttcaactagtacacaaatgggggtcacattattacatagactttgactatgagcatagctttggattggtgccaccgcgatggtgttagttaattaaaatacactgaatggcgggctgtgagtgcatggttttgctggtcgcacccatggcagttaaggaccggttcacgggaaaccctgggagacttaccgtgcttaccacaagcgggagtgggtaactgcttgatctgaagtatagctcgaccctttcctaggcaccggtggcgagggtgggcgtgatggagttgggtcagccggggtgtccggttgtctagctgccggattcaccgcggcgcaagaggggactgcccactgccttttgaggggtgggggtgaaaccttagcgtggtgtggatggttaggggagggttatgcggagggtcttgtcacgattttcccctttgcagtatcatggtgatacttcggggcatggcgacatgtgtggaatcgtgtcttgtgggtacagttgtacacctctggccagagtaaaactattcgaatagccgtgctcgcggttatgggcgatcaaccagattcaccgtgattagtctcacccctagtttagcttaatgaactgctgtagttcaggtggatggttgggcctgttgcaacgtggtgtagcgttggacagtgattggttaatattgattaattactacagctgttttactgctttcaactactgctttgaaatgcctactttatgcagaagaacccctagcttcctttggttatatcctgcatcatacctcctcttccggtatgacttgctgagtacagtgggtagtactcagtcttgctctcttttcccccacaccagagttgaagttcttctcagttggagccgtctcagaaaggttggtttcgtcgctgccgtcaaggtttgcctgtggagtggagtggcccgctgctgaagtcaagcttcccggtttagctcgctttaatctttcccgctgcatttgtaatcttttatattttttgtaagacgtgggtctgtatgtcaacaattgtcgtttgtgtaccctggcttgtcctggacagggatttaatgcacattcagcttagaaattctggttcgagaatttctgagtgtgacatcacccatcctagccgtgaacaaaagtaccgacccaaccttgcctacggtaggtatcccgaacaggcaggctaggattgagcccctagcaacaggatcttgaccgggtgcgctacacacataggggtgagaccacccgcgtactagtccagtgccatgacatctcgactaacggacaccggcccgtgcagccttcatttgcctagacatctcgattaccgagccgcagctcacgtagccttcatttgcctcagagatatccatcgtcgcaacgaattcatccatctctatccgtgtccttttgttcaggactagaccgagcaccgagttaagccttaccaattagtcatgtggttagtacggtagtgctttgcaacagaggcctgagcttaatccttggccggggttctacttcccacaactggcatgcacccaaaccccaccggaaaacaggttttaggggttttgaaagaggaagagtggggcatgtccaattccaccataagccaaccattccatagtgtccaagtgatatgagaattcccaaagtctaaagttataaaaccacctagtgttgcctaattaatcagcgaagcatctacctaaattcatacaaatggaaccatgaatggagtacccactagttggggttttattttccttgggtgaacaaggtaataataaacaataacaatgataaggctataacaaggattaataggaagtgctaaataaaatagtgataatgcgggaatttaaataaagcggtaatgcaataatttaaatcaaaatagttttatatactaggattcaatatgctcaagggtgatgcgacttgccttgctcagagagaacggccttccgaaccatcggcgacgacagcgaaccacgcttcgggaacctccggaatgacataagctacgcgaagcacacaagcaaagctacaagcctataaagaagcaataacaatacataaaaagaaagcacatggttctttgggttataacaaacattaggagacttgaacgggtcgattcggggttcgtatgaccaagacatggtcatccaaagtttactgctgttacatgaagatttgcggattattataattaggctttgcaactataaaacatgtgtaagcgctagcctggaaaagacaggaaggctgcgcttgtcgacatgcagaccccacatgtcaacccaaaggcccacggtagaccgagtacacagagacggtccacgggtcgacggaagcggaccctgtttgtcaaccaaggtgagtggccgacaaacggactccactagacaccatgcgggctgcacacgtggaaaccacgcgactaccgagcgggcacactaacacggtcaccacatgcacacatgaacgactactgacaccggtacacgggtacctgggtcgacaaccgcacgacgggcacggggcgacaccaaaaggacgagaacggggtagcgagaagagggatccttaccaccacaagacgaggcgcggaacgacgatgacgaacgggcgcggcggagacggctcggggacaacggaggcgaacggtgatggaatgacttcggtggtgatccttggacgaaggcgagacgaggcctgcacaaggcttgacgacacggagccgaggacgaagacgacgaagaggctgcagcacacttgacgaaacgcgatcggcttgacggagggacgaacgccatgacgaccgggaatgacgagagggggatgatgaccgggccggtggggaggcgacgagggcagccggcagcagctgcacggatgcgaggacggcatggaacacaccgctgcaatgccgacgacggtggcggcgcaacaagatgacgtgccggcgaggaggatcggccgaccggaggaggggatggcgacgtcggatggagacgacgatgacaaacaccggcggggtacgggtggaggggaggcgaggccgagggcgacgttgccgctgcgatgccggaggagacgacgacgtcggccggcacacgggcacggaggaaggagtggccgaaggaaacgtcggtgaggtggaaggagaggctagggtggaggtcgatgccgcggtaccgaaggaggagatggcgacgtcggcaactggaggtggtgcagtggcggcaacaccactggacgtcgacgaggacgcgcctccggcggtcaccgcgcgaaatggagggcaggccgggggagaggaggcggctgcgacgccgagaatggtgacagcacggcctaccggtgcatgggcgaggcggcaaaggcggctggaggtggccggcgacacgggagagagagaggagggctgcggggagaggcggtgcggccacggggtggcacgggaggaggctaaaatgagagaacagaggaagaggatcccattttatagcggaggggagctagccgggcacgggagagggcggaacggcgccgagaatggctgccggcggccatggaaggtggccggggatggcgcggccgttccgggcgattgagggtgccattcaaggtggaaattaggggggattgaagaggaaggaaatgggattaattccccctaatcaatttggaaagaagggaattgattcgcgcagatttgagggaggaaattgatagggtttcatgggagaaggaggagccgggcgggaggaggacgacgaccgggtgggtgggacccaccagtccgcgcggtcagcgcgcgtgcggcgcgcgtgcgcgggagggctgcggctcggcttgggccggggcaggcctaggcgggaggaggagaggagggagtgggacgggaaggagaggagagaagtgcggcccgggagaaaaaagggagggggagggagatgggccggggggggggagaggaggcccgagagaggagggaaaatggagggaggagagaaagactttgggatgaactcggcccaaaggcggaaggaggattatttttagttttctttttaataaactttgataaaggttgttgttgcttatagttatttccggtgttctgaaaattcaagtaaaatttgagggctcctttttgaccaaggagaatttaacaaaaattctccgggccacattcgaatttttcttgtttgctttttaaggtttgccaatttcttttcgagttttaattaattctattattccttttagagaatgatttttatttcgagatgaatttatcaggacgtgacacctctggccatagtaaaactattcgaatagccgtgcccgcggtaaatggcgggttgagcaatatttttcgtgattagtctcacacctctcacaataattattgatgctataactggtaataatttgcttagctcctggtttggagttagatctgtacagccgggtatgtttgttcaggatggttgggcctaagcagcatgggtgtgctgttcagtgttgattaatattgatgattaattactctactgttttactactcttaaatgtttgcttaatgctagttttccaaatgagcctatattatgccatccttcggtatccttgtgcacttgcatatttgctgtgtggcttgcggagtattccatgtactcaccttgcaataatcaatcaaacctcagttgaagagaagtcgcaaagaagaggacgtttggcttatacccaagttgagcttcctgtgggagtggagccggagcttcgctagaccatttatccactgctgttttttttttttttgaaagatgcaatgttattattttgatggacttgtatattaaaatgtcagtttgtgtacctcggctgattcctggacgaggattttatgcacaaataacttcagaaattactagtgaatttctgggcatgacacgacgtgtcgtggggttgtgtcttgtgggtacagttgtacacctctgatcagagtaaaaactatttgaatagttgtggccgcggttatgtgcggtcgaccaaattcaccgtgattagaatcacccctagattagcttaatggaactggttagttcaggtggtggattgggcctatctcaacgtggtgtagcgttgagcagggattggttagtattgattaattattacaattgttttactactttcaactactgcttttaaatgctagctttatgcaaatgacccctagcctcctttggatatattttgcatcataccttcccttcctgtatgacttgctgagtaaagtggatagtactcagtcttgctctctcttccccacaccagagctgaaaatcttcccagttggagctctcccggagaagttgggttcgtcgttgccgtcaaggatgcctgtggagtggagtcgccccactgcaggagtcaggctttcaagattagctcgcctttctcttttccgctgcatttgtaatcttttaatgtttctgtaagacatggatctgtatgtcaacaattatcgtttgtataccctggctggtcctggacaggggttttaatgcacattcagcttagagattctggttcatgaatttctgggtgtgacaagttggtatcaaagccgaccttgattgtaggacaagctaactggaaaccctaagagcccttcgaatccttttcatttgcatatgctctttgcaattggatttgtttcgggaaaatgagggtttgttcttgtggttgatgggaaaaatcttgatcgcttgttcaattgaaatttatgaaaatgagatcagtctagggttttagtaaaattctagtttgaatttatttgacagtcaatcgggatttatcggggtatatgcgttaattcgtgtctagacttgatggggcgcaatctttatgcgcatcattactactatgtagtatctattttgggcattaatttattgcttagttagtgtcatttcatgtacaatgctctatgcataaaaaaaatagtgcttggctagatacttgagttatttgttgttttgtttaatttggatttgagcgtgcattagttcctaccccttgtcttccttagatgtcagacctgttccttgatcacaagtgtcgctccaagctttcagagacaccgcctttagctttattgtcttcttagttgtatgcttggtttctgtgtttaggtttgttgcttgtgggttagtcggcggtcgatatcatgtgtcagtggtatggttgcctgaattaggagttgcttgcctcctttgtagtgttttaattcaagtcagatcaattgcagttaaatttataataaagattagtttctaagccatctgttttcttccttttctcttatttctatctatcccctcaagatgaagtcaaggaatggtcgcagtgtctccaatgacgccagtggcagcgaagagcagatcaatggagcacacgccaacggtgcaactggcagcagttcatcgccaccgttcgagaaccgaacgatcactcaggtgctggacaaccatactcagatgatgacaacgatgacgaaacaaatgcagcaacattaccatcagatgttgcagcagacgcagcagaaccaacagtttggtcctccaccatcgcacctgtccaaactgttagactttctccatataaagccactaactttctcaagcaccaccaatccaatggagaccaacgaccggctccattctattgagaagaagctgaaccttttccattgcaacgaccaagagaaggttgcttttgctacacaccagctgtagggttccgcttatgcctggtggtaacccgtccagctgcaatggaggttacgtgggtagagtttcgtcaaagcttcaggaaggcataggttcctgaggggattgtggcacaaaaggagagttctgttctttgcaacaaggaaccagcatagttacagagtatttgcacgagttcaaccgcctcgggcgctacgctccttaggacgtgtacaccgatgccgagaagcatgagaagttcatgtcaggtcttgatgatgaattgaccaattagatgatctccagagactctgaggactttgagaagcttgtggacaaggctatccgtcaggaggagcagcacaacaaaatggaccgaaaaaggaagactagtcagttcagggtttccccggggaacaatcagaagcctcgcttcatgactggacagcaggttcgatcttccaccatgattatctgtcagcaccatccctacaacagcgtcaaccacaacagtagtgggcagcaccaccaccaccaaactcctcacccactaatggctccaattcagtcaggtctgccagctatgtcagctaagttagaacagcctgttgacggtcgttaccgataaatttcgacagtcactataactaaaataatggagaactagctatgcatacaatgtatgtttatttccaaataatatatttccacttgtacttggagaataacatgttgcaggaatttatcaaataaaataaagagaaaatggagaaaacctcactcctaagcaagcaaatggataagatgggcccacatgtaatacgagtaactgggaagatggcaagacagaatctgtctcgcaacttttcccaactaccgtttacacatccaacggtagaggtgtaccattgcttcgctctctcttgaagggtgaacggaaataatttccaccatacaatttcttgtctcatgccacgaatcttaaggcatgagtagacttgttcaaagtcccgtagatgatggtggagattttctagatctaagccagaaaaagggtttttccttaaccatgctgatgagttcggcgcgaatttcatagctagttgtataaatcggctccgatgaaggaggtggctcatagaattcgcccctaggagcagacacctcgaagagaggttgctccatagttgagaagagtttaaaaggaatgcttctctgggtagcaggggtggaggaagaataaaaaacaaaaaagagatccgaggatgaactgggttcggaaatgattagcaaccgttccccagcaacgacgcaagatatgcttgttggtaattcttatggtcatggataaaatccgcaagcgcacggatataccgatgtctaagggaacgtgtacggtcagatcttcttccggttcatccaaggacacctagcaaaggataggctaggatagagaggatttactagtgagaaacagtgtcaagggaaagcttatgtttaatcctaacacaatacttcaggtactggcaacccgctgttcctagatgtcgctctactacgtacccggtcagggaggacttaagtgatcttgagggctgtcaccacctccacacctatgttggtatttcttacgatcacagatagaatccgcaagcgcacggatataccaatgtagcacttcccctatggagtattccaagggtatcgaatccaagggaacgtgtgtgattatctcttcctccggttcatccaaggacacaaagctaacgtgggcagagggcagagaggatttcctaatgagaaacagtgtctagggaaagcttaagtttaatcctaacgcaatacttcaggcgctggcaacctgctgttcctagatgtcgctctactacgtacccggatagggaggacttaagtgctattgagggctctcaccacctctacacccacctcaaacgtactgtgggatacgcagcaaccactggagattaattacccagacaccacgtctacgcaattaataactactctagtgccgatcaaacactaaagcaatcactataaataaatggactacagtgaacaatgatcccgtatgctaattaggaactaaccaaaatgtaattctcactaagtaaatcttaaatactcataatgatatttctattaaagcagagtaattaagaagatacaaaagtagaaagagattaccgacaactccgggattcctccgattccttctaccttactctctcgctattctaatatgcaataaagtacactagagcctcttgtaatttagctcatgctttggtgtgtgtgaatgagggagaggagaggggtatttattggtggagagttgccttgggagagtggagatgctctaagcatcctatgagcatattccctctagctttatctcctcttgacaagtgtcctctctatgacggtttccactggtagaaatggccacaaccatcattgggatgagtagtacaaccgtcatactgaatatgggctggactgggccagctaggggttcggccgaaccaccctggttggctcccctggcccacatctttcttcaggatgctgacatgtgggccccacttcttgatgctccattttttggctcaaaatgattgcacattttatatattgtagctcaaaaccatgtgagtttatcagagcaaaatatatttccattctttatgctcattctttcccaacttaggtggttgatcacctgcatataaatatacaccaacactcatggaaattgttagaaataaatcctacaactatgttagaagtttcacatttatggttttatgcaggttttgacggctttattttggcacttaactgccgtcaacaaaaccccccacactttgctctttactcgtcccgagtgaaggttaaggattaatgtggaataaaatttcccaagatataatacaagtacacaaattattctaagccatacctgtacctgtgaactattgaagtgtctaacttaccatcttgggcaattgatgaatggaacgatcgtgactcaagtcctccttaatcctcctatcaatctcttgggatttttatatattttcgcaaagtagctatactcttcgaataaatctctcaaatcactcacgtggtttgatttgcggatcctcaccaaggcatggttgccgatttgtccctattctaaaaggctatataggtggagctcggtagggatcaatcggggcatacctgcatcaggtatattgcaaagccaaaataccagaccgaaggagatagcaagtcatactttctgatcaagaatgtgcatgtgtgtgatatgtgtatgtgtataaaaaaaatgtgtggatggaaaaggaaaataaaagataacaactcctttggtatacctcctcctccaattctttctcttggaaatttaagagagtgcatggctatttcttttcctctttttatttcatcatgccccatacttcgtatgagcaagattctctttattattattattatttttttcatcaatgctccattcttgtatgagaaagactttatttttttccttctttttcatagccacgcctttctctctgtttctttttttctttgaaagaattttgaaagaagaggcataaatgacatggagtatttattttgtggataatggataaaataaatgatggatgagggatgctagcttccagtgtagaagtttagcatagtgtgtgtatgtggagtgtggtgtgatcttgatcatgaaagtatgaaagcatctcacatgggtgacaataatttgacaaagctgaatgtaatgccaagcagcctaaacatatatcagaattttgcaatgagaattatatatggccttagtaggtaataatatagttactaaggagtattgctcgaaaaagtttttattttcgcaaaataaaatcccaagtatcatgacagttgtataggaatttcttttgtcataaccatatcacataacttagattagcaaggttccctatgatagatgttagttcacaagtgacaagtgttagcaaagaataaaaagtatacatgattaatcataggagaactttatttgttgagagttaaggttttcaattttcatttggagtcaaactaaatttgtattcaatttttccgcaaaagtttaactcacaaactagggaggataaggaaggagacatgcaaacctgaccacacggtagaagggtgacagagctggtccaagcaagggtcgggcgaacacttggttcggccgacctagccaggacatggttctgattgccgaattttgtgcgcggccgtcagctggtgttcatcaggttgtcatgttgagttgatgctattgcgcgtcgggagttccgaaaagactcccccacacttgttttgtaccttgtctttattcaacaaaaaccataaaaagcaaaatgggcttccaccgggttgaaataccggtgagccaaattttattcaaataactctaggcgcatgaagtgcctattttttatttcattttcatttttttatttttttatggcaacaatgagaatggtggttatcctagcagggcggatatatgacgtcatgattcacagggtgtttgagattcttaccagattgtacttaccaagctttgaaccaaatcgatggtaacaaagtgttgcatttgctttgcttggttccctgtgcatctctctcataaaccaaggatcttggtatggatgttggagttattgtacactgctccttagttgtcttttttatttcctgcaaaatgttagtggacaacaaatacccgagggactacaaagatttgaaaagattttatcatagcctcaagattagttgttcacatccatactaaaaaggaattggattctaaacttaaagcgcgtggatcccaccaatttgccataattttattttgtcatttttatttctttttactcgagagtcatttcttttattattaaaaacatttttttcaaaaaaaaatttttgttcaccaaacttttattcaagcaaaactcatacagggctgagataaacttatataacatagaaaaggagcatttggaaatatacgtaccgtgtaccttgagaggtgatatgtttctcctttgtatgttttggcaattgatttgttcctggcccttgacttacctccagtgtgactcgtgcttgagaactcacccatcagattgaataatttcctgtaggggttagtccacgaagggtatacatccaaagtccatgaaagtactggctctacggttcatttaaacaaacttgacaccatgtcaactttgattaaagcaagctatttatcctaagcatcatgcttaatttgagaagcctatgaatgtcgacgaccacccaaaccataacatatgaaaatagaccgaggacgcataaccatgcatgatcaagccagactcaactagagataagtatgagtaatagtaatggtgaatcttttgttgtatacctgagtatatttacagccagcatgatgtatatgttgaaatctttggagcggtggcacggtcaaatgtgattgttgttctttcctccatctggatgcaggttgtggcggaggaaggcactttgaccatgccaactcaggcgagtggttcggttatgcacacatcttgggtgcaagaaccttatgccttgaaggcatgttccgtcggcataatgctaaagagacataggatgcatctcttttcgggcaagtatgcaagtgctaactagagtggagcagcaaacagctcgaaaagaagagggcatttcctcttggttgtatgtatgtaggtgttgcgggagcgagaagttgtgcacagctaggattggatgaaggctaagccaagtcgacacatgagctcaagagaggggctgggtatagcctggcagcatggttactactagcaaggtgtatagccatattttaaagactcgcacataatgcggtctttgatctaaatgtagtccgtttgctctcttgctgtcctcttctcccatctcttttttttatatcttccgtctctcttttcttttcattttttttcttgttcttttttttcagcaaggtaaaactaacaccaactgcaaaccaagatggccttggttgatggaactcatcatacaagctcgtcaacctcccccacacttggactttgatgtcataagacatcaaaaaccatgtgtgttatgttggagtcttcataaagtgtgtttcaacaccaaggatcaccaaaatgtacatttgatgtagctcccgagttcttaggcatcgtacatccctcgttcttaatctcaacctgaaatggttagtgaccaagaatacccgaaggtgcataatatcctaaaaattggttttttcttttattggaaagacaacttaccaagataatccggggtatctcccggcagtgctttctttatggtcacaagctcgaccatggagacatctcgttacaagattagtgccacaaacacatacgagatttgcaatatttatgataaacaaaagcatccacaaccaaccttctaaacatgttagagataaggcccgaaaggtggttatggttctcacacaaggaagtgatactaatcggatagaactctaaggattctttatgtaagcatgaatcctagggtattttgaaagagaagttttcatgctcatttgtggagttctcatcctccagagttgatgtctctaacttgtccatggcttgcagtttctccttctcaagagatgcatcgtgcaagaacaaggttgtttcttgacaaatgtcgagaacaacattttgatggccagagggacaaggttcaggctcgataggaggttgtgatggtggttctttggactgcaattcaacggtcttgccagaatctttttgaatgaaatgaagatcatcctgttctataatagactcaggggactcatgaagcagaactgccattgcttcctctatcggtgcatcatcagggggtatgtctgtcaacgagttctcatgatcgttatggagatcacccctgaagtctagagcgcatcccgaagtttgaaattcttcgttcttcggtgctgatggctcgagagaggataccttagctgaaactgatggtgtggaaggatttgattcagatttggctattgaaggttcctcttgttttgacaccgataccttctggaggggttcagaatgttgctctatgaaggaggtgatttctagaattcggtctagaatttccttgccttcggatggagttttgtgcatgaacgtccctccggcagtgatgtcgagatggaatgcagactccctacctaaacccgcatgaaaatgctgtaatagcacgtaattgggtatagacagggttggaccagactgaactaaattagtgaatctgaaccaggctgcaccaatcgattctttatttatctgctggaaactcagaatttctacatgaagagtagtaatacgggttaattagggggcanangcactattgcttggnaagggggggtcccccaaangggnttaaaaaaacccccaaaatttgggggtttttcccctttttttaccccaaaaacccattttctagtaccgtttacacacccaacggtagatgtataccattgtttcgctctctcatgaagagagaacggaaacaatttccaacgaacagtttcttgcttcatgtctcgaatcttaaggcacgagcaaagcttttcgaattcctgaagatggtggaaggggttttcctggcctaaaccagagaaagatttctccctaaccatactgatgaattcgatacgaatttcatagctaggtgttaaaattggctccgatgaagaaggtggctcgtaaaattcgtcccgaggagcgcacaactcgaagagaggttgctccatggtcgagaaggattgaacaggaatacttctatgggatagcaggggtagaggttgaataaaaaggtaaaaaggataaggatgaacaaggttcggaaataaacagcaaccgttccctagcaacggcaccagaaatgcttgttggtatttcttacgatcacagatagaatccacaagcgcacagatataccgatgtagcacttcccttacagagtattccaagggtatcgaatccaagggaacgtgtgtgattatctcttcctccggttcatccaaggacacaaagctaatgtgggcagagggcagagaggatttcctaatgagaaacagtgtctagggaaagcttaagtttaatcctaacacaatacttcaggcactggcaatccgctgttcccagatatcgctctactacgtacgtggacagggaggacataagtgctcttgagggctatcaccacctctacacccacctcaaacgtactgtgggatacatagcaaccactagagattaattacccagacaccacgtctacgcaattaataactactctagtgccgatcaaacactaaagcaatcactacaaataaatggactatagtgaacaatgatcctgtatgctaattaggaactaaccaaaaagtaattatgactaagcaaatcttaaatactcagaatgatatttctattaaagcagagtaattaacaagatacaaaagtaggaagagattaccgacaacttcgggattcctccgattccttctaccttactctct

SEQ ID NO: 16609 - DNA, 7557 bp, Oryza sativa
cgaaccctggttggctcccatggcccacatctttcttccggatgctgacatgtgggccccacttcatgatgctccatgttttggcttcaaatgattgcacattttatatattgtagcttaaaaccatgtgagttcatcagagcaaaatatatttccattctttatgctcattctctcccaattttggtggttgatcacttgcatactaatatgcaccaacactcgtggaaattgttagaaataaatcctaccactatgttggatgtttcacatttatggttttatgtaggtattgacggcgttatttgtgcacttaacagctgtcaacaacctacctcaaacgtactgtgggatacacagcaattactagataacaataaactaaacaccatgtctcagcaattaatatctactttagtgtttataattcaccaaagcaatcactatattttagttgattatggtgaacaataattgtaacgccccgattttcgttcgggatttaaaatcaattaataatgtattttctagaaattaaataaaagttaaatcaatttaatcaagtgaaatattgagggaattaaactttcctttaaaaatcattggccgagaatattttgcaatattttttgtgccctgatatactaattttcggaattttcggagctcaatatctaattttaaaagtcacaaagttcatttaatcaattaaataaatctccccttcctccttgggccatttttggcccatgatcttttctccctccttggcccgctcgcacctctctccttccctcctccctctcgggccgacaactcccttctcggcccgatcgactccccctcgcgcaaatcgagccccactccgcccacgttgagctccgcgtcgccggccgttgccgccccaaattcgccactccccggcctccccgtgctctccttatccgtttcccccatttttcccaagcccgccacgccctccctcgctctccccgcgccgatccccatcgccgcccctcgctggcgaccttccatccacacgccaccaccactggcatcaccgcgctcctccacgccccgtcccctactccattttctctgttagcatccgaaacaatgccgccacgcgcaccacctctctccaccgcctttgccgactccgacagcgcgccacccctgccatagccactgctaagccgcgccactgccaccatcagcttcgccgcatcgcgtagcaccccggcaaccgctcctctccctcaaaccgcctctggaacaaccattccaccgcatcacccgagctccaccatacgccgcctccagccgcgtgccgccctcgccttagccatcgccgcgttgctccgccctcacctcttgcctacagcgccgtgcagcacctcggtcaccgttgttcatcgccggaaacccaccggagctcggtatctctcggccaccggtgagccccaccattcctcaactctccggcgtggtattctcgccgctccggttgcctattttccttcctaaccactccatcttcttccccaggaaatcccggcctccatccgccgcgggccgtcgttgaagcaccgccatcgccaccaccccggggagcccgcggccgcctaatccttgccgctggccgcctcctcgtcttcgtctcgccgccccgttcgcacggtgagaaccgcctcctcctcctctcccttttgccgccctccgcgcgtcgtcccacgtcaccggtggccactcgccggccggctttgagccgtgccgtgccctagccgggccgcccttggccgttggatcggctcttggccgatccgagccgtcggtcccatggaccagtcccgtggtccgggtccacggtgccgcctaggccgcggtgggcttggtccaccgtgtgtcctccccttggagccgctgatgtgtgggcccgcctgtcgacgccggccctttgctgacgtcagcgcttaacttgtcctttgagaaaataaataataattgcgcaataaatcattaataattctataaattcatttaaatggctcaaaacatctaaacttcatttctaattcatacgaactccgaattgagccattcaacttgcaaaattcatctaaaatatagatctacatgtttgtttactttttatgtactgttttcttggtgtttattagtgtttttccttgttttgcgtgccagcgtgtagcttttgccatttcggaagtccgcggtcgctaggataagtgttcggaagatcaaagtgaagaagcaaggcaagtcacacattccccttgagcatgttgatcccaatttataaatgttttaccgtttgcaaataaatatgcatgttttgccaattacatgggaatagggtttacctatctgctcgcttgtgccatgtttacttgttatctgtcctttctcaacccttgggtgataatttatctagctcgtgatacttatgttgatcttgctagaattatatgtatgcttagccttgcttaattaccactagctcacaaaatgggataattacatcattagacatttagtttcttgacgagctgcgtgctcgagacatctacccatgtttcatggtcgtaattattgtaggatcgagatgttgactagaggggggtgaataggcgatttaaaactaaatgacacctaatcgaaactaacctaagttgctaggcttggtgagggtcaactctaactaagtaactaagttatgttttgcaatcctagggtgatagtggctctattatatctctaggaaagtaaatcacactcctatgtcaatgtttagcaatcctagggtgaaatgatctctagaaatgtaaattgcacaaatgtaaatgcaacaagtaaatgagacaaggagacaagagatttttcaccgaggttcggcaacttgccggtttcctactccccgttgaggcgatcccaactccagtgctcaacctcgaagccaccgcacgcccccttcgtcaaggggtgggcaaggcgggagccggcccatggagaggactacccaagcctcgatcactagggtagttcttccttcactccgaaggtggtgtactccagaccactcacaaatcggcgccgggcctcctccacaatcttctcggagaggtcaccgggcaactcctccacaagccgtctaggaggcggcaacctccaagagtaacaagcaatgacccggcgtggagatgatcaatcaagtgccacactagctctacaatggaagcaaatgcacttgactcttggctagaacaacctcaaccactacaatggatgaacactaagctcaagggtgtgtgagagaggtgcaagggatgtatgcaattgaattaggtgccaagagagcccccttgctgctggagggggagtatttatattcctaccaaccaaaactagccgttgggggcgaaatcccccaactctgtgctctgccggtctgaccggaggtatgtggccggtcagaccgtgctactctacaacggctagaaaactagccgttgtagccctgtcagagggcccatcggcctggccagtcagaccgacattgagtggctagtcagaccggcctcggctcggtcagaccgccatcagctcggtctgaccgaatacggctccgtcggctctgtatcagccaccccgagtagcaccatcccggcctccagcgggctggtctgaccgcgcatgtgccgccggttagacttccgtagtatggccggtcagatcggccagggcacacctgtcagactggcactgtgtggccggtctgaccgcccctgtcaggccgaacccagtgaaatgaaaagtgattgagtgtgtgagatgaaatgtgagcacaagtctaaatgcataatgacctaatgtggcaattaaaatcatccctttgctaggtcattacccctacggcgaaactaaaaataaactagcaaatttaatcgccctacacctcgatcaattcaaaaattaaagcactagttttaccgtcttctttccctttgctttgcgccgtcaattttaatccatcgataatcatccatgcgcacatatgacgtggacctaacttaaaatatatagctcaaagacaacggttagtccacaattagtgcttgttattaattaccaaaatttacaacgggggcctacatgcttcaatctccccctttttggtaattgatgacaaacaccacaaatatatataatcaaacatagaacacatggacatatattgcaatgacaatcaaaagctccccctaaacgtgtgcatatcaatcatagacaacaaatatggagccaatgcacacttcaatatcacatttcaacaagcacaaacacataagcaatatttcaatgtgaacttcaagaaatattcatccatgagcataagatggtcacatatatatcaatatcacatacaccatccatcatcacacaagttcacatcacttaaccattcaaatcagataagtcacaaatcatcctaaaagggctcacaaaaaaacataggctattacaagaccacgaagggtccaaatgacatagagtccaacaaaacgataaagaacacacaatatagagtaatagcccatatccatacataatatagcacaaactaccttaacctattaaatatgaggtgactaaccttactagcactagtcccaacccacaagacataaagcacacctaaggacatctttctcctccttttggcatcatgtaccaaaaaggtcttcattcttgtggaggagaaggaggacgcgccgaagaggaaggatgaggagcatcaggaagacgatgatatagaaaagcttgggtgctctccaacatttggactcgagaatccaatgcacccactctagtgtgcaatctccccatggaagcattcaagtctccaacatcggtgcgcaagccacaaacatcctcatgcaatgcttcttgcccggtagacaagcgttgaatgctttcacttagggtattaatagccccaagtaccgggttgaagtattcattgggttgcgttccaaagtaagcaaactgtggatggaagaaagcatttggatcatactcaggaggaggaggaggtgctgagcttgagctagctccaggatgagaagagggcaccgtcctaggagcacggggagctccaagctgaaggcggggcttgtactgcttgtgcttcttcaaattttgcccagcagccccaagcttgtcttgaatcaacctcatgatgtaaggggcataatagattccctgagtgaaggtccccttggagatggcaatctcttgcatcatgagagacacaatgtcgaactgacgaccctgaatgattgcatcgatgacgtgccaagccacccccctaatgtcatcattgttgccaaggcgaggaaggatggtagctctcacaatcctgttaaccacactgggatagtcctcaagccggcaaccttcccatgtgtgtaccacactcaatcttcataaaactgagagagatagtctatggagagtgaattgtgagtgtgctcctcatgcaaatcatctccaaagtccaagcgaatattgaggagccgccggaattgcctccgagagatagaacactggagggtgttggacatccacttcatctcactatagtctccagccacccacactgtagcatagaactgccggatcaaatattcattgtagtcttgcttgagggtcacaatccggtcaataccaacagtcttgaagagatcctgcaagctctcaaactctggagtctcattgatgtctctccaagaaatccacttatgctttgcaaatgctttccctgcataaacctgttcatacacagtcttctggaaagcggtgtgaaaacggggatccagggtgtctcgaggcctcaagaactgatcatgatgcctcaagatggtatactgcgatggattcctcatgttcaccacaaactggatgaagggatcaatgtgcatatcatcatttccttcatcctcatcctctccacttccactgacatcatctccacttgccacctcactagccccctcaatatttgcttcaacctcttcatcactttgagcgtaatcctctccgctcgattcctcagtctcactcacgggatccggagtgggcgtacggtgaccatggcgagtgcggggaggcatcactgtcaaagaacaaaggatgataggatattagcaataattctagaaacaatttggagaggtaaaaatttgcctacatcctgtggaggggtggtcagaccgcagccagtagggtggtcagaccgaaggcatcaggccggtcagaccgcccatggtggccagtcagaccgacggctgccggccggtcagaccggcggctgacccatggtcaaaccgcttgtgtctccaggcagacctcctcccacaagtttaagcatccaaatattttcatatctacacatttgagtctaaaatttgctagaacaatatagcacaggattggaacatgaacatcaaagggttgaacctatttcatcaagattggaacaatgggaaagtaccctaaaccctagagattgaaatagaccgatttgagagcaatgcaccagagggagagagatttaccggttggaggagttgaatcacaccaagaaactaccctctattggtgcaaatcgaagaacacctcgtgcttcacctagggttccatgccatggatcaaaaactcaacaaaaatacaaaccaatccatggaatagagagtggaagcggaggagagtcacttacagtgtaaccggagagaaatccacggtcaaaccgaggggatttggtggaggaaggagttagggtttgaggggaggtgagagagagttagaaatttcgagatggggaagtgaggggatgagaaggagagaggtaggtgcgggtagaaaaagagggggaataaaaattccctgggcccacctcggccggtcagactggccctatgtggccggtcagaccaccacagctggccggtcagaccgcgcatatagcgccggtcagactgccaggcccccagctggctgtgcacagcccttgcacaagccggcaacccccacacaatgaaatttaataaaaatttgatttttggagcaaattttgaaatgtgtgagtttaaatattgtgaaccatccataatatttgaagattatgatgatttgcaacaaaactcacttaagtgctaggaggtgaccttttatggtctataggggtttttgcgccaaattggttttcaaataacttttgattgatttggtttttgaaataggtttgaataccaaaaacatttcaaaacctcctctctaccaatttttttttgaaacttttctcaaattccttctcaatctcaatttggggataaatttcattttggccagaactaagaatctagtgtcttcaaaagagggccaaaatggcattttcattcaaaaataatttttcttgcaatgtgaggcttggaaaacatatagggaaccttttgaaacattttccaagagatagttttc

SEQ ID NO: 16610 - DNA, 1930 bp, Oryza sativa
aagtagagcacatgcaagagtgcaaaactcccccttaatgtgacatgctccatttttgcaatgaagaaccaaatggcaataattccaaagcataagcgcgaatgagagcaaatatacacactgcaaaagaagcaaccatggtgcaccatctcaagccacattagagaaatctatgacatttaactcattcctcaacttgcaaaagcgggtttcatcaagaggcttggtagagatttcggctagttgatccttggttcttatgtggctaatgactatgtcacacttggaaacatggtctcttaggaagtgatggcgaatgtcaatatgcttggttcttgaatgttggaccgggttatgggctatctttatggcactatcattgtcacataggagtggggttttggtgaaggatatgccatagtccaacaaggtttgtttcccaaagcaattgggcacaacaactacccctcgaaacatattccacctcggcggtagagagggctacggagttttatttcttggatgaccatgacacaagggatctaccaagcatttgtcaactaccggatgtgctctttctatccaatttgcaaccggcataatccgaatcgaaatagccaacaagcttaaacttagcaccttttgggtaccacaagccaatagtagaggaatactttaaatatcttagaatccttttcacggccactaagtgacactccttaggagcggcttgaaaccgagcacacatgcaaacactaaacatgatatccggcctatatgcggtaaggtaaagcaagctacctatcgtggaatgataaagcattaagtctaccggtttacctccctcatcaaggtcgagatgcccgttggttgccataggtgtcttgatgggcttcgcatcatccaaaccaaacctcttgagtagatccttgatgtacttggtttggctcacgaacgtcccatccttgagttgcttgatttgaagtccaaggaagaagctcaactctccaatcatggacatctcaaattccctagacatcatatcaccaaattccctgcaaaatacctcattagtagaaccgaatatgatatcatcaacataaatttgacacataaagaaatcagcaccaataatttttgtgaaaagggtggtgtcaacttttccaattttgaaatcctttgacaaaagaaaatctctcaatatttcataccaagccctaggagcttgttttaaaccataaagagcttttgagagtttataaacatggttaggatttttaggatcttcaaaaccgggaggttgttcaacaaagacaagttcggcaatttcaccatttagaaaagcacttttcacatccatttgaaatagttttatatcaaagcatgatgcaaatttaagaaggatgcgaatagcctcaagtcttgccacgagggcaaaattttcaccgaagtccaaaccttcaacttgtgtgaaaccttgtgccaccaaccttgcctttttctcaccaccaacccgttctcatcttgtttgttcctatagacccactttgtccctatgacattgtggcctctaggtctttcaaccaaagtccacaccttgtttcttgcaaagttgttgagctcttcatgcatagcattcatccaatccggatcacaaagagcttcaactacatgttttggctcaagacaagaaacaaacaagtcatgttcacaaatcaaatcgacatgagatcgagtttgaacacccttagtaatgtcacccaacacttggtcaattgagtgactcttggaaagagcggtgtgtatacgtttatggcttctgcccaaaaggaatcggaaacaccatattcatcaagcatagtccttgccatctcaatcaatgtacgatttttcctctccactacaccatattgatgaggtgagtaggtag

SEQ ID NO: 16611 - DNA, 4126 bp, Oryza sativa
cactggcttcataggatcgacggcaatggcaaaggttggaggctcagttttgagaaattctgataacttgcactgttgctggactgtaggtacttgaacgttggttgcccctgctgggttgttccaattctgtaatagttgaaaggctgttgccaacatgttggtttggttaaccacaatttggattagctctggtgaggtttcgttgatgcttttctcattcccattggcttgggttcttgagtcatcggatccatcattcccatagcctttgttaccagtgttatccatctgtcacaaggtagagattgagaggggaagcatacaaggaaagaatagaccagaactagggataagaccttaaaggaactaactctttttgttgatgtgttgtttgttttgcttattctgcaggttgattaagcaaacaacctagcatggttacatcaccacccaccgatgcaatccacgcgctacacacacaagcaaggaaacacacgacagacgaaacactagagggtggcttaggttctgcgacgggttctccaagatcttcactccttcacagctggcttcactgcttcctgcacttctgaagcggatcctccagtcttccggagcttcggcaaacaattggcgacatcttcttcttcgcaaagctggccatctagtactagttgaaatttgaagaaggaagaaaagagtaaaccttttgcaaatagcattaggggaaggagaaaaagaggaactttcgcaaatagttttatttataaaatatgtccttaggttttatccacttggcttaacctacagtcgagatggctctgataccagcttgtcgcgaccgggaaaatttcattttcccgaacgctagtgtattaatccccgtcccaggaaaagccggggtacaccatacaaacatgatataaaagacacatctttattatatcgataatatttacattattacaaaggcacttaaggcctgacaatcaaaaataaacagcagcggactagcgggcctacggctccatcttcacaggcgctcaactggggtataagccaggactccacctaagacttcttctccaaagcttctcttactgaagggggaaaagattgagcaagaatgagtacaaccacagtactcagcaagccacaccggagatgcataattaatgcaagggagtacaaggggataataaaataggggttaagttttgcagtaaacagcatttaaaagtcacttagttgcccaaagccattttataaagacgatcctagagctacacagtattattaatcaaggtcgtgaaccctcacgaacctgccttaacccaaggcctacgatgattcagaccgaactggcaacccgaccctgggtcacagctcgtcccaagccaaccgaggccaaccattccacattttagttgttaagcaaattttaagaattaaaacactgacttgggtacattgctcggcttgcccataaccgagggcgcggctattcgaatagattatactctgatcagaggtgtacatctttacccacaagacacatcttcctcacgtgtaaccacgtgccacataccaccacggtatacggacggaagacgtgacatagtttccaacccatcctagccatagacaagagtaccgacccaaccccacctacggtcggaacctccgggacaggtaggcaggattgagcccctagcagcaggacaccagccctgtgccatgacatctcgactaccgggccgcagctcgtgtagccttcatttgccctggagaatgtccatcgacccccgacttcatccacctccatccgtgtacttttgtttataactagactgagccacaaactaagccttacccactagacatgtggaagtacggtagtgctttgcaacagaggcccgagcttaatccttatagtggccggggtgctacttcccacaactggcatgcacccaaaccccaccgaaaaacaggttttaggggctttgaaagaggaagagaggggtatgtccaattccaccataatccaacaattccatagtgtccaaatgatatgagaattcccaaagtctaaagttataaaaccacctaatgttgtcctattaatcagcgaagcatctaccctaattcatactagtggaaccatgaatagagtacccactagttggggttttattttcctggggtgaacaaggtaataataacaatcacaataataaggtcataacaaaggtaaataggcatggctaaataaaacagtgatcacgtgggaatttaaataaagcggtaatgcattaatttaaattaaaataattttataaactgggattcaatatgctcaaggatgatgtgacttgccttgctcgctttcccaaacgtcggcttcaacttccacgaagagcggatcttccgaagctgcagcgtctacacgaccaacggaaaagaaacggcttttactctaataaactccatataacaagcagaaacaaagcacaaaaatgggttcttgacttcttaaggaaaaattagagacttgaacggtccaattccgagttcaaatggccaagttatggccatttgaagtttatatgctctttaaatggatatttgcgaatttcttcatttaaattttaattaaaaatcggatttattgcgtcagccgaggggaggggcgcgcggaccgggtccacgggagtggggcccacgcggcagcctcacggtccacggtggaccgggtgcacgcggcttgcgccggccggcgccgtgggtcccacgcgtcagccgcacccgagggcgcgggcggctgacggccgggccccacatggcagccacggggcgcgcccgaaggcggcctcgccggcacagccgacgggaggcgacgcgcccgcgccccgatggtcgccggcggcgacctccggcgcgacggagcggcggccgagagaggggagggaagggggaagtgaaacggcggtcctcggctcaccccgggtcgacggcgacgacgggaacggcgaccgaagcggagagaggcggcggcgcggctcgggtcgacgaggacggtggtgctccggcggtcggcgggcggaacggaggagtggacgaggtcgacgaggacgtggcgaagccgaaggaggcgatgccgaagcgggaggaggtccggggcgacgacggcggcgaaccgaagctcggcggcgacggcggagagagaggacgacggcgcgagctcgattccggcggagagagagagcggcgagtggcggaaacggaggagggaggcacggggagtgcttaaataggggtgggagtgagagagggcggccggagaggaatgaaatcggcgcggcgatctcgggctccattgatgcgccggcgaagatttcgggagggattccaaacgaatccgagggagagagagggaaaagaggggggaaagagagagggaatcacggggagtgatttccccctctttattgcgcgcggggacggcgggaggcggcggaattcgcggcggcggcggcgctagggcacgggcgcggcggcgggagcggcgggaggaaagggatgacaggtgggccccacccgtcagcgagggtggcgggcgggcccacccgtcagcggcacgcgcgcggggaggaggccgattgggccgcgggggagaggagagagagggagggaggtgggccgagccggcccaagaggggaagggggggaaaaagaatttttagggtttttctttttataaaatcattttaactttgtttatttcttaataattattatttgtgctctgaaaattccactaaaatttgagggctctttttagaccaaggagaatttaacaaaaattctccgagccacatttgaatttttcttgtacgtattttagtgtttgccaatttcttttcgaattttaattaattcttttattccttttagcgaatgatttttaattttgggatgaatttatcaggacgtgacaaatccaccccccttacaagaatctcgtccccgagattcgaggaggctagcaagaagataggttgggcggtcttctcttcttggtggacttctttcgtcgcgtcttctataacaaacttgcctagca

SEQ ID NO: 16612 - DNA, 3195 bp, Oryza sativa
caaaaattctccgggccacatttgaatttttcttgtacgtattttagtgtttcccaatttcttttcgaattttaattaattcttttattccttttagcgaatgatttttaattttgggatgaatttatcaggacgtgacactcgacaacaatagacttatcatgcaaaaagaacacccaagtatagcgagaataatcatcaataatcacaagacaatgactatttccaccaatgctgctataggttgttgggccaaacaaatccatatgcaagagctccaatggtctagatgtggacatgatacttttagtagcatgagaacatgcaacttccttgccggcttgacaagcactacaaagcttatctttctcaaacttcacatctttcaagcccacaactagatcacgttttgaaagtttgctcaattgattcatgccaacatgggctagcctcctatgccaaagccaacccaatgaagtttttgcaattaaacaagttgtcaaatttgcttcgctagaattgaaatcaaccaaataaagatttccatatctagaaacaaaaacttcttgtgggaagaaagcacatgacaagccaagatcacaaatttgagtaaccgaaagcaaattgatatttagagatttagcaagagagacattatcaattgccaaatcattggagatagcaattttacctaacccaattagttttcttttgctattgtctccaaatgtcactttctcttattctttcccttctacttcaaatgtggtgaacatagccctatcaccggtcatgcgttgagtgcatccactatcaagcacccaatgactccaaccggtgcggtagttcacctacaaaagaagatcaaggtcttttaggtacccaaacttgtttgggtccttggaggttagagatcaaaactttgggcaaccaaatggcattctttttaccactgagtataggggaacccacatatctagcaacaatgctaccatcatgagccttcctaagcatataatgagaatcaaacatgcatgtcatagaaggcttaccaccggggcaatcattcaccaaatgcccaacctcacggcacttggagcaatacttaccattgctcttgacaaaacgagtggcacagtgagaaggtttcttacccttctttgaaatgaatccaagtccctccttgttaaggatgcaccgttgctcactcaaaatcttgtcaagagtgttcttatccttgaagcacctctccaaactcttgttgagcttggccacttgctccttacgctcattgttctcaacaacaagtgaggcatcacaaatagaaacacaagagctagagctagagctaggcatatccacatgtcacgaccggaaataacccaacgggcgttccttacgtgcgtgcattattccttgtcccaggaggcaaggtacaccaaaagttgatacaactcagagtttaacaagctgaagcgtaattaattaatttattacataggcggcgaaggcccagcacacacaaagacaaatgggaaacagcggaaggctagggcgacgaccacaggcgcttgacggcaggcacgagctagacaccaaagccttcatcttccaggaattcctcttctgagtttgggaaaaattgagcaagactgagtacaaccaccgtactcaacaagacacacccataagtgcagaataaatgcaagggagtacaaggggggttgtaatataaagggttagggtttgcagtaaacagcattaaaagacacttagttgctcaaagctattttgtaaatacgatcctagagctatacaagattattaaacaaggccgtgaagccacacgaacctgccttaacccaaggcctacgatgattcagaccgaactggcaacccgaccctgggtcccagctcgtcccaagccaacccaggccaaccattccacattttagttgttaagcaggttttaagaattaaaacactaacttgggtacattactcggcttgcccataaccgagggcacggctattcgaatagattatactctgatcagaggtgtacatctttacccacaagacacatcttcctcacgtgtaaccacgtgccacataccaccacggtatacggacggaagacgtgacatagtttccaacccatcctagccatagacaagagtaccgacccaaccccacctacggccggaacccccgggacaggtaggcaggactgagtccctagcagcaggacaccggccctgtgccatgacatctcgactaccgggtcgcggctcgtgtagccttcatttgtcctagagatgtccatcgacccccgacttcgtccatctccatctgtgtacttttgtttataaccagactgagccacaaactaagccttacccactagacatgtgcaagtacggtagtgctttgcaacaaaggcccgaagaccggtccttatatggccgaggtgctactatcaaaaccatgcaccccgagcccagcctaaaaccattttgaggattttgaatagagggggaggtgtgaatccaattccacaataatccaaccattccatagtatccaggtgatatgaatatcccaaagtctagagttgtaaaaccacctaatgttacctaattaagcggcgaagcatctacctaaattcatactagtggtaccatgagcagagtgtccactagttggggttttgtttaatctagggtgaacaaggtaataataacaataacaataataataaggtcataacaaaggtaaataggcatggctaaataaaacagagataacgtgggaatctaaataaagcgataatgcaataatttaaatcaaaataattttataaactgggattcaatatgttcaaggatgatgtgacttgccttgctcgctttcccaaacgtcggcttcaacctccacgaagagcggatcttccgaagctgcagcgtctacacgaccaacggaaaagaaaaggcttttactctaataaactctatataacaagcaggaacaaagcacaaaaatgggttcttgacttcttaaggaaaaattagagacttgaacggtccaattctgagtttaaatggccaagttatggccatttgaagtttatatgctctttaaatgaatatttgcgaatttcttcatttaaaatttaatttaaaaagagtttattgc

SEQ ID NO: 16613 - DNA, 2851 bp, Oryza sativa
tgcaaaaacggattacccagttcctggtcctgcgctccatggtgtccaggattttcactggcttctccacatacgtcaaatcttcgcgaacttcgatttgctctgagtcggcctgctcggatggcactcgaagacatttcttgagttgcgacacatggaacacatcatgcacgttgcccaaggaggcgggcagctccagctggtaagcgacttctccgcgtcgagcagtgatacgaaagggacccacataccgaggtgcgagcttcccttttgtctgaaacctgtgcacacctcgcaatggcgtgacccgaaggtacacaaaatcatccactgcgaattccagatcacggcgacggttatctgcataacttttctgccgagactgtgccacctttagattatcccgaatgattctgactttagcttcagcttctctcaggatatcagtcccgaacacttggctttccccaacttggtcccacaatagtggtgtccggcatttgcggccatacaacgcttcgtacggtgccatctgtatgctggcttgatagctgttattgtaggagaactcggcgtaggggagactcttatcccatgtcttcccaaaatctaggacacaagcgcgaagcatatcttctaggatctgatttagacgcccggtctgtccatctgtctgcgggtgatacgcggtgctgaaatttaagcgggtacccaactcttcttggagcttcttccagaaatgataggtgaactggcttcccctatcagatacaattttcttaggaacgccatggagactcacgatcctagcgaagtagagttcagctagtttgttccctccataggtggtcttcacaggaataaaccgagctaccttggtttgtcggtccacaactacccatatagaatcataaccgccctgggtttttggaagtccggtgatgaaatccatcccaatttcatcccatttccattctggtacttggagaggttggagaagtccggccggtcgttggtgctctgccttgacacgttagcacacatcacaaagggccacgaactctgcaatttcccgcttcatactaacccaccagtatttccctttcaagtctaagtacatcttcgtactgccaggatggatggaataaggactttcgtgagcttcctgaagtatcagctgtttaagttccttgtcgtccggaacgcatacacgatttccattccatagggttccatgttcatcttctgtgaaaccagcggctttaccttgtttcatattcttgaggatcccatgcatatctggatcattcttctgagcctcgtggatttgatcgagcaaggtaggcttggcttccagcgtagccaagaatccacgatcaactatgcttaggttcagggcttccatctgttgatgaagttctggtggaatgccacggacgccaagagtgttgcaacggcttttccgactcagcgcgtctgcgaccacgttggccttaccagggtgatagtggattcccacatcataatccttgatgagctctaaccatcttctctgccgaagattcagatccgactgggtgaagatgtatttcaaactcttatgatcggtatatatttcgcagcgattcccaatgagataatgccgccagatttttagagcatgaaccacagcggccaactccaaatcatgggtagggtagttgccttcatgaggccgtagctggcgtgaggcataggctaccacatgaccttcctgcatgagcacgcaccccaatccttggcgcgaagcgtcacaatacaccatgaagtccttgcgagtatccggtaagattaaaactggcgaggaaaccagcttttccttgagagtttggaacgccttctcgcattgcgggctccacacaaatttttcttctttcttcaacaactgtgtcatgggtcgagcgattttggagaagttctcgatgaacctccggtagtatcttgccaaacccaaaaagctgcgaacctgagtaactgtcttgggttgcttccaatcagtgacggcggtcactgtttcggggtccacagcaactcctttagcagatatcacatgccctaagaatttgactttggacaaccagaactcacacttgctaagcttggcatacaattgatgttcccgcaactttcccaacaccagacagagatgttggcggcacaacgagacgaggagccggcgaggaggagcggccgacccaagggacgtctgcgatgaccaggatggagaggaggcgatgccgaagacgacgtcgctggctcgccgctgcgatgccggaggtggtggtggcacggccgacggcgcacggggatggcagaaggggctgccgaaagcgacgtcgacgaggaggaaagagaggccggcgcggcggcggcgggctccggacgaagacgggcagcggtcggggtggagggtgaccccgtggagccggggaaggagatgacgacgacggctgccgcaccgatgaggaacagtagccggccggaggcaggaaggtactggacaccgacaaggagaccgctctggcgagcttcgggcgaggaggaggtgaggccggagaagagggcggcgtcacagagccgagggaagcgacggcacggccgaccgacgctcacgcgcggccgcacaggcggttggaggcggccggcgcgggggaaagagaagggcgacggcggggaggggtgatacgaccatggggaggctcgggatgaggctaaaactatagaacggaggatggggattccattttataggcgcggggagggagccggccaggggaggagcggggaacggcggtggagtatgtggccggcg

SEQ ID NO: 16614 - DNA, 9541 bp, Oryza sativa
ttgaattatgtttcttaaaagaaccaacttatcccactcgacatgctttgacgtcttcccaaatgtctttactggtggacttgtatttttctgattattgacctgccaaatctgaaacttctttggtggatgtgattttaatcttgactctgtagattatctttgaacatatcacttggttcataactgggaatagctctcacgaacaagcaactcggattcactttttttacatttggttcacttcccactattctcttcatgttgtcctcagttagcattcaacgtattcctttacacctttaaccttgatgtgttctttcccgatttctcttatcaatcacgtttcgacctacttctttgcccggtaataaacatctttttcgatatcttctatcaatcatcttttgacctttgtcaactaagtactcttcactccgagagttgtggatgcttctggtgacgatgtggtacttgagcctgctgcctttcagagaaaccttcaagtggttcatcaaaagctagactggcggttgttgcctttgatccaaagaagacacatctgaaactcttagtccaaacaaaagtctctttggctttttaatctaacacagatcgcttcattttcttttctatcaacaactaggttacttgatttatcatagattatgagcttacggatatgagaccctaggtctcctttgtcagtaaacaattacgcacataatcacatatccgcatcttccaaaagaatccacatagatcttgtctgtattatacatttctcccttattacatgaatactaagcactgcctaaaaaaaaggaaaggtgcttagcatcggtacattgtttctgctatgggttatgattagcacgaggcctcacaggtatggcgtttgctccagtgaccacaaggcgagtgacttgtcttcttcttgcataatggccggagtgatgacgcaggttacgcttcggttgtggacaatctgtggagaaatgacctggttctttgcaattgtaacaaatcaatgtcttctttactgagctgttcgtctgggaacgatcattctgacttggagttggaattggtggttggaaatccttgctaacattggcatcagtggtaccatagttgctatcaccattggagtctttctcagagtcaaaattgctagggttgtcattctgggtgccttcattgatactatcgtcgatatcttggtgaatgctattgacatcgcacgcttgatccgagtggtccctaatggggcaagaaccatggttgttggtggtatcatcagcattagtattgctaatgttgttgtctgcattgtgtccatcttcttggggtaggaactcttgatgcgcaacagaggatccggtgatctgaagtggctcaatgcgctatctttggttaccacgtggaaatactgggatgttgacaatccttctcttgcagttcttcatccgattatgatcactttcgagttgtatggcttgtgtccacaagtttctcaaaatcttcataatcctctaggagtagttgcactgcaacctcatcttttaacccctggagaaacttctcttgtttgtcttcatccgtttccacatcttctggtgcatagtgagccaaacgatagaactcgtgcaggtactctgtgacggtcaaatcttcttgcttcaggtagcgaaactctcgttttcttagtgtgatcattcctgcgggaacatgtgatctcttgaatacagatgaaaactcatcccaagtgatggtatgtccttctggccgtgatgcttcgtagctattccaccactctgaagccggtccaaccaactgatgagttgcgaagccaacccgctcctggtcggtgcactgaatcaaccctagcttcttctcgactgtgcgcaaccaatcactggcttccataggatcgacggcaatggcaaaggttggaggctcagttttgagaaattctaataacttgcactgttgctagactgtaggtacttgaacgttggttgcccctgctgggttgttccaattttgtaatagttgaaatgctgttgccaacatgttggtttggttaaccacaatttggattagctctggtgaggtttcgttgatgcttttctcattcccattgactgtcggatccatcattcccatagcctttgttaccagtgttatccatctgtcacaatgtagaggttgagagaggaagcatacaaggaaagaatagaccagaactagggacaagaccttaaaggaactaactctttttgttgatgtgttgtttgttttgcttattctacaagttgattaagcaaacaacctagcatggttacatcacaacccaccgatgcaaaccacgcgctacacacacaagcaaaggaacacacgactaaccacactaccctagagggcggcttaggttctgtgactggttcccaagatcttcactgcttcttccactttgctagcggatcctgcactcttctggagcttcagcagacaattgatgacatcttcttcttcgcaaaactaaccatctagtactagttgaaaatccgaaggaggaagaagagaataaacattttgcaaatagcattagggaaaggaggaacaaggaactttcgcaaatagtttcatttataaaatatgtccttaggttttatccacttggcttatcctacagtcgagatggctctgatactagcttgtcgcgaccgagaaaattgccttttcccgaacgctagtgtattaatccccgtcccaggaaaagccggggtacaccaaacaaacatgatacaaaaggcacatctttattatatcgataatatttacattattacaaaggcacttcaggcctgacaatcaaaaataaacagcagcggactagcaggcctacggctccatcttcacaggcgctcaactggggtataagccaggactccacctaagacttcttctccaaagcttctcttactgaaggggggaaagatagagcaagaatgagtacaaccaccgttttttttaataaactttgataattgtttttgttgcttaataaatatttccggtgctctgaaaattcaagtaaaatttgagggctcattttagaccaaggagaatttaacaaaaattctccgggccacattcgaatttttcttgtacatattttagtgttaaccaatttcttttcgaattttaattaattctattattccttttagagaatgatttttatttcgggatgaatttatcaggacgtgacatgggcccttccggcctggccttcggcccatctcctctcctggttcttctctatccatttctcggagttttgtgttgattctatggtattttgatgaagttcaaaaaccatccttgtatggatacatattttctctcactttagtatgattttcctcccaactttagagtttatcacttgcatacaaatatacaccaacacttgtgaaatatgtgagatttaacacctatcactctatgttggatgttttattgtctggactttatgcagatgttggcggtatagaattggcattgaataactgccaacaaaaccccctacacttagctctttactcgtcccggagtaaaagttagtgtagaataaatttctccaagatataattcgagtatataaattattcagacccatacctacaccgtgaactttaacagtggttacttgccatctggggtaattaataaatggaatgatctcgactccagtctttcttgcttctccggtcagactcatgggatttttatgaattttcacaaactaactcttttcctcatattgaccttatcccttgtcactcaagtaaataattttttttcttgtggatcctcaccaaggcaaaaatgtgccaaacttacccctattctaaggctgatatatggagcttggtaggggtaaaagtgtgacatacatgcatcatatatattgcaaagccaaatatatggactcaagaagattatcagtcatactcctagatcaagggtctttatatgtggtggaaaaaggaaaagtgaaatattttgtggaatgatggaataaagaaatgtgtctccttttttttcctatacctcctccatttttttttcttgcatgaatgtggaagtggcatggctatatgcatatttttttttcatcatgctcaatgttttgagagcaagctttatttctctctcttttttatagccatgcctttccctccttttctcattttctttcctttttccaaggattttctaggagaagaaaacatagtttaaaataggtgtatattttaatggaatttttgtgggaagccaacttccagtgtagaagcttagcttaattatatatatggaaatgaccccttgatcatgagagtataaaagatatctaacatgagtcacatagatttgacaaagctcaatataatgtcaagcagtcatatgcataataaagtttatcattgatatacttgcatatggccttggtaggtataaaataaagtcaattggaggaatgagctctttaaaacaaaattttattttgaaaaacaaattcccataagtaatgacaacagttgaagaacttccttcatctttaaccatctcacatataacaattactttgatgcataacgttccctaaacatggatgttcgttcacaagtacaagttcagctaagaataataaatatacaagattaatcataggaagaatttcattagttggaaattttatctttttaattatgcttgaactaattaatttctgaattcacagctctagtactataccatggtggagatatacagataatagacgtgctcacctgcttacctaggaaaattgagagggattgggactagcactggttgggttcagcccaaccaccttggtacccaattcctctgcaattccctgcagagttcagtgtacctcaggtgtttagatattcagcaaatttcagagtatgtgcacgtcagaagctaggatatctcccccacacttattcaaaacctgatctttattaaacaaaacaaaaacaaatcttggcaaacattggggttaacaccaatgagtcacattatttatagcaagtgcttacatgattggaaaataaatgaccaagcaccaattacatttattcatgagaaaggagacatttaattagcatcatacttattctccttccccatctctacgaatgcacgcttgatctagcgcatgaaccgcgactaagagtatcaaaattattcctaagctcagcaagctctacccctagttctgcgttacggtccctaagctcaatgttctccttgcggagcttcttcacttgtgccgctagcttatggaccgagggttccggcgacttcacttcttcctcttgaaattggccaagcgcccttacaattggagggggcgtcaaatgacgcttcaccgtcataggtggagggcaacgggattccgctgcccctccttctccgatgccgtcaacggccggagcaagcctttaccatacctaccgccgggagttcgcactctccgaatgcaaaaccaatcctccttgggggtggatggagtggcggtgggtgtgatgtagttgtggagctcctcatcccctgccttggtgtagagggtgcccacataccgctcagcaggaggcggagtggccttgtcatcgtcttggaaaagacgtctcgctttaataggctgagttcacccgtcgttgttcgtcgtgcaggctaatacccccggattttggtcttggtgacatgacgaggggagagggatcgtgctgccgaacggggagccgaacggggccgagacgggttcgaccgaacccctggtttggccgaaccagtgagtttgccggccggctccatatttgctggggagctgggcaccgtagcaaggggtgaatgcccccttccattgtgtagttttccactgggatgacttgattcgccggtgtttctccttcaaggttgtaggtggagtttgaggaggagccaatgtatggcatcagggatttgccagccattggtgagttgagggtgtaaatcaaggaattgagctaggatggagagaagagttgcaaagatggaggagaggaggaagaagggtcttatggtgctgatccaaaagttctacctccgaatgcgcatctaaacaaactcaaacgagcgcggagaggaagctattcaaacttggggccgattgggtgctaccctggtgggagcaggagaatggaatatggactttgaaggagaatggaaccaggggttcggccgaaccctagtgggctcagctggctaccaaaattttcacacgctcaagcaaacttattctaagctcagaaatgacaattttacaggaaattaagcatgctttagatgagatcattatggttcataatcgattaattcaataatatccacttcttcatctaaagattcattaggctcatgaaaaatttttaaacggtaactgcttaccttaaatatgttatttgagtcgtcgcaaagtgtgattgccccgtgccaagaggtgtcgataacgtcgaacggtccttcccatttactgcgcaattttccgtggccgaaaagcttaaccctcgagttgaacatcagcagtttgtctcattgcttgaatttcttgatttttatcctcttatcatgccagcgcttcatcctctctttggatatctaagtgttgtgatatgccttctctctccattcttcaagttcagcaatttgcatcatcctccattctcctactccttcaaagtccatattccagttcctgatggcctaatatgctctgtcctcaagttctacagggagttggcatgacttcccgtagacaatctgatagggagaaattccaatgggtgtcttgtatgctgtccggtatgcccacaatgagtctggcaatttctccttttatcctgttcccattttgttgaccgtcttttgcacaatattcgtgatttgtttatttgacgtttctgcttgactgctggtctgtggatggtaaggtgtggccacgttgtgcttcactcccatgtctcgtaggaggtctcaaaaggttttgtcaatgaagtgcgaacctccgtcacttatgaccatccttggggtaccaaaccttgggaagatgatctctatcaacatcttcttggtatgcttcgcatccgcagcgctgcacaacatagcctcaacccacttggagacatagtcgactgccaccagaataaacttgcaactcgcagttacatgacttagaaaaaggtcaataccccaaacatcgaatatctcgacttgcaggttgtatgtgaggggcattgcatcacgagcagtgattcctccttgcctctgacaacttggacatcttctgacgaattcttttgaatcttcatacatcgttggccagaagaaaccgcattgccaaatcttggcttgggtgcggaatgcgccataatggccaccataaggtgaggcatggcatcgttctataatcttaagtccctgttcagtcggcacacatcttcttagtaaaccaacggagcagaccctatataggtatggctcatcccatatgttacggcggctatcgtatttcaacttcctttgattttctcccggtggtatgtattttgataccatgtagttcactatgtttccatccacgggttggagtcacgtaccgtcatcagcatgtcgtctctcaagaaatcatttatcagttattcctgcatgtcagtgatttgcagcctagaaaaatgatctgctacagaattttctactccctttttatccttaatttctaagtcaaattcttggagcagcaaaatccatcttaagaggcgtggtttagcatccttcttagtgagcaagtattttagagcagcatgatcagtgtaaattatcacttacgtcccatcaagtaagatctaaacttatcgatagcaaaaacaatcgcgagcagctctttctcggtagttgcataattcaactgagctctggttaaagttttgctagcatagcagattgcatgatgttttttgtctttggtttggcccaagaccgcgccaacagtgaaatcgcttgtatcacacataatctcgaagggcagagtccaatcaggaggttgaatgattggagcagagatgagtgcctttttgagaatttcaaagtattttaggcacgcgtcatcgaactcaatgggaccatctttggctaacaggttggtcagaggtcgagcgtttgcagacaatgaccgaaggtccttccatagatagagaagtcatccatgaagacttccataatgtcctcgatcatattcgagaaaatagacatcatgcacgtttgaaaagatgcaagagcgttgcacagtccgaaagacatcctacgataagcatatgtgtcgtacggacatatgaacgtagtcttactttggtcctccgtatggatgggaatttgatgatacctgcaatacccatcaaggaaacagaaaaaggaatgatttgccagccgttccaacatttcatcaaagaagggtagcggaaaatgatcctttttcgtagccttgttctatgcacatcctccatccagttatggttcgttgcagaataagttcattttgagcatttgcaacgaccatcattcctcccttctttggcacaacctggactgggctaacccactcactgtatggtatggggtaaataatcccggcatgcaggagtttcaggacctctttctttacaacctctcgtatcgcattattgagtcgttgttgaggttccctggagggagtactctcaaggtcaatagggatacgatgagtgcaaagtgcaggattaatccctctgaggtcttgaagggaatagccaagaacaacacgatgcttttctaacatagacagaagacgttgagtctcgtcttcagaaagcttgtcactgattatgataggggcttctctgtcattgtgcaagaaagcatagcgtaggccttcaggtagaggtttaagctcaaacggaggtcgaggtggcagttccatgattggaagttcgagagtctcactaggttccgcttcttccttgatgaagtcagggacttcattttccagaagggcctcgggagactcgtgagggggaactgctctaacctcctccgcagactcaatctctaggagagagccggtcaaggcgaaccatgcccgcgagaatgcaactgagaattcgtttcctcccaaagttatcttgaggctatctaatcagggcatgtttattaggagtttctcaaatgggaagcccgattagaatgtcaaaatcttagatttcaaagtgaaagtatcaattaggcatagaggcgggtgaataggctaattcaaaaattcaattaaaagcggaagcagtaattttcggagtcagcccaaactcaaagtaaatcctagatctagttgcctataacaagaatatgctagcacaaacagcaactagacctatag

SEQ ID NO: 16615 - DNA, 2136 bp, Oryza sativa
tctactctctgttgaggagctcactaagagttgggtcttagctaaccctttcctcaagaggttgcactaagcactcctccttccactaagggtatctcttccctttcggaggtgagatctgaccatcacaaacttctcccggccaatcacaagtagatcgggggctcgggagcgacacctagccgcctaggagtcctcagcctccaagagtaacaaatgaagcaatgaactcctggagatgatgcaagtgctcacaaatcttcacgaagtcaacaacaagcactcacacaaactcgaatccacaactctcacacacaccaaatccgaatcgaacacgggtgagaggggaaacaagaaagcaaggctcaaaagtgaatctcaacaagagcaagccaagagcacaagaatctccaatgtgaccagcagccctcacaagtgaggggagggggctatttatagccacagcctaaattatgcccgttatgcacaataattgtgattttcagatattccgaaagatttttggacatgtccgaaaattctctttcagacatgtccgaaaattccagctcggcaccgacagtaaagttaactgaagatatttcggacattccgaaaacttttcggacaagtccgaatatttccagaaccaaaaacacccttctggacattttcgaaaagtccgaaaattcctttcggaaaactccgacaatttacagaagcgaaaagactctattgatgtttttcaaaaaatccgaaaatcagttttggacaagtctgaaaatatgcagaaccatatttgccttctcagtcattttcggaaagtccgaaaatgccttttggacatatccgaaaatttccagaagcgaaaaactggctctgtgtattttcggaaagtccgaaaatgaatttcggaaaactccaaaaaaattccagaacacaccaaactaaggagaaacacttttaaaaattgattttgagcactttgatcactcctcgtatgtcaatgcatcatccctcttaatagtgcggctttcctattaactcaaggaaaagaaaaggtacaatatagcatttgctcatttgccgcatcacatcatgtcaatgcattgggtgggaaatgcattactttaactcattgaggacataacaaccttcacatttacgtgaataaaaattttaatcctctctaatcgcattgtaattaatcaccaaaatcactaggggcctagtcgcactttcacaaagacgtggaaatccaagactgcctccttgtcttcaaagcagacaggtacatcttgtacaatcccaaatccttcaataatatttccgttcgggtgtttgaagaatttatttgtcggggttactgccttaacaaggcgcaagtgaagctgggaatgagtcacatcatgatgaaactgaagctgagtgacagtctcgatcatccgcataatgtgaggagcatagaccaaccccttcttgtactgaatggaggccatgcggatctcctcccacacaaagtgcaaaacatgaaagcgatgaggaggggattgaacctgagaagtacggtcctggagaggtggttaatgctgctggcatcaccatccttaggcacaaaggaccggcaaaacatccggttcaagcaggcaaagtacggtttgagaccgtcgactttacccaacaccacattaggatcatttggagtgtaaagagggaggagattagtgttggcaggaatgggaagatcatgcatatcaggaaggtttagcaaggaacagacgtcaaaaccccaaatctcaacaaatcgcggacaggagacataatagtaagagccttgggtcatccaatgcatggcacaataaggatcaaagaaaacggtggcatataattgagcgatgacttcgctgcaccaattctgctgcaaagtcacgaaagagcgaattcccatgagctcacaatttgcaatcacaaagtttagcaccggatcatcatgcgcctgcagctcctcctagttgatccattgcatgggaacggtgggatgagctttggacttgatcacagactcatcaaagtcttgttgaaagagagtccaaaaccgcgaatccgtggcggtgcggcgaagggggcgcggatcct

SEQ ID NO: 16616 - DNA, 30021 bp, Oryza sativa
agccacacgcgcaacctgaggaaccgcatcctctctcccggaccaatcactgtccaaatcatcatgagaggatggggtgggagagcggtccctttggtgcttggacttgtgggaggtttgcttgcgtggaggcatccttcaaacaagatatagacaatgaatcagtgaatggaagccaaagaagcaaggaccaagtaagtgaaggcaagaatcgtgcaaaaccgaggtgataggggtcggccaggaattttcggatatatccggaaacaattttcggattttccggaaaaatccggccgaaccttatcatccggatgcagcacaaatccgccaacaaaaacttgggaaaatgaatctgcaggtcctagggcactaggggaacatctccaccaaagggaatcacaagataaaacttgaggaatcaaaggatttgattttagggcggatacctcaagaacacgaagaacacttgaagaacgcggtgatgatcgacaacgcaagtcccaataagtgccccaaacgcgctcccacaatgttggagaggaggggagccgcgggaggtcgccggagaatggggtcgccggtgcggagtggaggagggagtcaaacccgttgggaaaaagtgaggaagagagagagagagaggagtccacgggtcaaaatatatgagccccgaaattttcggacatttccgaaaattttcggataagtccgaacggatctagaggggaagcacacggttttgatgattttcggatatatccgaaaatttttcggaaagtccgaaaaatcctggaatagcatgaatagaagagcgacaggatgggaaattttcggaaggtccgaaaatttttcggaaagtccgaaaattcctggaaaacacagttttgcaaggggatttcgccgggaattttgatgaaactattttgcaaacatttgaaaggaattttgtaggggacaagcaccgggaaatttttttcaaaaacacatttcacaaagatttttgataggattaggaaaggagggatggtcgagctctagagggtccacttgaacttgtgactagcacccaatcaatcacacaaaccaatagccccaagtcaaatggacaatccgagggatcaaaagagagggaattaccatgagacaagataattcaccctcgagagagggaatgtgtgaatctatttcaagttgtgctacgaccaaaatttgttgaaaaatgagatcccaatacacatagattcaagttctccacaaaagtgactagtgtccatccatgagttgaatgaccattttgtcacaaagtagtatgcaaacctattctaccaagcaaacatgcatgcaatagatcaagccacattccgagaatccaagatatttagttcacttctcaactcacaaaacctaacttcatctagaggcttggtgaagatatccgccaattgtttatcggttctcacatgttggatatctatgtcgcctcttgtggaatgatctctcaagaaatggtggcgaatatcgatatgtttggttcgggagtgttggacggggttgttggctatcttaatggcgctctcattgtcacataggagtgggattttggatacattgaggccatagtctctcaaggtttgcttcacccaaagaagttgagcacaacaactcccccgccgaaacatattccgcttccgtggtggatagggcgacagagttttgcttcttggaagaccaagaaacaacagacctacccaagaattggcaagtacccgatatgcttttactatccactttgcacccggcataatccgcatcggtatagccaatgagatcaagcctcgctcccttaggataccaaagaccatggttaggtgtgtgcactaaatatctaagaattctcttcacggccacaaggtgacactccttcggagcggcttgaaatcttgcacacatgcacacactaagcataatatcgggcctagatgcacaaaggtaaagaagtgagccaatgatggaacggtataccttttggtcgacgtctttaccttgctcgttgaggtcgaggtggccatttgatggcatgggagtgtggattggcttggcattttccatcccaaacttcttgagcatgtccttcaaatactttgtttggcaaatgaaggttccttccttgagttgcttgatttgaaggtcgaggaagaacttcaattcacccatcatggacatctcaaatcgtatggtcatcatcctactaaactcttcactaaaagacttgttagtagaaccaaatataatgttatcgacatatgtttggtagacaaaagtatcattatcatgtctcttttagtaaaaagagttgaatcggctttcccgatctcaaagccgtttttcacaagaaaattgtgaagacactcataccaagctctaggggcttgcttaagcccgtagagtgccttgtggagcttgtacacgtggttgggatagttcggatcctcgaagcccggtggttgctccacgtataccaactcgttgataggcccgttgaggaaggcgcttttgacatccatttgatatagcttaaaattgaggttactagcaaaagcaagcaatatgcgaatcaactcaagtctagctaccggtgcaaaagtttcaccgaaatctaatccttcgatttgggtgaacccttgcgccactaaccttgccttgttccttattacgaccccggcctcgtcttgcttgttgcggaagatccacttcatgccaatcacgttttgccgaggtcgctccaccaaagtccacacttcattccgggtgaaattgttcagctcctcttgcatcgccatcacccaatccggatcattaaaagattcttccacccttaaaggttaagagaagacacaaacgagtaatgctcacaaaaatttgcaatacgagaatgagtggatactcccttgttgatgtctcctaaaatgttgccggtgggatgatctcgttgaatactttggtggattcttgggcgagctagattgatcagtgagggtggcacttgctcgccttttgttaacaaccaaatttggtaatatcagcattggaaaagaagattagatcgaaacggaatctaagacgaggattgtcgcggaaacagagcaagaatcggcgggagtccggatcggatacgattgagatcagctaagtccgagtcagactgggttaggtgatacagccgattccgacaatacgacttggtgtacgacatcatgtcgagttgatttgtcttccccgccaaaaccttcgccactttccccaccctcagctacaatgcaaaaccacaccagcgaaagctagggctcacaaatccactccaatccatctctctagaacttcacagcttccacaaaatcttccgtgcaaccaccgcatcaacctcccatccattcctcgccacttccaaatcaaatcgcatcatcccacttgcatccatggcagaggagagagagagcttcgaaagtcagtgggcgccctccgatgttacggaggaagatttgaaggagatggtggcgcatggtgttcttccggcgaaggagatcatcgggtggcgtccggcatgcggcgaagcatttccgacccctgacacacatgaggtcgtggtgttctctcatttcttctatgggggcttttctcttccaacctcaagattcttccgggggattctggagttttacgggattagtttgcatcacctaaaccccaattccatagtccatattgccaatttcatccatgcttgcgaggctttcctaggtattagaccgcattttgccctattccgccacatcttcttcctcaagccccagccaaacaagagcaagccatgcattgttgggggagccggttttcaactaaggggaaccttgagccagaaatatttctccatgccctctaaaacctcgaacaagggttggcatgcaaattggttttatgtgcagaatcctgaaccagcgcttcctgagtacacctgtcttcctccagtatatcaagacacctggaacttgcttccaattggagatgaggctgcccaagcactcctccaccggtttgtatctaacatctcggcctctctgaaaaacatccttttgtcttctgcaaggttgattgaaaacttggaatatcatgcataggaattttccttgatgaagtctgatcctccgatcgctcaacaccgctcaccctgtcggcaggctggtcaggctagtggaaggccaaaaatccggtccgatgctcaaccaaacacctcgaagccgactaaccagtcagactctcgtaagaggaaattagttctgagtgacgatgagggtgacgatgttgaaaaggctggcagcaaaggggtgactggaaaacagccaagacaagctaacccgaagaagaaaacatccagtcgtcccataccgaaaatcaggaagtcatccaggtacatgtcacttagcattttctcttgtatcgctaatcattcactattgaagtattgttaatagcatatctcaaatttgcaggaagccttatgacatcgatccttctggaaaagactctgaaccaactggcgcggagactagtcctacgacagaaaccgggccgactgccaaagatcgcctgagtagtaatcaaccagcaaccgacaatgtacaggccagcaatgaacctcgactggaaaccagtcggccgaagctgaagtcagtactgatcaggagcccccgactagaaatcagtcgggtacagaacgaaatgaagacatcccggaagcagaggctcaagcaagcagccctccctaaaaaggtaccaacgccaaccttcagtcctgcctatcttactcaaagccgctatccatatgtaattgatcaatggaaaataatacagtgcaagctaccaagatatccgagctagaaaagcgaatcaaagctctagaaaaagacaagggcgaattgaccaaacaaagggactcggctctgaaagatgtcgaatgtacttgttgctgaaacttcaaaccattcttgtcttcttgcatagtcgttgatgtgaaccatttgcgcagatcgcaaatcaaatctcaagctcaattcgacgtcttggtcaacaaaattaagaagcttgaaggagccggagatgaagttgccaacgccgccacaccactcatccaagccatgtttttcaataataatggtccgagttcttttgatgctgttgaaatcttcgacaagctaagagctgctccagatacatattttaagaacatcaaggaagcgggatgcatgggggctagcctggcattggcaatgaccaagtccttgtacccgaagatcgatattgatgctgtcgacgactttgcagatgggacaagtgaagaacatgcccttgatctcatcaatgatgcacaaaaggctgcagacaagattactgctgatgtagttgagaggtttcaggacaacaatctcgggccgactgggtctggtaattctgatgatgaaaaaactgagtctgatttacattgtatagtattaacttatgatgatggaggcacaatttgtacaatactgatgaatttatgctgtgcttgataatttaaactcagctcctgatttcttaaaagttttcgtcaaaccttattgagcctagaactcgcaaaagttgttaaaaactttcagtcctcattgactaagccaaaagatcaaacaaggcaatgataaatcaagtaagaaaattgaattgataataatcacactccattattattatagtagcccccgactggtaactcaaggaacaacttgatgttagcagtcaaagaggaagatacaaaagtaatgcctaagcataaaaacgacgaagatactcaatattccaagagttgtcaacatgagtatcgtcttcacgcttgagtctgtaagaacctggccgagtaacttcaaaaattatgaacggtccttcccataagggagataacttgtgccgatctcgtgtagtttgaattttccttaaaaccaggtcttcaactgagaaagcccgcgatcgaacattgcggttgtgataacatcgcatcccttgtaaataccgagccgactgaattaaggctgcttcacgggcttcctccagtcggttgagatcatccactcggtcttctccctagcgctcctctttgaagttacgaaatcgtaaagattcgaattctacctcacttggcaacattgcttccgtaccatagactagaaagaacggtgactggcccgtagcccgactgggtgtagtgcacagagaccaaagtacagacggcagctgatctacccatttgccagcgtacggatgcagttggtcgaaaactcgtgctttaattccttgaagtaccataccattggcacgttcgacttgtccattgctcatgggatgcgctacggaggcataacaaattttgatgccgaagtcttcacagaaatctttaaatactccgccagtgaactgagtgccattatcagtgatgatccgattaggtactccaaaccgatgcacgatgttgatgaaaaaatctctagacttgtctgttgtaattgtgatgactggtttggcttcaatccacttggagaatttgtcaaaagctacaaagagatgactgtaaccaccggtagcctttttgaatgggccaacaatgtcgagcccccaaaccgcgaacggccaagataacgggatggtttgcaactcctgagctggtaaatgagtctgtcgggcaaaaaactaacaaccctcacacgttcgaacaattttgtcagcatcggatacagcggtaggccagaaaaaccctgtcgttaggccttaccaacaatagtccgtgcggcagcatgattgccgcagatgcctgaatgtatatctcttaacaattgccttccttcctccaaagacacacagcgttgcaaaatccctgatggacttttcttgtacagctcgatctcatgtatgacgtaaagtttgctgcacctggagatccgctcggctttgtctttatcttgagggagctcttgcttggtcaaaaatttgatgaggggctctctccagtcggattcgatcatgattacttcttgagtgtccgtagcctcggttgtttctttgcttggtacggttggttcataaagatgttcaacaaacacatcggaaggaggtgcttctcgttttgaactgaaattggccaatctgtcagctgccttattgttatgtcgaaaaacatgggttagctcaaggccatcgaacttatcttctaacttgcgtacctcctgccgataagcagtcaaggcaggaccactctttcatgacttgattaacaaccaactaagaatctccacgaactattagatgctgaattcccaaagatatcgcgatccttaatccgtgatgaagcacctcatattccgccatgttatgggacgcagaaaaatatatccacaatacgtaactcagcctttctccagtcggggaaatcaggacaacacctgctccggtgcctaaaagcctctttgactcgtcaaaatgcatggtccaatactccatcttttctatcggcatgtcttcttggaactcggtccactcggcgacgaagtctgctaaggtttggaacttgatcaaagttcgtggtttgaaagatagatccaaagacatcaactctaaggcccactttgcaatccgtccatttgcctctcgattatgaagtatgtccccgagtggaaaacgacgtgaccaccgtgaccgagtgaccttgaaaatagtgagataatttcctaacggtaattaaaacaccacataacaatttttgcacctgaggatatcttgtcttggagtcgaccaaaacctcgctgacgaagtaaattggttgttggactttttaaacatggccatcatcttcacgctcgacaaccaggaccatgctcacaacctgagatgttgtcgacacatataacaacagcggctcttgtggatgcggtgaagataagaccggtggagtagtgagaagtttcttgaagtcttcaaaggctttttgtgattcgggtccccactggaaattgtcagctttctttggcaacttgaaaaagagcatcccccactctccgagtcgtgaaacgaaccagctgagtgccaccatgcatccagttaacttttgaacgtcattctgggaactcggcggtttcatgttgaggatggcgttgattttctccgagttggcctgtatgcccctatgggacgccataaagccaagcaacttccctgacgttactccgaagatgcactttttagggtttaatttcatcttgaagaagcagatgctcgcaaaggtttcttctagatccgcgatcaaatcatccctctgcttggtcttgacgactacatcatcaacataagcttcaacgttacgaccaatctgagttgaaaagcatctctggatcatgcgttgataagttgctcctgcgttctttaatccaaaaggcatggtgatgtagcagtaggccccgaagggcgtgatgaatgaagtcttcaagtagttggactcctttaaatggatctgatgatatcctgagtagcaatccaaaaagctgagtagctcgcagccggccgttgagtcaactacctggtcaatgcgaggtaacccgaagggatctttgggacaagatttgttgaggtcggtgtaatcaacacacatacgccattgtcccgtcttcttcagaaccaggaccagattggccagccagtcgggatgtaggacttctttgatgaagcctgttgctaacagcttggtcagttcctccttgatcgcatccttcctatcctgtgcgaagcagcggagtcgttgctttatgggtttagcgtcttccttaacatgtaaagagtgctcaatcacctctctaggaataccaggcatatcagatggtttccacggaaagatatctttattattttgaagaaaggtgatgagcgcgctttcctatttacaatctaactcggcgcctattacaacagttttagtgggatcagagggatctagaggaattttcttagtcttggcatcgccctctccgttctttggcatcttggttgcaggcacttctccttcggttgctgtggatgcagccagtcggatttcctctcgagcgagcgtaatctcgcgggtctgggccatctcgcagctttccttgtggcaagtcctggcatcttcatcatcatgtaggtatagtgcgggacggccaagaacttggctaacaccgggcgttcgagtatagcatggtacgctgtctcaaaatcaacaacttcgaagcaaatgttctttgtgcgaaagttctcccaagtgccgaaagtaaccggcaaagtgatctggtcaagtggagtagaagatagcccggggatgactccgtgaaagggcgcattactcggcttcagttctgtgcgagggatctgcatgtcgtccagagtcttggcaaaaaggatattgagtgcgctgccaccatcgatgagggatcgtcggagcttgacgttacgaaccactaggtctagtaccatggggtaccgccccgggtggaccactcagtcaggatgatctaagcggtcaaacttgatagctgtctctgaccaccgaagatattgtggcgtatcgggctgaacggcgttgatctcccgctcggttagcttttgctttcgcttacattcataagccaggggtccgccaaagatatggttgagttccttgcgtgagtcttggaaaccagtaggggcatcatcttcatcatccttcttcttcgacgtgctttgaactccgtcagtcggtttgcttgagttcttggcgtattgctctgcgaactatttgtagacgaagcaatccttggccgcgtgatttgaattcggatgatgtgggcattgggagtgcatgatcttgtcgaaagtgttgacgcgcgaacgctgtcgggaggatggtgtagtagttgccacaagttcttcgggcttacgcttgcgatctttgtaattggtacttccactcccccttgtcgtcggcgtatctttctttggcttccaggtggtgcctgactgcttggatgcggtgacgacgtcttcagcttttgcgtactcattggccttttcaaacatctgcttgacagtcctgggaggcttgccgactaagagttcatgacgaatgcccttggtgaaggcggcaatgatgacgtcgtcggtgatatcagagatcttgttatgttgctcggaaaaacgtcggatgtaatctcagagggattctccagacttctggacaacgttgtaaagatttaactgagtaccagggcgttcaaaagtgccctggaagttggcgatgaagtggtcgcgaagctccgcccaagatccgattgtgccacgggatagcccatgaagccaggaccgagcagagtctgctagggccacaggcagataatttgccatggctttgctgtctcctcctgttgtgcggatcgcgagcctatagacagtgagctaagactcaggatttgtcgtgccatcatacttctcgattccagtcggtttgaagccggtcggccaatccactcgacgcaggtcacttgtgaaggcagcatctccatccacatcgtcatcgtaatgatccagtgaatggtgggggatgtagcctcttgccgtgcggcgctggttgatagtttcgcaaagatcgacgggacgactgcgacgtggggagcgaggctgttcggctcgacgctccctgtgtcggtcaggaggcgagtggacatatcgttcgccatgatccctactcctgcggctagatccggcgccgacgacgctgaggcttggttggtgatagtcttgagatcgaagaggcggaactcggctgccagtcggcgtacggacacttgcagagttcaccgggactgaagcgacgatcatggtcttgatctgatttaagatgttgacgacgtgattggcctgattgagtgcatcttccttaaggagagtgtcgagaagggtgatcgctgcaaccgcgttctgctggggggtgcgaaaaaccgccgtcccttcgacgtcttgttgcccaataagttctcgtgctcgtcgcccggcctccaaggcgcgctgtcgccggtcctcagcctccttcgtagcccgttcgtgctcttgttgctcacgctgtagccgttctcgctcttgtgcttgacgctcctcctccagtcggcgacgttcggcttcttgtcgcacatgctgttcttctgcttctcgggcttgacgctgttcttccgtgtcattgtcggccatgaaaacgccgaagaagagaggcgcgtagttatcttcgtggccttcgtcgaagttgtcgaggttgcggtagtcgtagtggtagtcgaagtagtcgtactctacaatctccgttggtcgagaatcgacaccgggggagctgaggaagccatacaattcttccgtcgaaaccgtcccgagacgttggagtatgacgccgacttccctggagctaggctggatcgaagccgaggctggatctggcctaggcctacgggaagaagacgcccttgtggtgaagactgtggccaagtcgtcggggagactcatcaggattgagggataggccccattgtcttgatcaggtcgtgttgaagtagattggatctcgtccgactggtttgaagccgactcggttgagatgatcttggagtagatctcggccgagttcgggataccgaacggggcggagacctggcctccccccgactggttcggatccgagtcgaggagagaaatcttgccgaagtcgttggtgatgaagtcgaggctgccaaaccggaacgcctgcccgggagggaagacgaagtcgtcgatgccggagacgaaacccatcgcactagtcggcgaagaacttgacactaccctacctggcgcgccaactgtcgaaacaagatttcggcaatactaaaagggggtggctatcaagctggaaaagtggatgggtttaaagacaaaaaattttatacaggttcaggccttcttaataagaagtaataccctactcctgtccagggattgatccgtcgagtgatctaggagaaaaatcgtgccccaagagacacccggacccctccttatataggagaaggggtccgtattacaaagtacagcccatactcctaacggaataggtagttacagataagatacaatcgtaaccgactaggatcccgggtatttccttgacataaaagtttggaatttaacccgagtccctttaaagatattctatctatacatggcaccccatacccagtcggatatacatgccgtgtaggtatggggtatccataatctccacagatagagtcctgagaaggcaattgtatctatcaattaggatattttatgtaatttccttagagatatatttgggcaaaagtctgccgcaaagacttatggtatcttagagtttgttagagataagagtcgtatccgataaggacatagtttgtaattctcgggtataaatagaccctgaaccccatgtaatcaatgaacacacatgttcaatacaatctcggcgcatcgccaccctttttactttcgttttgtttcgacgagttcttgctttcgggttgagctgtatcggtttcgatctttaacaagaggtaaaacttgttatgacggcttgcgttctcgggattagtgcttccatctttacgacactctaatcttgtttatgtaattcatcgagttatcatatatcctgcataatctctggcaatatcgttatctggcctacaatcggctaacatctatcggtagaaggcagccgattaggttaaatagtgacgttggcttggattatataggatatctaccactctatgaaacttctaatggcttgattgtctagatatttgtcacgcccggaaattcactagtaatttcaaacttatttgtgcataaaatcctcgtctaggaatcagccgaggtacacaaactgataatttaatatacaaatccatcataataataacgttacatacatacaaaagaaaagaaaacagcagcggaataacggtctagcgatggcttcagctccactcccacaagcagctcaactggggtataagccaaacgtcttctccttctggatcctttttcttcaactgaggttgattgattattgcaagaatgagcatatgacatactcaacaagccacacagcaaatatgcaagtgcacaaggataccaaaggatggcataatatagtctcatttgcgaaagcagcatttagtaaagatttaagagtagtgaaacagtagagtaattaatcagaaattttaatcaacactgaacagcacacccatgctgctcaggcccaaccaaacctgaacaaccaaccccggtcgtacagatcaaacctccaaaccaggaatttaccattccaaaccaggagtcaaatttattatcacattattatcattaatgagtagtgtgggactaatcacgaaaaacattgctcaacccgcccatgaccgcgggcacggctattcgaatagttttactctggccagaggtataccactatacccacaagacacgattccacacatgttgccatgcctcgaagtaccaccacggcactgcaaagggggaaatcatgacaatacccttcgcacaacacaactcaccacagtgcaccattcctgaatcataatcaacccctctataaatataaccagaggcatggactccctagcgatccccacggacttctcaccgcttctcagtctggtgccccgtaatgaatcatgctatacaaaaggtaaagccgttgcccacgctggcttgtggttggcacggttaatgtctcacaacagtagctcgcgaaccggtccttaattgccataagcacgaccttcaaaaccatgtgctgacaacccaccattaattatattttaattaccaattaattatcataacacgattaaccatcgtgagctaccattaaatataaccataaataataatgtagtatatatgattcatcccattagtgagctaatgtttctaagcatggctaagcaattatatatataacatttagctgaaccaaaccaatacataaggttcaagctaatcaatttattacccaaggtatcaaggaatagggcattcaatgcaaattggccataacaaaggaataggttcacaccacccggtgacattcgaaaataaatgtacagttgaaataaatagagaatttaaatataggatcaacatgctcaaaggattgtgtttaggatctgtgtgacttgccttgcaataatcgatcttcaattaatcttcttgaacacttccgacgcactcacgaaccttcgcaacgacggaaacgacaaagctagcacgcaaaacgaagaaaaagactaataaaaaccaaataaacagtacaaaaacaagcataaacagtatatgtggatatttttaacatgtagatcttgattttagaaaaatttagcaactagaaccagtcgaatccgagttacgacgatttagttatgaagttccgaagtttaatcgattttcatctaataaagaaaacctagaaaaagggatttatgacgtcatcgctgacatcatcatcgccggccatggcacggttgacacgaccaccggcaaaagagggctcggttgggctatccgaggacacctacgcgtagaggacgacgacgcgaactcaccggtgcaaagaacaacgaaggacgacgacgaacgacggccggcgacgaggttcaacggcggctcgactcgggtccccgacggcgacgctccggcggtcttcggcggctgcgaaggggcggacgggattcctctcctcctcacgaacccgactgtgacgacggacggcagcggcgacgatactagcggcagcgcgacgcgaccggaggatcgccggcgacggcggcggctaaaacaacgcggcggcaactctacgggcgacggctcggttgggacttggggtaaacggaagaggacgactaggggatgctttatatcggcatgggtggaggagatcggctcaggaacggatggatttggtgaaagaagagtcgggcttatcccgagttcacccgaataaaaacggccaaaattcgtgagatagataacgaatttgatgggggtttcttcgggattaggtggaggagatagagaggaatccgtttttgcaatcaattttggaagggaagcaacggatgcaccggatttgatggaggaggaggcgactgcacaggttggctcggctctgtctggagctggaagacgacactgtagcagtagggaggccaactagactttttgggctgggccggaagggagcaacaaaggacttccaatttaataaattaatcaatgagatgagctttgaattgttaaaaatacttccaatgctcaaataatttcaagaaaaatcctgaaaatacttggacactcaaagtatttaacaaaattaaaatcagatcattaaatgattaatttaatatttaaataattgctgaactgctctttgtatgattaaaattaatagttgagctccgaaaaatccgagaaaattccagagagtataattaaccatggagaatttaataaaaattaaatccaaccatgccttatattgaggaaattttatttcccacatttaacttcacttgtaaattaatgaacatttaatataaattctaataattatttattaaataatttataaatcctgaaacgaaaatcaagatgtgacaacacgtttccgtgcgtcgacatgccaccatgacataacaaaaagagtccgtgacaggacccttcacataaccccctctaactaattggaccacacctcaggtttcgccccgtccccagcaggcaacgggtagccccctcccccctcgtgccacggtgaattcggcagccgatcaaccgaaaaccccgaccgacccaactccatcacacccaccctagcctgggtacgtcggctagaggaaagctatactacaagcctagccgttgcccacgctggcttgtggtaagtacgataagttcttccagggtttcccgcgaaccggtctttaattgccatggcacgactagcaaaagtatgcacccacagcccaccatttagtgtattttaattaactagcaccattgcggtggcaccaatccaaagctatgctaataaccaatgtctaggctttaatgtgttttccccttttgtgtactagttgaactaagcagggctcagcaattctaatccaacatctaggcatgttacatcccaagttaacaaagcaaaatggcatacaaataataaggctgagaacagtaggtaaaaagcccataccgtgacattgtaaaacaatgcagtatttagagcaaagtagagcatttgcaatatgggagcaatatggtcaattaacaagaatgacttgccctactctcgcactgatgagatctctgcaacgacttcgacgcaccacagagtgacgaaacaaccgaaaactacgcgacaaacaaacacccaagcaaaacatgctataagtctactgaaacatgaagcaaaaccattttcaatggattctagggatttttataaatttactgagacttgaattgacttaaacggagctcggatgaattagttatgatttttagaagattatctctgtttttactataaaaaagaaaaagccttaattatttattgcgcaatatatcccaggtgatgacgtcatcaaggggggactggcatgcgggccccacatgtcagcggctcaagggacagtcggtccaccgtggaccaggaccatgtgggtggtccaccaccggtccacgggaccaacagcccggatcggccccaaggcctatcggacgactcggtttcaagacggccggccggctatggcgtgggcggcggcgcgcgcggcctccgatggcggcgaccagcagcggcagacggcgcataggacggcggcgtcggccgagggtgatggcaagcgtgcggaaagcggtggcgcatacgggagagagggaaggaggaaggagagggagttctcaccgtggggctggccggcgcgggaaggtgcgacggcgaatgacggtggcaagcggcggacggcgagacgagcaggtggacgacgtccgaagtgacctagggaagcaaatgagaggatttagagggagagaggaggtccacggtgagcggcaatgccagccaaagggggggaaatggaggggctcaccggcgtgcgaggaaggatgatttccgatgggatttcgacgatgggaggcggcggccgaggtagctctcacgacagcgatgtaggatcgtaaagggcctttcccacccccaaaagctagccattgaggtgaggggctccaccacttatatcttaggtcctttgcccttccacaaccaatgtgggactattcaacaatctcccacttcacatattggtgtccctcagcccttcaccgccccttcaccatttcaccatggtccctcaggtatatgggccccgcaagcacccacggtccatcaagccttcacgcactgtccatcgggccagagatgttaaactagccaggctctgataccaattttaggatcgtaaagggcctttcccaccccaaaagctagccattgaggtgaggggctcccccacttatatgttaggtcctttgcccttccacaaccaatggggactattcaacaggcgaagctaacggcggcggcggccctagcggcggctggagttgggcggtaggcggcggcgctaggggagatcggcgtgggagcggtgggggcacaggagagggcggtgaaaaaaaggaaaacagtggaggagagtacgggggagctttataggtgcttgggagagacggacgtggccggtgggcggccaattgcaccggtgacgtggggagggggagagagggggattcaaatcgaaactcgcccttgcgggcgcgggtgtatgggcggaaaccgggggcgtgggtggtgacatgggcacagagtgggcgcggccggcacgcgccggcgattgggatggcggttcccgctggttggaggaaggggaaggggctgcaggcgggccccatccgtcagcgcccgagagagaaagggggaggtagggttgacttcgggagggtgcaggaaagatgggccggcgacccatgaggtagggagagggagaaaaagaaagaaaaagaagggaaaaagaaaaaaaggggggattttccagggacttatattgcatataattgattttaattggttaaaaattatttaaaaggctctgaaaattccactaaaaatcatgttagcatattagagcatggctaaacttcagggcgtgacacttacttatactaaataattaaataacataacaaagtatcccgaatgctaacttaatagaagaagtttctccgaacccggagcagagtgtaccggcagctctagtactcctcccaaattcctcctagaaagctacactcgccgaggaagaagtcagagagagtgccaaacttccgggcactcctccagagcttctcctcactctctacctattttctaatgtacaaaagatacaatagagcctcttataattcagctcaaagttgtgtgtttcgaagtgtgatggagtcctccttttatagctaccatatgacggttatggccatggtaaatgtcctaactacccttcaaccgtcatcaggaagtaatcaggagagtacacgtggagccctccgagaacgtgcaaacccttcgtggaggaactcgaggtgcagctgtgggcggtgatctcggatacaggccagcacatgccctccgacatatcggctcgaccgacgacactcctgtttcaaggcctcgtcgatacgcttcccgatgccttcaagcagagtgcaggccccgttcaaccacgagatatacccagccgctgactcctcgagattcccgcggggtacttggagctctctacagactccagccatcgctgtataacaactcctgaggtacgagttgaaccacacctcgcgacctcggagtgcttccacggcttggtccttcttcacttccaccatagtcctctcgagttcggccacctcgaacttcgtcctccaatattggattcgacgatctcggtcggccaacgtactctcgaggtctgctcaatacggaaatgactaagtcaggtcgttctcctctttcgagaacacagcaaattaagtcgatccgaacaaaagaataaaggagatgaaaaccaaagtaccaacctaaggaagtcgtcgccacgtccgccttcacagacaggctttgatcgacatcgtcccgcggcacgtacggctcaagcgcaagtgccggaacgactaccggcgactcaggctgcccacgctgctggacatcctcgatatcaacatctctacaatgacagcaaagtactcggaatcaacatgctaaagaaaacgaaggaaacaactgcatacacaaaggcagtttgaaccgacgaaagttttacaagcataattgattaaggagtacaagggaaatacaaccctactcttcaaaaagggggagaatggactcccccaagtcaccgacttctttcatcacgcccttgcgcgcgtcattggcggccccctgatccagaatcctctagaggtcgagttcagggtatgccagcttcacgcaagcgaggacgtggcacgccccggtgtaaatcctatttgacgtctccttgccgatcctggccgcatgcttggaggggatctcctccatcgccgcagcgagctccgcgagcgaggacgtcagcgagaactcgttgggggttgccgggatggtggtcgtgacgccgcactccccggcgagttggtgtaggccggtgtaagacacccgcagcaagccacggatctctgacaggttgttctcgagctccgacatccggtgttcgagcccctgccgctgcctttcgttgccggccaccaactccctcatcttgaggaggtcctcgcgggtctccgacagatcgcgcgccagttgctggcgcgttgggttgccgacaacgtcaccgccctggctttctcgatctcgtagcccacgccgcgagcaccagcctagaggatgcgctccatctcagcttggagctccccctaggtgagggcatcaatgggcgggccccgagcgggcacaagaccgccagcgggtccactcggcgtcgcctcccggtccctagttgtgaccacgacatccgtcgaggccgccacaggagacacgctggaggtcgcaccggacccgtcttgcgccgccttcacccacgccgccctgcgaaggatttctgcaatttcatgaagacaggcaagcaagagtttgcgaataggatgacttctaaaacgtctacctacttctcgccaagcgtcaccagcctttgccttcgcagaggcgggggagacgcatccgaggcctgaacaagatagcacgatatgaggtcaaagtattctgactacatgattaagaaacaagagaggcttaccgacggagtaggcactttccaacagtttccaagtacagaggagaacttcctccctttcttcggaacgttgttgccattcatcgtggcagcagcaacagcaatatcggacgcctccttggcaacgccctcctttaacgacgcctccgccttgtgatccgcgagcggcccgatgacgtctatcaaagggagagcttgcgtacatgaaggcacaatgcgatccaaggaaagaagaagtaaaggagccatcgagtacactcatgttgattgcagcttcgcactcggtcgtccccttcttgcaaaggggaacggggacgttgctcaccgtcgtagggccgctgactgacgcggcgctccacggttttgctgttcaaacctgtaggatcgagaaccagaactcgataagtcagcaggaacatgcacataaaaaatgaaatctgaaatacaagaaaaataccccgagaagaaacccgggtcgcgtcctccggcccagaatagtcaaaggctgggtgggctcgagcctggagcggctggatctgcctaccgatgaagttgacagcaacttcataccccgacaactctcgtactcggaggtcatcgatgatatcgatgaaagacttaagggagggagttagggcgggtttggcggtccattccggaatcttgtctggttgttcctcatggacaacaaagactggatccgaattttctatctgaagatagaaccacatcgctcgccattttctacgagaagaagggcactggaaggggatgtatcacgacttcaggccatcctgaagttagaaaccgacacatccagatacctttttaggttccatccagcgcaactcatagtagaagtaaaagagatcaagaaatggctctaccccaatgtagggcccacaaagataggaaaaaatgctaagaaatgcgatagaattggggttcagatgaagcaaggaaaggccgtagaaattcaagacaagaagaagaaactcagaaggcggaggaagaaaaccgcaaagaatgtaatcctcaaccgcaaccatgtggcctaggacaggtttggggtcagtacctcctgtttccctctgcatggtcccacgaccagggagggcaccgtcgtcctgcagcttcttcagggacgcattggtggatgtggatttgtcgaggtccatcactgccggaagatcgccggagaacaggacaagatgggaaagctagggcttttctacggaagcggagaagacgaggggcgtttgaaggccggaaagttttgcagcaaacggacttcaaaatggatccccaaaactcccgtaaataagcgcactaccgatggtgcgaattccaaggaaaggagagagatggccgccagaagtttctgggtccgttacccgcagcagtttttggacttcaatttaaattcactcatgaccgttgaacttcatgcaatgttatcgataactctacgtctctacggttctcataccaagatcgaccagttgagagcgataatgattccgagatcagaagtcgcgatcggtcacatgagttcatttaagcagaagtcgggggctactttcagggttacagaggtataccctctacccttggatgtatgttgtatattgatacggtatacctgcgcgtatacggatgttgcgtacacgttaaggaaatccatcacgtaacagaaacagagtccacggatggaaggagtcctactcggacagaactgggtcgttactgtatcgcgtggggtccgatatctccaagttctacttggagatcaactgacccgcggtataaaagggaccccccgggagggcctaaggcatcgaatctcaccgccaatacaaccaccacagcctacgaaatcgaagccaacaggagccaagttgccgggtgatctagtcgaaccaactcgactacggtctcgtcggtatcatcgagttctgctattccctttgtaatctgtggtttctaccatataatcccataccaactggattagggctattacctatcaaggggcctgaaccagtataatccttatcttctatttgcttgatgtcgtattacgtagatcctcataccagcgtaccccaataccctctatatccggtctatgggtatcccccgtcgacagcagcgacggaagattgcctcgggttgacagcgacacgtagccctagtgatttgcagtggcggcgaaggggtgaacgggcttcggcttggtgctgcgatgccggcagagactgcagcgaggtccggcgaccacggggtcgacaaggaggtgcggctggagatggtggcggctgtggagagagagggggagctcgcggggaggcggctagggttagggaaaacttcgggaaaaaggggaaaacggaagaggatgccgaggggctgctatttatagctggaagagggagagatcggctcggaaacggatggaatcggcgacggattagtttgggttcgacgaaaaaacggagctcgaaagcgcgtcgaatccacgcaatttacaacgggattcaagggggtttcttgtgataagatagaggagatcgaggggaatatgttcccgcaactaattttggaacgggagcaatgcagcggcggattcggtgcgggagcggcgctgcacacgcacggctcgggatggaggcggccggaggaagatggcggcactgtagccgagtgggccccatgcgtcagtgagaaagaaagaggagggagctaaagtagacttcggtcgagaggggagagaaaggagtgggtcggattcagcccaagacaagagagggaatttaattaactttttaatttaaataattactgaaatgatgtttcatttattaaaaatacttccattgctcaaataaatccaagaaaaatcctgaaaatacttgggcacacaaagtatttaataaaattttatctagctcaagtttatgttcaaatttttcatagattttattcacacacttactttaatcattaaataatttctaaaaattcctttttcacaacgatttataatttagcgattttcagggtgtgacaccctcccccgccccaccccctccctcccggaactttttttcttgcgtaacaggcgtagtaaaagttttactcattgagaaatcatcttcaaatatatctgtggagccaattgcacacctccaggcctccaccaccataaccaaccacccaccccctattttcaccgatttttttggatccgagggaagcagcttgagtagataatatcttgtgtgcattattcacacaacatcttaactcgtgcgcgttgttttaaatcatttgttgaaagttttctatttttcgagtcgaaagtattttagatttggacttgacaattttaaaatctatgccggaagtttcaaaaaaaatcttgattcaaaagtttttaatttgtttacatttgaaagttttcaaaactgagttcaaattcttgaaaaaaaaaatcttgagttgcaagtttcacatatagactttgatagttttcaaatccaacttgaaagtttttacattcgagttgaaagttttaaaatatcaattgaaattttcaaaaaatctttcaatgaaagttttcaaatttgagttcatagtttcaaatcattagtttaaagttttctattttccaagttgaaagtatttagatttggacttgacaatattaaaatctcagtcaaagtttcaaaaaatcttgagttgaaagtttcaaacattcactttgaaagatttcaaacccatgtagaaaaattttaaattttgactttcgaaagttttcaaatctcatttcaaatttttcaaaaaaaaatcttaagtttcaagtttcacatattaactttgaaagtattcaaatatcagttgaaattttcaaaaaaatcttcagatgaaagatttttgagttcatagtttcaaatcattagttgaaagttttatattttccgagttgaaagtattttagatttgggcttgacaattttcacatatatgttgaaacttcaaaaaatcttgagttgaaagtttcaaacattaaatttgaaagatttcaatcccaagttgaaagttttcaaatctaagttcaaatttttgaaataaataatcttgagttgcaaatttcacatattgacttttgaaagttttcaaatccgagatgaaagttttctaatttgagttaacagtttttaaatatcagttgaaattttcaaaaaatgttccgatgaaaagttttcacattttagtttattgtttcaaatcattagttgaaagttttctattcacaagttgaaagtgttttagaattggacttgacaattttcaaatctcagttgaaagtttcaaaaaatcttcagttgaaagtttcaaatattcactttgaaagttttcaaacccgagttgaaagttttcaaattttgacttttgaaacttttcaaatttaacttcaaacttttcaaaaaaagaatcttgagtttcaagtttcacatattaactttaaaagttttcaaatacgagttgaaagttttcaaaatcaatttgtatgttttgaaattttcaaaaaaatatttctatgaaagttttcaaattggaattcatagtttcaaatcgttagttgaaagttttatattttacaagttgaaagtatttagatttggacttgacaatattaaaatctcagtcgaaagttccaaaaaatcttgagttgaaagtttctaacattcactttgaaagatttcaaacacgagttgaaagtttttaaattttgacttttgaaagatttcaaatatcaggtgaaattttcataaaatcttcagatgaaacttttcaaatttgagttctattgatgcgaaaaacacactagcctggaagatctgcttaacttcagtgcgggtccaaaatcttacttttaggttcgtgagcctgccagttgatttgatcctgcaatcaacaagaaacaaagatgagaaaaaccgcagttaaatccataaacgatagccgatcggccagtcgttgatgacatatcatttattttcgagccgatgtcatatgtgaatcgatcggcagttataaataagcaagataagactaaatctactcgatcagctatagatattaacgatatataatctttctgtcgatatatatttaaatcaagtgattgggatagatcggtcgccatgccgagacaatataaatcacttagatcaaagtatatattaacatgaagattataaacgcatatagcatagccgatcaaatagatctagcatgtatcggctaatactccgataccactctatattaagatattaaaacagatagaatatatcaaacagaagcctaatatactttattgcgataagatcttaatataaagggcagatctagcatatcaattaagcatataagatataaagctaaatcaggtaagatcggctgaaaccccgatactatctctctcgatgatcataaaacaagccagatatcataattatagatattacttaatagatcgaactcaaccgatgcagcattaagcataaagacaagtataagatctaggcaagatgatgaaaacctataagagatggtagatacacgatacaatctaaattaataacaaaacataactctatcggtcacttcctaacaataagaatcagccgataacaagttatatagcgcaactaacagagattgcaacatgcatatgataactcgacgaattacataaacagtattaaagtgtcataaagatggaagcattaatcccgagaacgcaagccgccataacaagttttacctctagttgaagatcgaatcgatgcagctcaacccgaaagcaagaactcgtcgaaacaaaatgaaagtaaaagggtggcgatgcgccgagattgtattaaactgttgttaattgattacatgggttcgggctctatttatacccgagatacaagatacgtccttgccggacacgacacttatctctaacaaactctacgataccataagtcttcgtggcagacttttgcccaaacatatctctaaggaatttacatgaaatatcctaattaataaatacaattgcctatctgagagctttatctccatcgtggcaatccccgtgaagcactttgatcaatccctgaaacagccctgaaaccatcttcatcgcaatcggctgcaccacctctatcagctgtgtcagctgtcctctgtccgatccttctcagcctatgcagactccagccgatgccttcgcagccgatgcatactctgttcttgtaacatcctgaaaattcctgacaataaaaatcactaaaatttcgaacttttaaaaacttttgcatcatgctggtgttattcgtttctctgttgcaaaatgtattgtttaaattaaataatgtgagaagacaaatatattggtatgacaagacaaatactaaaaccttaaatatggggaaaatagaaacatatgttggaattagaaaaaataattattaatatatggtgcaataaatcacaagattggaagtgttgaaatataggtaagtatctaaaagaaataaggagattaaaacatctaaaacttattcacacaaaaagtctaggaaaagccctaattgtgatttttcccgggttgctactgttcattacgcgctaggtgttcgatctgtgcctaacccgaccgaacacccgacgccgccctctccaatcactgccgtgccgcgcggctgcctttccgactcgtgcgccgcactggtcgtgcccgtgcgccgcaccgcgtcacgccacgccgcgtgggcccgccgccgaccgaggcgccgaagacccgcgccaaagctgcgccgccacgagagcccgcgtcatcccgtcccctcgcgcgtcgccttcgggattgagggataacggtcgccacgacgaccgcgcgtcaccctagggcatagccctgcgcctcccctatcaaggccgctaccactgcacatcaccgccaatcgagtcaccatcgtgtcgccatgccgtcgcacataaccgagaccgctggatattagggtgttccctccccagctaatgaaccctctcctggaaccctatcatctaggcaatcatgccgcgccagtgcatggaaccaaacctgggagcgatcgaaacaatgccgtgtcatcggttattcttatccattaaggaatccctctccctctcgcttttataagcttatgtctggctcgttctcatccaaacccaacctcccatttgctcttcctctccctaaaatttttgctccaccgaagaggaacaagatcgcgccgcccgccgggtgtcgaacacctggtgagcgagggctgcgccgccgccacagggcttctcagccggtgtgggtggcggggtgtggagaggagttgctcgcgttgctgtagctgctgttggagggagccgggagccgctgaacgagggagaccaggcgtcgaacacctgcgactgtcgtcgacagctagccgcccctgtttcgtccgcaccgcgccgcgcccgccgaaatccgccgtctcgccttcccgtggtaagccctcgcgcctagagcaactcccagaaacttagtaacttgcggccccgtcgatttggggtgcgcgccgccgtagccatgcctaccccggccaccacggcgccatggttgagctcgccgtggcgggacctcgttccaatgtagaatcggctagatttttgcttttctatactccatgtgaaccctagatggttaaatcgaagtcttctgtgcttgaatcgacacccattgcgctgccgccgttctcgcgatctcggtgccgccacgcgccgtcgcgccgcgcgtcgggtggccgccgtgcctcgccgccgccgccgatgggtttccagtgatgcgccgctacctttctccaccgcgcgccgagccgtcccggctcgagccgtcggaccgctgcgtgccattcctctgttcggccgcagcgagaggtagaagacgacgggaaaaagaaaggaaggagagagagagagaaaccgtgcgggacccacatgtaattagcgcacagtaatcctccacctaatgatgattagcccactcaatggcatgtggggtccctgttattaaaatctaagagaacttaattatagactttgtgtccatgacaagcgggacccactggttattaaacaagccagtttgaccctagtcaaccagggctggtcccacatgtcagtcacggtggttatggataatgttggattaaaaataaacagtatgcgcacagtaactttttacaatttctcggattaattcaaatttgaatctttaaactacataacttattcattttagctccgatttgagtgaaacttgaatctaaattcataatctttccaatggtatataactcactaattaataaaatatatttataattattagataattaatatcatatgattaggttatggtcaacttaaaaatgtgttaataaatacaattgatattttacagtagagtagatgtcaaataattatatttaacatgttttgtcactgtaacaaccacataaattaattataaatattgtttcaaattaattgaagcatagaaagtaccattgctatttattaatcactgaccatatatgtagatgaatccatgatttataaattatttacataaagtttagcctcatattttgtaactaaaatatgaatactcatagatgaatctttaacttgtttatgagaaataataacagagctagttgtagttggaccgtgacttaggattatttattgtaaaattatgcattgagataaactttaactataatattatggaccacactaatcaaacctacagagtatggtaattcattggaacccttatatagtaatatttgtagagccatgcctaggcaatccattccgttagaactactgctatgattaaattatccactgagccttggtaaacctcctacagggtgtcaccatttaatctacgatcaaagctagtttagccatgaactccccatagccatagttgatagatatttgagccgtagacccgtagtcctgagtattgagttctgtatgtgggcagcccttagtttagacttcgtagcaccttacaatccattagcaaacatgagtggtatgaatagccctaggtatatccccaacaattatattttgcttgtgcatatttgcttgttgttgaatattggtttcctcgcgtattatagaaattgtatatcggttagtcgcgaggcaacgtatgcagcttccaggaggtgaaggttgatcaagattatatcaagaataagaactatcctgagcaggcaagtcatcaccccatcccttg

SEQ ID NO: 16617 - DNA, 8833 bp, Oryza sativa
  unsure (1)..(8833): unsure at all n locations
gcttgggcaactaccttggggaaggtagttgagatacagcatgtggagacatgagcgccacattgccatgacattgatgagatgatttgtgaaagaaagttaaaactaaacaaatgttttcgactggggcggctggaggacttgggtggtgtccggtaaaggctagtgccgtccctagtcagttaaggaccgagccatgaagttaagcatgaaacaacccccgtacaaccatacttctcgtgtgggtatagacctagcggagtaaatagccgagcggatacccaggccgtagtggttttcttgttgtgtgtgaggcagggcctacggtagggcagccattggtaggaccgcgtggggcgggtgcctacagtggtgtcgccatcggtaggactaccatgtgtaaacctaaacttaactataacttaatgaatgtgtgagtctttccccctcgggagcgccagaactcctctcactgctaaaaaccttggacgcctagagtgcatgaggactaaagttcatggagcaggtactgccaatgtgaggttattgaaaggctttgccgtggcaagtctcattcattgagacgtaggctcatgtattgggcaagtcgcggagtacgggtaaagtgcacatccactgcagtgtgagtaaaccaaatctattcgaatagccgagctcgcggttattgagcaccgggacatgtattacacttggctagactctaatttcttaaactgattgggtgggatgctgcacgatgattttgttctggtggaacaacttctcgagaggcgagaaggggtagaccccagaaaaccatgacgaccagtggcgggaagctatccttgggaacacaatggatggtggacagaactgtcgctgtttaatgaacaacggaattaaaacttgatcagtttatgctaggtcttaggtttgtgaaatgatatttgaaaactcagctttacgcaaagtaaccatagccactccttgtattatcctgtacattactgcattttgtgtggtggcttgctgagtacttttgtactcattggtgctctatatatatcttgtagcagagtgttgaagagaagcccttggattgcggttccattctaggtctcgttcccagtcgactgcttgtggcatgtcaaccgggcccttatattattttggcttctgttggtgttctctgatagttggtggcctgcctagccctaatgtaagcatttaactctcttagtctgaattcattcgtgatatgttgtgattcggctatgtatgtgtgaaccaactactgatccagggattggtactgataaacacggaagatttctgatttacataatcggaggtcgacagttctttgaatcgatctctttattgaatccgcctcgatccaaatgtcgaacctggttcacaatttacaaaatttagtcgtcaacacaagccccccaagtccactatatttgtaatgtggcggatttgctcaatttccttttccgagccgatctagggtttcctttaccgactctgntttggccggtaccgcgttctcttttaaatagtaaccaccgctttgcacttttcacggcgtcagcttccattttaaccgctctaacaacaaactttccccaatccttctcctcgagccctctagcgacgatttcgagctttccgacgatctagagacgatcctcgcaggtatcaacttccgctagcgacaatgtcgtcttccgccagacctccgagcgcatcaaccgtggaatacgtcgaggtaagttcccatcggctaaaactcccttttttctgcatccgactggttcttcttcctttatcaatcctcgatttctcctcttccgcagcatctcgctcatctgattgctgtcccaagcattgccgataacctccagctcttccttggcccaatcggcaacctagatcccactgagttcataaatggtgaaaccaaccgaatccccttcagattcaccaacccaaatctcagtacttggaagggtaccttcaaatcctggccatcagccaaaaccaccaggcctgcttggtacaagaggatgtcggtcagcaaatcggatcactgggatgagatcggcatatcccaagctctggcattaactgcagcaaacatggcaaggaatgaacccatgatggcaacagctacctatttctggtgcacagccatgaatgccttcctgttctcacaaggaccgatgaccccaattttactagatatcaccatgattactggcttagatatcacctcatcgactaacctatccagccttaacacccaactcactcacgagtttaaaactagaagcataggcggttggggtggttatattgctaagtatatgggaactgggtcggttactccaagggaagaaacagcttttatcatgatgtggctagaaaagttcttgttctgtggcccaagatgttgtccaactgcaaactggcaaaggatagctgaaaacctggtggaaaagaaacattttccccttggcaaatatttgttaggctacttgtatcagactctcaatactgcaatcgacaagatggcctctggaaaaataatcggcataggaggtccatggtagttgctccaaatttggctgaatctgcacaccagaaaagttgccaatcggccagaactaaccgatgtggaatttccaagattcgagccgatcatcaagaacgatggagaaaaaagcacgacctgcatgataaatacagggcaagaatatcatatccagatgacatatgaattttatcatccgacaagtgttgcaaggcaatttggcatgggtcagctgtcacatcctgattttcgctttaggattcataaattatttaataaattatttttagaatttatattaaatattcattaatttacaagtgaagttaaatgtgagaaatcaaattttctaaatataaagtatggctggatttaatttttattaaattcgccatagttaattatactctctggaattttctttgatttttcggagctcaatttgtaattttaataatacaaacaacatttcagtaattattcacatattaaattaatcattaaatggtctgcttataatttttttaaatacttatagtgttcaagtactttcatgatttttcttgaaattatttgagtaatagaagtatttttaacaattcaaggaccatttcagagattaatttaattggaaaagtaattaaatcctcttttccttttcgggccgaaacaggaaaagtcctctctctttctcggcccaatctctctctcggcctgcagcccctctccctctctctgtcgaagtctgctttgtgtccctctttcaatcaggccttggaagaagaagcctagccgaaagtctgtttctcctccctgtcgctacagtggcatcttcaacctccagccagccgtccagagcccctgttcttcccgatccggcgccgttttctcctccaaatccggcctcttctttcgatactttgcaaaaaaaaatttttttgaaacgtaattaattgatactttgcaaaattaattgaggggatttgtttcccttatcctcctctatctcttcccccaaaaatctagttttatccctttgaattcgacgcgaatttggattcgttttcgagtttatctctccaccaaaccctaggttttcccggcgcgattccttgcgttccaagcccgatctctctctcccgtggctataaatagagtcccctccctctcctctttcgtttccaacccctaactcgagctcccgtgccctagccgtctctccccacgctcgccttctctctccaactccggccgccatcttcagccgccttttcccgtcgcgccggctgttctcgatcagtgacgccacttccctccgctccgcaaggttgatctctaccacggccgccagttcttttgcgccaaatcccgccggaaggttgccgtcaccgtgaacctgtgggttgttgccttggttcgatatccagccgtgccgttcgtcgtcgtccgtcgtcgccttcggtcgccgtagccttcatcggattcgcagctgtaaggagaacatcgtccaccacctcttcttcgccaaagatcgccagaaagccgttgccgtcgttgatcagtaccccgtcgccactcctgatctcgtcgctggccatctccttcgttgttcatcgctgcgtaagtgttggtaaggatcgtcgcgtcctcctcttcctccccgtgctaccggtttctgctgtcgtgctgccattcaccagtgtaggtttttccctagggtcttaatccaatctaacctaatccgttgtttgtctagcgtcatcgccgtctccgtgtattgccgccggatcatcgtcgtcgtctctccctctccgatcactttggttcggtgaggcttctatctgtgttccctcggtttaggttttaatctctcgtttgtgtcattgagtagcccccgtcgtgccacgcttagctgctgccctagtgtcaccgctgcgctagccgcctagccgtcgttgtgccgctccatgctacagccgtgctgctgctgctcgtgagtgccaagtcattgccgtcccgctaccgcagccaccatttgccgtcgctgctgtgccgtgtcgcattcgtgtaatcctaggttcctaccggtctattgtttgccgtaccggggctttactgtgaatcgtgtcgagctcaacggtttagccgcagccgttgttgagtcgttcactcgttcgttcgaaagaggtgtcccctgtgcttcattcgttcgtccgtgttgagtcatcctttagtttagagccgttcagagccgccggcgttgatcctgcgtggttgccatgtcatcgccttgtcagctgccgtccctgccatctaagtgtcacgccgtctctcagaacccacatggcagccatctaaaaccttagatcagatcaatccgagccatccaattttggtctcagccgtccaaaatcaatataaatcctgttattccttttcaatagcatattagttctttttactatatgttgtatactaaattcattccaataattttccagaggatgctttagtcttatatctcagatataaattatttgtaaattgtttaattaatttggaatagtcttttctttaataggtttaattggaattaatcttgtaaaattcataactaattcatatgaagtcagaatgaggccgttcaagtctcataattcatctaaaatcatgatctatatgtttgtttacttttatgtactgtttatttggtttttattagtctttttcttcgttttgcgtgttagcttgtcgtttccgttgttgcaaaggttcgtgagtgcattggaagtgattcagaagaataattgaagactgattattgcaaggcaagtcatacagatcccaaacacaatcctttcagcatgttgatcctatatttaaattctctatttatttcaactgtgcatttatattcgaatgtcaccgggtggtgtgaacctattcctttgttatggccaatttgcattgattaccttattccttgataccttgggtaataaattgattagcttgaaccttatatattggtttggttcagctaaacgctttatatatataattgcttagccatgcttagaaacattagcacatgattgggataactaatgttacactatcacttatgattatatttaatggtagctcacgatggtcagttgtgattggttaattaattattttgcaattaaaacttgtcaatggtgggttgtgagcacatggttttgaaggtcgtgctcacgacaattaaggaccggttcgtgagctactgttgtgagacattaaccgtgccaaccacaagctagcgtgcgcaacggctttaccttttgtatagcatggttcattacggggtgccagactgagaagcggcgagaagtccgtgggggtcgctggggagtccatgcctctggttatatttatagagggggtgattatgatccatgaatggtgcactgtaaagagttgtgttgtgcagagggtattgtcacagcctctattcgggtactttccagtatcgcgacgcatggtagacatgatgttaaggctgtgtcttgtgggtacagtggtatacctctggccagagtaaaactattcgaatagccgtacccgcggttatgggcgggttgagcaatgtttttcgtgattagtctcacacctctcacaataattattgatgctataactggtaataatttgcttagctcctggtttggagttagatctgtacagccgggtatggttgttcaggatggttgggcctgtgcagcatgggtgtgctgtgcagtgttgattaaaattgatgattaattactctactgttttactactcttaaatgtttgctaaatgctgcttttgcaaatgagcctatattatgccatcctttggtatccttgtgcacttgcatatttgttgtgtggcttgcggagtattccatgtactcaccttgcaataatcaatcaacctcagttgaagaaaaaggatccagaaggaaaagaaatttggcttataccccagttgagctgcctgtgggagtggagctgaagtcatcgctagaccgttaattccgctgttgtttttcttttcttttgtaagtatgtaacgatgttattatgatggatttgtatattaaattgttagtttgtgtacctcagctgattcctggacgagggttttatgcacaaataagtccagaaattactagtgaatttccgggcgtgacatcagctgccaatcagcctattcttttgcgacaagatccaaagcagaggagagattacatcattccttatgatggataggctactgaacctagaaggaccacctttaggcagtattgagaacatcaagctaaagatattcaggagtgcagccttcgaccgatggtggatagagtggaaaaaacatatgttccatcaatcgccatccatgtatcttacaaaccttttccctgacgatgtcccttaggtaaaaatcatctccttcaattaattttcatcaaccaccagccgatgcattatcttatatgatttttgtttcttgcagacaacagaaacttctcctcctcaccaaagcataagtggtgttgaaatcgaatatgctccaggactcctccccaatggtggtggactaacacctccagtcatcggctataatgcccccaagacctccacactgctacatggtctatctcgtaatattcccaagcaaagcaatctctatactccttcgaaagctctattaacttggttctaaactctgccgataattttttattgataaatgtctgccttggcctatctcctgggcctatgtcaatctcttctaattcattagccgacatgaccatgtccttggtgtagaaattcgaaccctccacgacgctctcaaaataataatttggggtctccatcttcacttggctgtatatcacaattggacacttttagaaaatctccatcccaaacttttccagacagtcaatcaatcccatccatctcccaaagagctaaatcggcactagcaactttaactgacctgtcggctggcacgatctcaatcttgttaccttgccattgaatcaagtactggtgcatggtcgaaggaatacaacaattagcatgaatccaatcctatcggagatatgggcccgggggtatgcgaaatgagggaaatctaccttcccatcttaccacgtgtccctacagcctggccctacccccgcattccgcgagtcgcaggagcggccgggagggggggcctcggggtgccacgtcatgcccctcgggcccttgcaccgctttgccccgaggccctcgcccagccgccatttggcggggggagcaagcaaggagggggcccaggctaaacctcctttaatgcacgcagcgccccaactgccccctgccgcatttaatgcagtggggcagacgtgcggcgtgctcgactggcgcgcgatagtcaagaatgaccggtctgtgactggcctgacgccggtcacgtctgactggacggacaaccgtgctcccacgtcgcatctgcctccggcggagtggaggtaggaatgacccgtcccatcggagggtcattcggagggcggtcacgacaagtcttcacccattaatgagggaatgacagggttgtcccccgtgtcaggcgagggacggcgctgggccccgctcaaggacaagctgtggtttagcttccaggcaaaggcacgggtagagttccggtcaaggtagggtgggtccccacctgagagaagagtaggtagaggcggtgcatgtggtatccccttgaggtataaaagaaggaccttgcccaccaggaaaggggatgactctgagaaaacctaagctcggggaggagggaactaagattgttctccggagtttaggaacccttgtaactctcagtctaaatcccataaacaggagtaggatattacgcttcatagtggcccgaacctatataatttggttgtgtgcgagctagctaggagccttgggaacagatacgtgatttccagaggcgagctttttcccccggccgaactcacgaaaggggggtctcatgatctcctgctagagaggatcactccttgacaaatcccttccaagcaacaggctataggaacccttcccatcgatgacaaaaaatgttgtagggacagtcttgctgccgactgtcagctccacatttaaaactcccttgatctccgatggattgcggccaaa

SEQ ID NO: 16618 - DNA, 8542 bp, Oryza sativa
gtaagagaagctttggagaagaagtcctaggtggagtcctggcttatatcccagttgagcgcctgtgaagatggaaccataggcccgctagtccctgctagtccgctgctgtttattttttattgtcaggtctgaagtgcctttgtaataatgtaaatattatcgatataataaagatgtgtcttttatatcatgtttgtgtgctgtaccccggcttttcctgggacggggattaatacactagcgttctggaaaaggtatttttccaggcgcgacaagctggtatcagagccatctcgactgtaggttaagccaagtggataaaacctaaggacatattttatacatgaaactatttgtgaaagttccttttttctccattccctaatgctatttgcaaaaggtttactcccttcttccttcttcgaatttcaactagtactagatggtcatctttgcgaagaagaagatgccgtcaattgtctgccaaagctccggaagactgttgggtccgctagcgaagcaaaggaagctgtgaagccagctgtgaagcaggagtgaagatcttggagaacccgtcacagaacctaagccaccctctagggtagagtcatagtcgtgtgcttccttgcttgtgtgcgtagcgcgtggtttgcatcagtggggtgtgatgtaaccatgctaggttgtttgcttaatcaacttgtagaataaacctaacatacatcataacagaaaaagattagatctgttaaggtgctatccttagtttctgatctgtccctccccttttgttttccctctctccctctccaaacctggtaacagatggctgacaatgaaaaaggcagtaaggtcagaaatcaggacaagggtgcctcatgctcccaagtgaataaagcaccagacaccagttgtgtggtagtggtccaacacctaattaaccagaacaaattgctcatagatctattacaacatcatcagacgccaattctgaacccgagtcagatgcaacctcaagtgcaatttgaggcagatcaagcacccacatcgccagacaacgtgccactagcatcccaacaggcccattgtgccatgccacatgtggactcaaaagaagctataatcatttgtcttatctacgatgaacaagggcactatgcaaggaactgtcctcagcagaaaagaaaagcaccaatgcgaaccgatgatgaagtccgtaagatgaccattaccggcacagaatggcctccaccaggaatgacaaaacgtcagataggaaatttctttcgtggtgcaccacagttgacccaacattttttagctaatggaggtagagtgtctgatagtgaagattcagatcaagtctcctcaggggatgaagatgagaagtctccctaaggtttcaagcagaataaaatggaacataaggcatgctctcgttgtggagaaatcggtcatgttgctagctcatgtgtcactacctgccttcattgtgagaaagaccatccacccggcgagtgtccaatgagcaggatcacttgtttcttgtgtgaaggaactgatcatgtaccaaaagattgtcaattcagttttctgctgacgaagaagatggccaaccaccccgccagttccaacaaagagaagcatcaagaccacgtaaatcctcgacaagaatacagttttcagcctaactccagagtaggacagaggaatcaaaatgggaaaagcaaatcccgagttcggcaagatatcagttgcttaaattgtcaagaaattgggtcatttcgccgccaggtgcccgaaactgagaaacatagctgccagcatgtcagtccatgcaactccccacaatcagaagcttgttccttagcgaattgtcatccatgcatcccgaagcagtcgtatagcctgagttgcaacaactgagtgcactaccacaaaggtgtcaatgcttaatttcagccccagccaccagttgacaagacagaggccaatatctgcgttgtacctttggatgttccagtacagcagccgagaaattaagtacttgatgaagaacttgggcgtaagaaagttattgtttgttacaactgcagtgaagaaagacattactccagaaattgtccacaaccaaagcgtaacccgcgccatcattccggtcgttatgcacgaagaagacatgaccacaatatcagggtcactggagcaaatgcagtacctgttaagcctagtgctagtcagtagcaaccataatactcttgtatcggtgttcaagaacttttgttttatagctattccccgtcaaccatgtaataagagagaaacatgaaataatgaatgagtttggcatgtttatgaaggatccatgttaagattgcaagtgctgtgagttatgtacgttttgttgatgattaaggagacctagggtctcatttccgtgagctcctactctattatgaatcaaataacctagttgtagatagaaaagaaaatcaagtgatcaaccaaagagatatttgtttggactaagagtttcatatgtgtctttttctgatcaaaggcaacgacagtcagtatagcttttgacgaactacttcaaggtttctccgaaaggcagcagggcccaaggacctcattgccccagaagcacccacaacacccggagcgaagagtacctggttgagaaaggtcaaaaggtgattgatggaagagatcggaaaatatgtttggttactgggaaaagaagtaggtcgaaaggtgattgataaaggataacgagaaacatgatttgtgtcactcgaggaagactcccgatagcaatcgaccctacaacagtcaccctgtcattaaggtagaagaatttgcgagtaagcaagatgaccacaggtagaagtacttctatgaggacaaggaagtcaagaagttaacctaaacagttggaatctaaagctcggttcaaccttcagctctatgtccgttagtcgagatgtcatggcactggattagtacgcgggtggtctcacccctatgtgtgtggcgcacccggtctaggtcctgttgctaggggctcaatcctggccctgcctgtccgggatactggccgtaggcagggttgggtcggtacttttgttcacggctaggatgggtgaagggttatgtcacatgtttacgacaggttccaaggccatggaatgcggagtaaagatgtgtctttgggtaaagatgcacacctctgatcagagtaaatctattcgaatagccgcgctctcggttatgggcaagcctagcaatgttcccaagttagtggtttaattcttaaaacttgcttaacaactaaaatgtggaatggttggcttgggttgacatgggacgagctgggacccaggtcgggttactagtttggtctgaatcatcgtaggcctttggttaaggcaggttcgtgtgggttcacagccttgattaataatattgtgtagctctaggatcgtgtttacaaaatagctttgagcaactaagtgtcttttaaatgctgtttactgcaaaacataacccctattattaccccttgtacccccttgcattaatcatgcatctcccggtgtggcttgctgagtacggtggttgtactcattcttgctctatctttcccccccttcagtaagagaagatttggagaagaagtcctaggtggagtcctggcttataccccagttgagcacttgtgaagatggaaccgtagaaccgctagtccactgctgtttattgttgattgtcaggcctgaagtgcctttgtaataatgtaaatattatcgatataataaagatgtgtcttttatatcatgtttgggtggtgtaccccggcttttcctgggatgaggattaatacactagcattctggaaaaggtatttttccgggcgcgacaagaggtgtacaaatttacccataagactcaactccacaatatgtcaccatattaccatgtgcccatgctgaacatgtcaccatttgtgtagttatgacaagacccctcgcatagctcaactcaaagcagcgcacctttcctggataataatcaccccctcaaaaaaaaccagaggcatggactccccagcgacccccacggacttttcgctgcttctcagtctggcgcaccacaacaagccttgctataccatgtgtccagccgttgcccattctggcttgttgttagtacggtaaatgtctcacaacagtagctcgtgaaccggtcattaattgacataagcacgaccttcaaaaccatgtgctcacaacccaccattatcaagttttagttggcaagtaattaattaatcaatcatgatttgatgcgcactagagttcccgatcttccaaaaggttctgataaacaacgatttgggtggagtcacgacacaaatagatccggcttcttgaacgcgcacactcttgagccccgcaatcgtagcaccacgtctcttctgattatcacccgtgtcaaaacacggatgacctcgccgagaaggctaatccctgtttgccaatcgaagaacacaaacaagaacgagatagaaaacaaccaaaattacagatgaatgattaagctcacgagttggggtcttacaaaccgatctagcggcgaaactgttctcgacagaataatctaagcaaaacgcaactctaaatgatgacagctactgaattaatatgattaggttcgtcctagagttgccctagggcccacaccccattgggctaagcctacgacacaattacaaggcccaaaactcaaatcagattcggactagatgaggtatgtggcttgttttgcagattcctggcagctcggtaggaattttgatgtgggaccaaaaccatcttaaaatagactccatgagctttccaacaagtacttatgggccccgaaattccttctagatcagcagctaggtccgtttgaaattgatgttgtcaggaggcccaaatccgaatccaaaacgtgtagaactttatctattgtcttctatggactaaaagtgacgtggtgagataaaagaagacttggagaaggtcttggtttggtccccaatcaacttctttaatcatccatgcattagttatgctcgatctcttttccttcgcccaagcaagtacctctacaaacgaaaacacacaaaactcattgtgtagcaacgtttgttcaaatatataacaagtaaatctaatgtagaacatatgcacctttatttgattaatacataaggtagtcatggttatatccgagctagttatgtcctcatcacgattgaccatcgagagctaccattaaatataatcatacgtggtagtgtaacattagttatcccaatcatgtgctaatgtttctaagcatggctaagcaattatgtctaacatctagctgaaccaatatataaatctcaactagtcaaattataataacccaaggtatcaaggaatagagtaatcaatgcaaagtggccataacaaaggaataagttcacaccactcgatgacattcgaaaataaatgcacagttgaaataaatagagaatttaaatataggaccaacatgttcaaaggattgtgtctgagatctatgtgacttgccttgcaataatcggtctttaattagtcttcagaaccacttccgacgcactcgcgaaccttcgcaacgacagaaacgacaagctatcacacaaaacggggaaaaagactaagaaactccaaataaacagtacataaaaagtaaacaaacatgtagatcatgattttagatgaatttataaactttaacggcctcatatgaattagttatgaattttacaagattaaactgattttagccttataaaaaaaggaattacgatttaaataaaggattaatgatgtcatgatgacatcaccactgagcatagcactggaccacaccaccgctggcgatctagggcacgtcggtgcaaaccgagggcatctacgtgaagaggatggcgagacgaactcaccgagggccggcgctacggaggacgacgacggaaaacggccggcggcaaggtcgaggtggtggtagtattcgggtcgatggtgtcggcggttctccagcgggtttcggcggcaacggaggggtggacggggttctcctcgcagctgcgaatccaaaggaggtggcggcgaccgaaggcgacgacgggaggtgcagcagggcctcgccggagatcaaaacgcgacggtgaacttcgggttgatggtgacgatggagctccggtggatttaggcttcggggaagtagaggctggtcttctccttcttgcgaacccaatggcagcagcggcgatggatggagcggctggagcggctggagcggctagcggcgacggagagagaaggcgctcgcgggagaggcggctagggcacgggagctcgtgctaggggttggaaagaaaagaggaggtcttggggttctatttatagccacgggagggagagatcgggcttggaacacaaggaattgcgccaggaaaacctagggtttgcaggagagataaactcgaaaacgaatccagattcgcatcgaattgaaagggataaagtcggatttttgggagaaaagatagaggaggataatgggaatattttccctcaactaattttcgcaatacaggagagaggaggccggatttggaggcgaaaaaccgggagggcctgatccgaaagaaaaaaatcgggagccatccgatgtgggagaaaaaaatcacaggtcccaaaactactacaggcatgcacagaaatattatttgtactcactgcatacacagaacatgcagccatgcatgtgtccactattttaaataaactttaaactactttttctctcaaattacttatctaattaacgatccgattgcaccactaaattcgttgcaattaaatctttaaaacaagaccacacatgaatataatcgatgaaatgcattcacagaacatgcagccatgcatgtgtcaagttttttaaataaactttaaactacattttctctcaaattacttatccaattcacgatccgattgcactactaaattcgttgcaattaaatctttaaaacaagaccacacatgaatataatccgatgaaaaaaaattttagcttattattgaattattacttttccaattaaattaatcactgaaatgatatttaaattgttaaaaatacttccaatgctctaataatttcaagaaaaatcatgaaattacatgaacactataagtatttaacaaaattataagcagaccatttaatgattaactaaatatgtgaataataactgaaatgttctttgtattatcaaaattagtaattgagctcagaaaaatccgagaaaattccagagagtataattaatcatggagaatttaataaaaattaaatccaaccatgccttatattgaggaaattttatttcccacatttaacttcacttgtaaattaatgaacatttaatataaattctaataattatttattaaataatttataaatcctgaaacgaaaatcaggatgtgacaatattgtccttcttttcatacttatagctgtatcagttgagtttgatcttatgagtcatgattagaatctcaatctctagcctgcttcttggtagccgattagggtagtatcagggtttcagccgatcttacctgattgaactacaatacttgttttatatgcttcgttgatatgttaaatctgccctttatgctaagatcttatagcatttaaatatattaggctttcgtttgatatattctgcttgctttaatatcttaatatagagtggtatcggagtattagccgatacatgctaaatctacctgattggctatgctatgaacctatatagtcccattattaatatatatttcgatctaagtgatttatactgtctcggcatggcgaccgatctatcccaatcacttgatttaagtatatatcgatataaggagtatatattgttaatatctacagccaatcgagtagatttggttccttcttgtttactcatgactgtcgatcgatacatatatgacatcggctcaaaaataaatgatatgtcatcggccaagggtcgatcggctgtcatttatgaatttaaccgcggtttctttgtctttgttcttgttgattgcaggatcaaatcaactggcacgcttgcatacccgaaggcgagttttggacctgcactggagttaagcagatctcccaggcctcgtgttttacgtcaacacgcttttggcatgcccggtgggactgattagaagtcagagttttcctcatggatgagaagccgccagcatcgttgtctcggctggtgaacccggctctgttaaagctaagatccagaagctaggtctatctgaagtcgaagaaggcaacatcgtgaatatcactccggacaagttgacacctgatcagcagaaggatcttgaagcaatgatgcaacaagcacgtaacctattcttga

SEQ ID NO: 16619 - DNA, 914 bp, Oryza sativa
tgtgtcttatgggtactgttgtgcacctctggccagagtaaaactattcgaatagccgtgcccgcagttatgggcgatcgaccagtttcaccgtgattagtcccactttattaataacctgacataatgaactggtgtagttaaggtggtttggttgggcctgttcaacatagtgtagcgttgttcagtggagatttaatcctgcctttcaacaataaaataatttaccaccgcctttatgcaaatagccacagacctctatttgttacccattgcacgcctgcatcattggtgtggcttgctgtgtacggtggttatactcagccctgctattatacccccttttcagatttgtagtgcttctgagttggtcctctcccttttcacttaaatggtccgcacgcgaaaatgagcatattttcgcgtacggacctattaagagagccgcacgcaaaaatacacaccctctcttttcctcctacccactttaaataattttgggaaaattggaaccatgccattataattttgcaaaattccgatattgacggcagggggcactgggcggtgactgatcaggctcttccgatgctttgagagcacattaacgcccagttcgccggcatacagcgactcgaggaccttgggacccaacttctccacactaccaatggcctggttgaagttgaagctcggcgtcagatcctccagcttggccttccgcttgccctgctcctcaatcaaactgatgttgggcctatcccgggtgttcacgtgctccgtttcgatgttgtaggccagagatccatcggtgttcaagtagacccacgccaaaccgctgctcttggtcgaggattcggcactgtgcggcgccagcagggtctggaagatttcgcagctggctcgggtcacga

SEQ ID NO: 16620 - DNA, 916 bp, Oryza sativa
agaattaaaacgctaacttgggtacattactcggcttgcccataaccgagggctcggctattcgaatagattatactctgatcagaggtgtacatctttacccacaagacacatcttcctcacgtgtaaccacgtgccacataccaccacggtatacggacggaagacgtgacatagtttccaacccatcctagccttagacaagagtaccgacccaatcccacctacggccgggatacccgggacaggcaggcagaactgagcccctagcagcagggcaccaaccctctgccgtatgacatctcgactaccgggccgcagctcgtgtagccttcatttgccctggagaatgtccatcgacgcccgacttcatccatctccaatccgtgtacttttgtttatgactagactgagtcacaaactaagccttacccattagacatgtggaagtacggtagtgctttgcaacagaggcccgaagaccggtccttaaacggccgaggtgctaccatcaaaaccatgcaccccgagcccagcctaaaaccattttagggggttttgaatagagggggcggtgtgaagccaattccacaataatccaacaattccagagtgtccaagtgatatgaatatttcccaaagtctatagttgtaaaaccacctaaggttacctaattagattgcgaagcatctacctaaaattatactagggataccatgagtagagtgtccactagttgaggttttgtttgtctagggtgaacaaggtaataataataacaataacaataataatatggtcataacaaaggtaaataggcatggctaagtaaaacagtgataacgcgggaatttaaataaagcgataatgcaataatttaaatcaacataattttataaactgggattcaatatg

SEQ ID NO: 16621 - DNA, 2748 bp, Oryza sativa
cccctacctggcgcgccactatcgatggggaatacccgtagaccggatatagagggtactagggtatgctggtacgaggatctatgtagtacgacatcaagcagataaaaaaacaaagattatactggttcaagccccttgataggtaatagccctaatccagttgatatgagattatatgatggaaaccacagattagaaagggaattgcggaactcgatgataccgacgagattgtaatcgaacaggttcaattagatctcacggcgacttggcttctgtaggcttcaactccgtaggctgtggtggatgtgttggctatgagattcgatgccttaggtcctcccgggggtcccttttatatcgcaggtcaaccggtctccaagtaggactcggagacatcgaacccgacacgatacaatgacgacccagttctgtccgagtatgactccttccatctgtgaactccgtgatgaattttcttaacgtatgccggaaccgtccgtattcgcgcaagcatacaatatcgatatgtgacgtatatcgaagggtagagggtataccttacctataaccctgataacaaccactatgcataaacttgtatggtagatgcaaatagatgcaatatctatttggccggatagatagagtaatatgaaataaagacatgtgaattgggtgaaaatttcttaaaaccctataaattggatgacaaattatcggtctgaatataggatacctcgtactcatactttgagtacaaatataccaaaatatacaagtacaagtatgagagatatcccatatccagaagacacaaatagtaaacaatgattacttactactatcttcgttttttaattagtttttactaatacatttaacggttggctttctcaagcaccaatattttgagcaaaagtctaagaaaagcattccgtagcgacaagagccgcagaaagtgaaaaactaccgtagtgaattaggagcgcaacaaattaaggggtaaactgacgacaaattaagggatctaaggtgaacttattccataccgtaggaggaacccgcggaagagatccagcccagtagagcccaacctggtacttagcagccctgaccatcatcagaagcatggggctgcaagttttccctgttataattaggagcgcaagctgcgcaacaaatgcgactgtaaattctgtgattaagtattaactagaaaatcagcatgtttgttggcgcaccgaccagttttacttttatataagtttaaggatcactgcagcatatgagttttcgtaaaattcgttaaaaaaatcattcaaacatctctatggattttaattcttcgtggaactaatcaaattacagtggggattgtctacagtgttacagctgtagtagcagccgctgacatgtgaaaccggcactgctactgcaaatacagtactgcagagcatccatatccatcaaattaggatagtaatatatggctgaggatggcctgtttaatttttacctagctgtgttcggtactcttcccaactctcctctctcgttttccgcgcgcacgtttttcaaactactaaacggtgtgtttttttgcaaaaagtttctatacgaaagttgcttaaaaaatcatattgatccatttttttaaaaaaattagctaatacttaattaatcacgcgctaatagaccgctccgtttccgtgcatgggagatgggttcccaacaccaacctccgaacacagctagagtacatttctctttacgcaatcttttattagatatttctctttaaccattctttagccaatatttttgttttcaaccagataattttacctttgttacactttggatcaccgtgactattcttaaccgtacggatctcaaatatactagccactaagagtcgcgcgtttgcgcgaccataaaaagccatctttgttaaagattaaggttgccttttttttcctgttgcaactaaaatgatcttggccctaaacattaatacgaagttgcccatatgttacatacatgaccaccgtagtatttctttttttttcacagaaacaatttatactacctatgtttttaataaatgacgccattaacttatattcacacggttgaccatttgtcttattaaaaaatttacatatttctaatttattttattgtgagttgtgttacaaactgaaagtacttcaagcatgatatatatcttatttatttaaaaaagaatttggaagacaaatagttaaatatgtatctaaaagtcaatgatgccatatattaaaagacaaagggagtattgttttacttggtccatgtgtcaaatttcaaaaaaacccaacttatgaaattgaagcccattaagtttcataagtgtctatctgtgttgcttgctctctttcatgctggcaagtacgtgaggagaggcactagaaggctccggagggataatgcagtacgtatttgatcggacggtcaacatttatccaatcatgcatctgatggcctttgttttttagcttacgtggcctaatgtgcttttgagaaagattagttccttcattactttagactagctcctacttgtcaatgaaatcccatagccgtatgtagataatttctttgacatatgacaaattaaaatcatatggataaaagacttgatagtggttcaaggtatcacaaatgtcaaattattcggttcaaattaagtgaaaattagtt

SEQ ID NO: 16622 - DNA, 780 bp, Oryza sativa
tgatctgctccgttcggaagttatttgcttggccaaaagtcataggcaacgtaattttgcccaatggtttggacgatgactgaggagtgattccatggaaaggttgatcggtgggtgtcaactcgcttcgtgggatccccatcgcgtccaaagtgctagcgaagagaaggttgattgagctgccgccgtcgatcagaactcgcgcgaccttgatattccgaatagtgggttcgaccacgatcggatatcgccctgggatgacagcagtcttggggtggtcctcttctgagaattctatcttctgctcagaccactttatcttgggcgcagctccctgccatgttgaacagacttcacgttccactttcttgtattctcgctttgaggagtatgctgtggaacctccgaagatgtgcgagacatggagatcagagtctgggtatgctgagtccgattcctgagtagccgccttagcgtccttctcggccacacgtactcgcttgcctttttccaatgccatgtgttttgcgagcgactttttgaagatgaggcaatcttctagagagtgtctgtccgacttgtgtatagggcaccatgttttcttcgtgtcgctgctttgtgggtctgggcgcttgggagggtccgcgtattctgttgcgagaacttccgcttgagctttccttttcccactcttgcgatttttcttcttgcttgactcaggagcgtccttggctggtttcttctctcctccggtctttggtttgtcgttcttgcgtctca

SEQ ID NO: 16623 - DNA, 773 bp, Oryza sativa
tcacgctgaattcgatacagcatacaatgctatcattgggagaattgcacttgcgaagttcatggccgcatctcactacgcgtatcaagtgctcaagatgccgggaccgaagggaacaatcactattcaagggaatgctaagctggcagtgcaatgcgacaagcggagcctcgacatggtcgagcacacgcccagcccacccaccacagttgagccacccaagaaagtgagcaaaacaaacaagacggcgaaaccggacggtgcaatcaaaatcgttccactctccagtgccaaccctgacaagaccgtcaagatcggggcatcactaggcgagaaataggaactcgcgatcatcaccttcctccgcgacaatgctgatgtgttcgcttggcagccgtccgacatgctgggggtatccagggaggtgattgagcacaaactcatggtgcgaccggacgccaagccagtaaagcaaaaactgcgtgagatttgcaccagatcgaaaacaagccatacgagaagaactcgacaagcttctcaaagctggttttatcagagaggtactccatccagagtggctagccaacccagtcatggtgcggaaggtcaacgggaaatggagaatgtgtgtctattttaccgacctcaacaaggcgtgtcccaagaatcacttccctcttcctcgaatagaccaactggtggactgaacagccggttgtgagttgctgagctttctcgacgcttactccggctaccaccaaatcagcatggcg

SEQ ID NO: 16624 - DNA, 599 bp, Oryza sativa
ataacacagccgagtacgaaggactactcgccgggataagagctgcagctgcacttggagtcaagcgactggttgtgaaaggggattccgaactagtcgcgaacaaggtgcataaagattacaaatgctctagccccgagttatccaagtatctcgcagaagtcaggaagctggaaaaaaggttcgatgggatcgaggtccgacatctataccgcaaggataacatcgagccggatgatctagcacggcgtgcgtccagacgagagccactcgaacctggtacctttctggacgtcctgacaagcccatcagtgaaagaggcaagcggcgaagatagcccggtcgccctcaacatcagctcgggggctacagaggtagagcgcgccattgccgatatcgagaccacagacgaccggcgcaccccactcattaaattcataggcagcgaagagttgcccgaggacgacgcagaagccaaaaaaataacccataaagcaaaaatcaactgtatgatcggcaacgatctatacaagaaggcaccaaacggggtactcctaaaatgcgtctcgtccgacgacagtagacatctcctcctcgac

SEQ ID NO: 16625 - DNA, 756 bp, Oryza sativa
actagacaaattactgagagatgcaggatatagcttggatcatttccagttaccgcagctaagccatcatgcttttccaccattggagtataggcttataatggatgaacttgcttatggaacaaacagtgtgactgaactgcttaatcaattaaatccttatcagaggcatgtttacactgccatagaatcctcagttttaaataattctaggcaaacattttttgtttatggatatggtggcacagggaagacatttctatggaataccctattgaacagcattagaaatagagggaaaatagccttgacagttgcatcttctggtatagcatcattgttacttccaggtgggcgtacacctcattcacgctttaggattcctctagacatccaggaggactctatgtgtgctattaagatgaacacccagctagctgaattgattcagcagacatctctcattatatgagatgaagcacctgtcaaccataggcattgttttgaagcattcgattgaacccttcgggatatcatgtcatcagtcaaccatgattctgtgaacatgcagtttggtggtataacagttgtcttgggtggtgattttagacaaactctaccagttattcctaatgcaaggaaacaacagatcttgaatgcctcaatcacccgttctcgcctttggcaaaactgtgtggtgcttgaattaactgaaaatatgaggctcagctgtccaggcctttctcttcaagataa

SEQ ID NO: 16626 - DNA, 585 bp, Oryza sativa
gaggatggtcgcttgagccattacagaattgactcatttcagaagaaatatagagccagcccatacaactctttggttcaggctgttagcaccggcatgacacaaggatcaacagcaggtcaaaagatcgttttgccagcttcatttaccgggagcccacgttattactatcagaactaccaagattgtgtggcactttgtcgtcggtttgggtgcccacatctattcatcacttttacatgcaatgctttatggctagaaatagtagaagctttagcacccatttcaggacagtattcctctgatcgacctgatattgttgatcgtgtttttcatatgaagctaagaatctttatggatgacatagtaaaaaaccagttttttggtccaatatctggaggtaatttccatagctccttaattttgcgcactatgttctattacataatgtatttcccgttgatatttcccatctacatccaaatttttcggctattttttttggcctgattttccccttcgatacttctcaattagttttccattcccttttttgtagttgtctacacaattgagttccaaaaa

SEQ ID NO: 16627 - DNA, 576 bp, Oryza sativa
cctgatccaagaccttctggagatcgagttcaagatgcgccaacctcacacacgcaaggacatggcatgccccggtatatatcccgttagatgtctcctctccgatcctggccgcgtgcttggaggggatcgcctccatcgccgtcgctagctccgcaagcgaagtcgtcagcgagaactcattgggattcgccgggatggtggacttgataccgcactccccggcgagctggtgcagaccagtgtaggtgacccgcaacgagccacggatttccgacaagttgttctcgagctctgacatgcgatgctcgagcccctgccattgtcgctcgttgccggccaccagttccctcatcttctggaggtcctcgcgtacctccgccagacacgcgtcagccggtcggcgcgctcattcgccgacgacgccgccaccgccctcgcctccgcgatctcgcagctaacaccgcgagcacaagcctcgaggaggcgccctatctcgacctggagctcctcccatgtgaggacggcagtcggcggaccccgacctgccgcgagatcgctggctgggccgctcgg

SEQ ID NO: 16628 - DNA, 1354 bp, Oryza sativa
agaatagtcaaaggctgggtgggctcgagcctggagcggctggatccgcctaccaatgaagtcggcagcgacttcatacctcgacaaacctcatactcggaggtcatcgatggcatcgatgaaggattgaagagaaggggtcaagggaggttttgcggtccaagacgaaaatcttgtctggttgttcctcaggaacaatgaagactggatcagaattttctatctgaagatagaaccacctcacccgccatttgctacgagaagaagggcgctggaaggggatatagcgtgacttcaggccatcccggagtcggaaaccgaccaagaaacggctgtaccccaatgtagtcatcacaacgatgcgaaaaaatactgaggaaggcgatggaattggggttcaaatggagcaaggaaaggccgtagaaattcaagaccaagagaagaaattcagaaggcggagaagaaaaccacagagaatatagtcctcgatcgcaaccatgtgacccaggacaggctggggttcagtacctcctacttctctctccatggtcccgcgaccgggaagggcgccatccttctgtagcttcttcagcgacgcgctggtggaggtagacttgtcgagatccattgccgctggagatcgccggagaagggaccgaaatgagctagctagggtttttgcgggagcggagaagacgaggaatgcttggaggttggagagttttttcacaacaggcggacttcaaaagggatccccaaaactcccttttatagtcacacttccgatggtgcgaattccaaggaaaagaagagatggccgccggaaatttctgggtccgttacgtgcggcagtttgtcggactttaatttaaattcactcatgaccgttgagcttcacttggcgttgtcgattactcttcgtttctcagtcctcacaccgagaacgacaacaacctcgacatcagaagtcatgatcggttacacaagttcatttaagcagaagtcggggggctactgtcagggttatgggtaaggtataccctctacccttcgatatacgtcacatatcgatattgtatgcctgcgcgaatacggacggtttcggcatacgttaaggaaattcatcacgaggttcacagatggaaagactcctactcggacagaactaggtcgtcattgtatcgtgccgagtccgatgtcttcgagtcctacttggagaccggttgacctgcgatataaaaaggaccccttggaaggacctaaagcatcgaatctcgtagccagcacattcaccacagcctacggagttgaagcctacagaagccaagtcgccgggagatctaattgaacctgt

SEQ ID NO: 16629 - DNA, 1924 bp, Oryza sativa
tcatcactggcctggcaaaacaacgcctggatttctaacatccgcggcaccctcactgtcccggtcatctcccaatttctccttgtttgggattgggtgctccacattcagcttacaccgggtgtcggggatcgtcttgtctggcattggacgagtgaccagcgctactcggcgcgttcggcgtaccaagcgttcttctttgaccagcactcctttgcttgtgccgatcttctctggcacgcgaagggccctgctaagtgcaaattcttcctctggtttgcatttcagcagcgctgttggacagctgatctcctccagaagcgcggcattgatagccactcggcctgccccttttgcgctcaagagcttgagacggcgaaccacatcctccttgactgcatgtttgctcgtcaggtctagttacgggtgttgtcttctcctggctgggctgccctctctcccctccgtggcagctggctgcaggattggtggccatcttctagggcatgtttacctgatcatctgtcacgaccggaattaacccaacgggcgttccttacgtgcgtgtattattccttgtcccaggaggcaaggtacaccaaaagttgatacatttcagagtttatcaagcggaagcgtaaatagttaatttattacatgggcggcgaaggcccagcacacacaaagacaaacgggaaacagcggaagactagggcgacgaccacaggcgcttgacggcaggcacgagctagacaccaaagccttcatcatccaggggctcctcttctgggtttgggaaaaattgagcaagactgagtacaaccaccgtactcaacaagacacacccacaagtgcaggataaatgcaagggagtacaagggggttataatataaaagggtagggtttacagtaaacagcattaaaagacacttagttgctcaaagctattttgtaaacacgattccagagctatacaatattattaatcaaggccgtgaacccacacgaacctgccttaacccaaggcctacgatgattcagaccgaactggcaacccgaccctgggtcccagctcgtcccaagccaacccaggccaaccattctacattttagttgtcgagcaggttttaagaattaaaacactaacttgggtacattgctcggcttgcccataaccgagggcgcggctattcgaatagattatactctgatcagaggtgtacatctttacccacaagacacatcttcctcgcgtgcaaccacgtgccacataccaccacggtatacggacggaagacgtgacatagctcccaacccatcctagccataaacaagagtaccgacccaatccccctacggccgggacacccgggacaggcaggcaggactgagccccctagcagcagggcaccaaccctctgccatatgacatctcgactaccgggccgcagctcgtgtagccttcatttgccctggagaatgtccatcgacccccgacttcatccatctccaatccgtgtacttttgtttataaccagactgagccacaaactaagccttacccactagacatgtggaagtacggtagtgctttgcaacagaggcccgagcttaatccttatagtacccgaggtacgactaacaaaacccaaccacgcacctcgagcccagcctaaaccattttgggggttttgaaaagagggggaggtgtgtgtccaattccaacataagccaaccattccatggtgtccaaatgatatgagaattcccaaagtctaaagttataaaaccacctaatgttgcctaattaatcagcgaagcatctacctaaatttatactagtggaaccatgaatataatgtccactagttagggttttgtttattctagggtgaacaaggtattaatatcaatagcaataat

SEQ ID NO: 16630 - DNA, 726 bp, Oryza sativa
gtagtcccaacatgataacgacaagttccaaacatgtgtgttcttgttgtgtttcacaatttttaaatgttccaattaatatttttttttcatcgtgcataattttaatgtttcatccgttggtccatctgatttttatggaggaatcgaacgttcgatttggagtttcctcccagaaagacagacatgtgccaagcacacaccaaaagagggaagggaacacgatattattccaataatgaatctataagtgtttcttaattaactcgttgatcaccaactttacaaacatcgactgacgggtcctccttgggacgacccaatgcattcctccggcacaacaatgtcgaatccactcagcgtccactctgcctccgcatacttgctgacgtatatctccgttccgacgtccagcgacgaccacctcctcttcgccggtggcgtgcccggatcctacatccatgttgcaaaacaacatcaatcacactcacccaaaatcctttccattttgctaaaaagaagaacgatcacttcctatctctgcattctgcattgaaatttctcaaccaaagtaaaacatcaactgcacaaatgcaatggactccctacatcctacaatataagaatctaaattcagatggatatttctgattcgtaacaatagaaaatatcccatctcatctacgattctaggtcttatattttgggacggaatgagtacctggt

SEQ ID NO: 16631 - DNA, 1788 bp, Oryza sativa
cagggatgcttatggtacagcttcatcaagaagagccttcatggcatatgtgtctgaagggttaggcaacctacaagactggaatcaggtaatggcgtatcaaaggaagaatggatcgattttcaactcgccttctgcaactgctgctacaataatccatggccacaactatagcggcctcgcttacttggattttgttacaagcaagtttggtggcccaggtgtgccccccccctccccccgggtactatatgtattttgcccaagcaagtgaccaagaatgtcaactagaaatatgagatgtcaaatatactaactggaaatgggtgttttccagtcccggtgatgtatccgcaaaatgcttattcacaactttgcatggtggatactcttgaaaggatgggtatctctgagagttttgcttgtgaaataagtgatatattggacatgacatacaggtaacagcaactcataaaaaaatacctaattaaaaagatataggagaggctaatgatggcaatttgatgtgcctttgtacctactactttatttctattgtattatgtttgcaggttatggatgcataatgaggaggagctaatgttggacatgagaacatgtgcaatggcatttcgcctattacgtatgcatggttatgacatcacctcaggtactgcatggagcttcaggacacttaaatttgaatgtcctagcttttgctcggttttgcagtacaaaatttcaattggaaatattaataatcatttcggaactattgagcagatggaatggctcaatttgtggaacaatccagctttgatgattcaattcatggatatctaaatgatactaaggctttgcttgagttgtacaaaagttcacaacttcgttgcttggaagatgatttgattctagaagaaattggttcttggtcagcaagagtactactggaaaaaatatcttccaaaatgatacacatatcagaattaccggaggcaagtactaaataggcaaattttgctagactacacttaaagtttatgtaatttgctggagatcattgtaaaaatgtgtcacggttgaaggaaaccctaaaaaagctagtaatttgctagaggatattttcagaccaactaaagagagcaagagtaaagatataaaatactgcttgctagtattaatgtatttggggtgatggcaaatttagagtcacatttttctaaattttctctccaacatccatgttacaagtctgtgaccattggggcattctcgtttatttgaagaatttatctatccaattaggctaaaaatgtcctctgccaaattaccaattttttagagtgttttccaaccatgacatgtttttatgatgtttatatcaacaaattacaaatactttgggtgttctgtagaaaaatttgcctactaaataacatcttagcgaacaaatgttcttgcaaaaaaacatcgcagccatgcaaaagaaggcgaatctttctcataatgccattatcatactttcgctttcgcaggtggagtatgccttgaaatgcccagtctatgccatcttggaaaggctagagcagaagaggaacatagaacaattcaagaccaaggaacaactaaaaatcgagggcttcaagctgctgaaatcaggataccggtagatatcattgttacacatcacagccgtacaatttatttctttactgttgtagttgtctaaatcgtgaacctattataacatggatcagtggcgttattccaaatgatgaaattctggct

SEQ ID NO: 16632 - DNA, 1429 bp, Oryza sativa
actttcgctttcgcaggtggagtatgccttgaaatgcccagtctatgccatcttggaaaggctagagcagaagaggaacatagaacaattcaagaccaaggaacaactaaaaatcgagggcttcaagctgctgaaatcaggataccggtagatatcattgttacacatcacagccgtacaatttatttctttactgttgtagttgtctaaatcgtgaacctattataacatggatcagtggcgttattccaaatgatgaaattctggctttggctgttgacgaattccattcctctcaatctgtctaccaacaagaactccaagacctcaataggtgcgaaatctatctatatatgatcatatatacctatcctcgattcatccattccaataagatgtttttgatatcattcactaatattgagcatatgacagttgggtggcacataccagattggatgagctgaaatttgcaagattaatgccatcgataacctatttcagtgctgctgccgtcctgttgccttctgaatcagcccgcattgcatggacccagaactgcatcttgacgaccacagtcgatgacttctttgacggtgaaggatcaaaagaagaaatggagaacttggtcaaattaatagagaagtacaacacacctgtacactatgtcttttgtacaactaatatctatcagtcctgttgtgataatatatatcgtgctgtacaggtgggacgaccatggtgagattggcttctcctccgagtgtgtagagattctattctatgctgtttacaacacgagcaagcagattgcggaaaaggccatgccgctgcagaaacgcaatgccgtggatcatatcgccgaatcggtaaacctatctcttctacgtgtgtgagtttccacttttaaggcttctaggttttagttttccacgatataatatataatctatttgcagtggtggttcacggtgaggggcatgttgaccgaggccgaatggaggatggacaagtatgtgccaacaacagtggaggagtacatgtcagctgccgtggactcctttgctgtaggccccatcatcacctcggcggcattgttcgtcggaccagagctctcggaagaggttttcaggagcgaggagtacatccacctaatgaaccttgcgaacactatcggtcgccttctcaatgacatgcagacatacgagaaggaaatcaaaatggggaaggtcaatagcgtcatgttgcatgctctttcccacagcggcggaggccgcggctcaccggaggcatcgatggaggaggccaagagagagatgagagggtcctccagggctgtaggtttgagctcctaaggctggtgactagggatgcgggtgttgttcctccgccgtgcaggaagctcttctggctcatgagcaaggtttta

SEQ ID NO: 16633 - DNA, 698 bp, Oryza sativa
taactcataaaaattggtcttgacatttttagttttaaatattaatgatgtgacggcatgaggtgtgcatttccttttgcacacagctttctaacaaaaaaaagggtaaaaaacaaagttgtattaaaccagtgatttgactttactaaaatattacttgttttccatcttagatctgagttctgaaagtaaattgccataatagagtgtaatcattcctaacactcactatggaggcttccagagaaactcatgatgagtttggtgttaaggcgtctaaaacttggctattgctcctttcatcattgttatgcatatcaaatgctgaccaacagtatttaacctaaggaaaaacttgtgttctttagaaaattttcaaatcaacggaacagatacagcctacttactagtttagttactccatttcataatgaaagagtaaacatcctgccttgtgagtttgtgttgaacaaatttgttttgatgatttgtttgagctactgagatgaaattcatctgcttttggcttataggatgctaaagagggaacaacaactggggtatctgcaaaggatagggcaaagacagtatgactcttgcatcccctgactctaagcctgaagacttcaatcggcctggtcatattttccctctgaaatacagagagggtggtgttctgaaacgagctggacatactg

SEQ ID NO: 16634 - DNA, 703 bp, Oryza sativa
atccccaattccagataggtactatatctcacaaagggaaaaaaaaagagagactaggctaagcttccacgaacagcatcttgtgtgtctaccatttatggatatttcgcaccttaacacccttactcttcacgtcaaagagctccaagtatggagagcatctaccttagactttcccatcaaacactccctgaacactcggtcaccgtctccctctttaattcccaaaagttcatgcagccaccaacctcctcacctcctcatagcctatccaagaactccattaaatttagcagttggccaaggattcaggaatggtgtgtgtgtgctctggtttactgttttagcaacaagaagaatggttaattagttaagtgtcctggtgagtggcttatcgtcagagggatgacgcgaatggccaggcgcagctgaccgatcgctgtcttttggtgtgcagacccgctgtcgctggtgagggaccaccgggtgaaggcgctgctgacggccgagggcatcgccgtgcagtcgttcaacgccgacctgctgtacgagccatgggaggtggtcgacgacgacggctgcccgttcaccatgttcgcgccgttctgggacaggtgcctgtgcatgcccgacccggcggcgccgctgctgccgcccaagaggatcgcgcccggcgagctgccggcgaggaggtgcccctccg

SEQ ID NO: 16635 - DNA, 2313 bp, Oryza sativa
tcccctgttttagcaacaagaagaatggttaattagttaagtgtcctggtgagtggcttatcgtcagagggatgacgcgaatggccaggcgcagctgaccgatcgctgtcttttggtgtgcagacccgctgtcgctggtgagggaccaccgggtgaaggcgctgctgacggccgagggcatcgccgtgcagtcgttcaacgccgacctgctgtacgagccatgggaggtggtcgacgacgacggctgcccgttcaccatgttcgcgccgttctgggacaggtgcctgtgcatgcccgacccggcggcgccgctgctgccgcccaagaggatcgcgcccggcgagctgccggcgaggaggtgcccctccgacgagctggtgttcgaggacgagtccgagcgggggagcaacgcgctgctggcgagggcgtggtcgcccgggtggcagaacgccgacaaggcgctggccgcgttcctcaacgggccactcatggactactcggtgaaccggaagaaggccgacagcgccagcacgtcactgctgtcgccgtacctgcacttcggcgagctcagcgtacgcaaggtgttccaccaggtgaggatgaagcagctcatgtggagcaacgaggggaaccacgccggcgacgagagctgcgtcctcttcctccggtccatcggcctcagggagtactcgaggtacctcacgttcaaccacccgtgcagcctggagaagccactcctggcgcacctcaggttcttcccctgggtggtcgacgaggtgtacttcaaggtgtggaggcaggggaggacagggtaccctctcgtcgacgccgggatgcgcgagctctgggccaccggctggctgcacgaccggatacgcgtcgtcgtctccagcttcttcgtcaaggtgctccagcttccatggcgctgggggatgaagtacttctgggacaccctgctcgacgccgacctcgagagcgacgcgctcggctggcagtacatctccggctctctccccgatggccgtgagctcgaccgcatcgacaaccctcaggtacccaacttctgttctcctccatgagatgggaccatctttgttgccattaccatattgatctgatgcattggtgttgtgtttcgcagcttgaaggatacaagtttgatccgcacggggagtatgtccggcgatggctgccggagctggcaaggctgccgacggagtggatacaccacccatgggacgcaccggagtcggtgctccaggctgcagggattgagctaggctccaactatcctctccccatcgtggagctggacgcggcgaagaccaggctgcaggatgcactgtcagagatgtgggagctcgaggccgcgtcacgcgcagcgatggagaacggaatggaggagggcctcggcgactcctccgacgtgccgccgatcgccttcccaccggagctgcagatggaagttgaccgagcaccggcccagcctactgttcacggaccgacaacggctggccgcgacgagaggatcagatggttcccagcatgacctcctcgctggtcagagctgaaacagaactttcagcggattttgacaacagcatggacagtaggccggaggtgccgtcgcaggtgctcttccagcctcggatggaaagggaagaaacagtggacggcggcggtggcggcggaatggtcggcaggagcaacggcggcggccaccaaggccaacaccagcagcaacagcacaactttcagactacaattcaccgggcacggggcgttgcgccgtctacgtcagaggcatcaagcaactggactgggagagaaggcggcgtggtgcccgtctggtcgcctccggcagcgtcaggcccctcagatcactacgctgccgatgaagctgacattaccagtagaagttatttggacaggcatccacagtcgcatacgttgatgaactggagtcagctctcgcagtcattgtgagttcacacgcacggtaactcattgttcccagcaaactgcgtcagtattacattgaaaaatcacagcttacagagtaattgtctcagctggttattaaaagggttgaaatttaatttcaagtgcagtatctgaaatgaagcattctatacgcttactaatgctcccatttattttatgcatctgaatgtaggacaacaggctgggaagtggaaaattaatgctgattgtcagaattaatcattaggaaggtcgacattgagaagaattcatatgtaaattatcaccttttgtttgtctatagccttggtgtgcatgaatcaagtgatg

SEQ ID NO: 16636 - DNA, 10883 bp, Oryza sativa
gattaaaacaagagggagacaaatattttatcctgaagtttggatcatagggatcctactctccgttgaggatcaaaatataaaaagaaatttaaataaatctccgagtcctcttgccgctttgtatttgttgttgggggatttcccagcacacctaagcaccctgggactaattatctgtatttatctcaataaacatattagtcccttacttgttttgtcattaatcaccaaaactcacttatgaggttagatgcactttcactccctcccctcttgttttctctcttgctgttagcagcaacacgccgtcccaagaccctaggtctccgccggttgctggctcccaccccgcgctaccggcatccacctcctaccatccctcttcttcctgtccgggcatctgagtaggtgtggtggggtggataacaaggtctgttgccatggagttagccgctcctatgaggtctggccggcgccaccatgcccctagccatgtggtcctcttgctcgattcatcgaccgaatcaccgaagaagcaagcgggtgaatgagatcaaccatgccatatgtccatcctttctttcaagatgattatttctcacatgttttgtcaaccctcattttccttttttagatctggaatgtttcttggatttttgtaatactggtttaatccagcattctggccactcggtttcacatggtttgtaataattgatcattagcatgcttgatgtattaatcataccaaacgttggaggatttcttgattttctttccaatcttaatttattcaacattaaggctaggggctgacatattgcatctgctctttttttaattctggctctagctcgcaagctaaacgagctagctcgagctggtacacgagccaagccaaagcctgccttttagctcgtttggataataagctgagctgaaccagcttgttatcctaacgagctaggtcgagcagagctgacctaagctagctcgatatccacccctagaagagagcgacctattttagctttatttttttattaaattgagttgagacaatttgagatttttgtcgggagcatccaaactacgcgaatctacatgatactcatgcaacaccgattatcttttatattttcttggaaactgtctttcagaaatgctaggggactagatcccaccccgtattccatgtggtatgctccccctgttagcttggcctcctctccttgcggcgtcacttttgccaccattccctttctctcactccgaccatcgctgccaccccctgaccttgccatccagtgaagagcccccatggcagctctagtcgagactagttcttgtcagcaccaaactacactagcgatcaaaatgtatccatgtcaaccacctccttaggtcggacctctgcggcatctatctcgtacgacaccctcgttgcagcggctgatccgcctgatggcgtatacaagccactacttccacctagaggctaaacctcttcggcaaataatgaagattggacactatgaggtttgaccatccgagtccccgctgctcgactccactaacccgatgggctagattctctgcaatgcgaccacgatgtctcgtataccgatgctacgcgggccttcggcgtaggcaaggaggcttggtaccgatggttttcggcctaatatcgatgagtatcaaactggtactgataggggtaccgcatctggtatcggtaaatatcaacctacttactgtcatcctgtccgaacggaattctgtataataacagcctcaaaattgaattcctatatccacacaagctatctcatatattttttctatatttttcaatccaccattttatgcatacattttctatcatgttaatatgtctttttgtctgttttcaataacaaatgatccgagcaataagcatacccaatagtataggatgtgtttagatccaggggtgaaaatttttgcgatgtcacatcggatatacggacacacatttgaaatattaaatgtagtctaataacaaaacaaattacagaatccgctcgtaaactgcgagacgaatttattaaacctaattaatccgttattagcaaatgtttactatagcaccacattattaaatcatggagcaattagggcttaaaagattcgtctcgcaatttacacccaatccgtgtaattagttttttttgtctatatttaatactccatacatatatccaaacattcgatatggcaggatatggcaagatgaaagaacttaccagggagtctaaagaggcccatagtacacttgttattcttcccactacgatacgattgcagcagtaccagcttgatgattcctctcacgacggtcgctactagtagtactacagtatgttgttgggcattcacttaacacatttttttagataattcactttacacatgattaaactgttctctagtcctggttgcctcctaatcaccatccacgggctgacggacgtcgacctcgcctacattttctatcgaattattcccattggaggagaagagggtggccccaaccgcaatccaacggaacttttgctcctcatcagtcctcacctcaccatactcctgtttgctgtgcgactgcttcgcaaagccgcccacttgaccgcccgcgcacgacgaattgagaatgccccacacttgtacgcacacacccacaacccatcccctcgcgacgcacgcaccgccgctgcctgcctcgtgagccgtcgccccgctgaggctgacgctgacgcgtgagcccgtgccgtgccgtgtcgtgtcgcggtggccggtggggaaaggagtgtcagcgagaggagttggtgggtggggaaaggcgggtggtggcgtggcgtcgcgtgcgtgcgtgcgtgcgtgcgtgcgagcgacgacgagaggagaggagctcacaactttgactttgatcacgacggccccgcttgcgcactccaccgctgggcaccgcaccgcggaccgcgcccccaaaactcctatccgatctgcctacctcttttgccattccacccttgctctttacgctttattctttctttcctgaaagccccaaccgtcgtacgcagaattacatcctggcccagaacgtgaaaccttccaaaccagcttgtaattttagaaaatagtatatgatttgtgtatgtttatctgaaataaataaatatatatatatatataatgtgtatcaaatagaagtcgaataataggggttgctagtacgcgcatatgcgctggttgattaactagcgttgggttagccaactagcatagccgagatagtagtacactcgtgcatcattagcgctaatgatagtgtaaaatgattgtgctaattatagtttttataatcagaataaattgaaaagttttgaatatatgagttgaaagttttaaaaatttgagttgattttttttaaaaaaatagcttaaaagtttaaattgtaagttgaaagttttcaaattcgacttgaaagtattcaaaatttgagttgaaagttttcatttcgagcttaaagttttcaaaaatcgagttaaaagttttcaaattttgagttaaaagtcttcacaaactgagttgaaagtttcaaaatttgagtttaaaattttcaaatttcgagttgaaagttttattttttatagtaagttttaaatttaattggatactttcaaattttatgtctatatttttaagcttatagtgaaaaagaaaacaatcttaggcagaaaaaaaggaaagattaattaagattgtgattattgaaaattaattacgtaattgttaagttaatcacgattttttctctccgagtccaggacatgtgcgcgtgttgtcggctaaaaaaaaaaaggaaaagtcacaagaaaacataacgtatggctgtgcatgggcctaaaacgtgcgccgccaacgcgcacgcgtgaattagcttttccggaataatagacacgtagatgagaaattagacattgtgccattaccaaaattgggtttcaacgaaatgccactccgcaaaagggattcgataagatgctatcctcaacccgtggcttcacgctagattgctatatgggaccaaattgcccttggattcctccatccctatcttctatttcaactccgattacccctcgccgtcattgatggttggccattggacatcgctctcgtctcatcttctcaaattgttgtagtaggggctcgcaactgactgagaccagcaaaggggctggtagtgaggccttcgagtgcgagcgcggacaaggggagctcctgtgcagtggcgaagctcgagcacaagggccaacgccgacaagcaaaagactcagctactggttggcctacctctctccctcacagtactgctcgatgacaagaaggggaggggagatccatgcctctatggaggcggtggttcaaggcgaagcacggcggtggatctcaagctctcctcgaggaggttgctgaaggcgacgattggtcggcaacaaagctctcggtagccatggaggcagctaatggagcaacaccatgcagggaaggagccggagttggagtgaagaggagtcgcgacaactggggaaacagagctctcgcataggcggttgtactagcgagagagatcatcctcgatggtgcctccaccgccggagacctcgttgttgactgccaccctagggaagttcatcctgaggaacaacttcgctcctcgttgccgctggtgtcctcaccgccgctgctgccatgagtaccatgtcacacactgacccaacagttacatgcccaggcaagaaaggagagggtaatttggtcccatatagcattctagcgtgtagccacgggtttaggatggcattttatcgattcccttttgtggtgtggcattttatcaaattcattttgtggaatggcattttatcaaatcccttttgcggagtggcatttagaagaaacctagttttgacaatggcacaatgtctaatttcttcatgtagatagaactccgctgcgaataatatcatatcatgaaagtatatggagagatgtgtctttatgatatttccttttcgaaaaagtatgagggaaaaaagttatagccataactggatgtgcaaatgtgcaacataaaagcaaaatggtataactgaaaagccactttatttattcacattatgtagcgtcatcctttggaaaagaaaagaaaaaaaaagggggcaatggaaatacttgcaaaatttaccaattgcagggacctgcgcgcaaaaggtatcacaaacctcaaagccgtcaaacgcgtcgtgatgccaaagcgaagttagaaaaaaaaaaggttgggaaatgaagtccaccacccacctactcgccggcggcggtggcggcggctccgtcgcgccaccaacggctgccacggcgccgacgctggccatggaagtaggggatccctctggcgccctcgtcggcggggccggcggcgccggagccggaggaggagacggggatgcccgcgacgcgctcctccggttggttgctctcggcgaccgcatggccgccgtccgccgccgcatcgccgcatctatatccggagaatccgggcccctctcttcctccgacatccactccgtctcctccgagatctcctccgctgcccacctcgtcgtcctcaacgccgcctccctcctctcttccaccgtcgcctccctcccggctccacctccgcctccggctactaccgtccaggagctcccccccgtggtggtctccgtgcctcaggaacccccgcaagaagcagccaagggcgacggcgactacgacgtcgtcgagctcgacgcctccgagcttctcgcggagcacgtccacttctgcgacatctgcggcaaggggttccgccgcgacgccaacctccggatgcacatgcgcgcccacggcgaccgcttcaagaccctggacgcgctctccaggcccggccagccgaagccgcctgccggccgggaggtgcggttctcgtgcccctacgccggctgcaaccggaaccgcgcgcaccgccgcttccggccgctcaagtcggccgtgtgcgcgcgcaaccacttccggcggagccactgccccaagctctacgcctgcgagcgctgcggcggcaagaagcgcttcgccgtcctcgccgacctccggagccacctccgccactgcggcgaggaggcgcagtggcgctgctcctgcggcaccaccttctcccgcaaggacaagctgttcggccatctcgctctcttcgaaggccacacgccggcgatcgccgagccgaacaagggtgtggcgacagcggctgcagaggcatcgatttctatgatggaggaaggaggagttgaagcgaattgtgatcgagaggaggatgaggagggtggttttgatccgaagttcttccaggagtggatggaggagctcagaggtggcgctgttgcccccaattggtctgcgccgtcagaagctggacattagcagtgcagcaagagcaatttgggtaagagcttctttatcttcctgccattttgttgcatatatttaaggaaatttggttgagatactgatgataggactaattagctgatagaaaccctttcaaaggcagaaagaaggaaaatgaaaagacgaattgctacattgttctgctaatcactgaaatcatgatgtactggatgtgtcgacttgatagacaaatcatcttcttctatgcaacttaatttgagtatgttagatgttcatggaaagattgttagtcaccttaatttatagtagcgaggcctgaatgaacctagctagatgcaaggttgtaggtagagaactaaacttagtgggtgggggaaattttgtatttgtttagctggttcattcctctggttgttttaaatcctgtgtgaatagaggttcaaatacttaatcttttgccttttccttcttgaatatgggactttcaaagtattcatgctcttgtataggttaggccggaaaagggagtataactaactttatgagtgcaactttcgtaatatgctgtatggaaggtctttcaacctttgctgccatttttgtgggtttgtcctcgacaatggcatgcccatctgttttgtgttctattaattaggtgataaatactccctctgtcccatattaagttcatttttggttcagggcacatattttctctaatgtgctagtatatatactaccaatagttagggtttgtgtacgtatgaaacttcctactagcagaaaagatgatgtcgtgcatggcagtatggcacttgtcttgaatttattgggcgttcacctgttggcgagtactgataaagattcgcgtatttgttgtgtaatccttctgctgaccagtaaggcagtaatgtgatctttctccaattagtctctgttgtcgcttagcggcttagtgtctttgtttttgaacaaaaacaaccttacctattccaagtatcaaatctgggttttgtctcttttccgcaaccgcactacgaggagcacatcacagcccacttgtcctctgttttaaggtgcttcccgcctttctttatatactgcgaagctaacggttttgtggaaatattatgttttcttttcctctacatatgctttcatctcaatgattattaatggcacttattttttcttgcatatgcttttatttcccattgtgcaaagattgtgaagtatcatgcattttatttaattttactcttcaccaatgcatttgggtatttcacttggaaggaaagttttgtttgtaaatttcttatcatcttggaaatgttaagaatttcatctgtctaagagagattggtgtccttattcatcatacattggagaggaatatgggttatattgctcttgttcgtgtgttgttaattgtaggtatactgaatgagataaattccacatgatcggatgaatcatgtctgatggttttctggtacctcacaggaggtaacaggtgatccttacttttcaacaggttatgcattccaaggaccaaattagaaaaggcttaccatacagtacataaatccatactatttgcaaaactcaaatctgggaaggatattttcatgaggaataaagagatccgttgattaacttacatgtttatatagccttatccgaaagttatgtatcattttgactagattgaatccatattatttggcggctgtgactgaaaattcctttattacaaactacaatgtttgcaaattgtgatctcattatttctatcttgcaggcctatggtaggaagagatgactgagaagatgaatgaagaagggtcctgtgaagaacagaccttcccccggcttgcctctgtctctctctctctctctcttcccctggtctccccatcttttaccgctcgctgttagcctgttatgcaactctcttttacccatgacaaggatctttataacctggaaagtagtggtatctgtttccgaagcagtcgaaataccaaatgatgaaagatattaaccgttggtacatcgtgttgtatgctcattgtgtatgtcttcatgattcagctttctacggtagtgtagatacaggtttctacacgttacagtagtattaaacacaacatcagcacccaacactgtaacgaacaccatacatgtgagatcttacaattgatcgaggtgaagtcacactgaaggcttctggcatgacagtttctactggggtaggcaatatgtgagatgttttgacagttgatcacagcagtagtaaactgaatgtttttaacttctttagctaatttatcagcaactctgctgatttcccttgggttattcatgttttatcatctaataacaataaaaatacaaatcataaaaaaaatttaaataagatgaacgtttaaagttgaacaacttacgggctatggttgcgcttataacaggctggagggagtactacctttctcacgaataccatacattctgaccttggtacccagttttagacgttgggctacagcgttgtttattatttttttgataaattttttttgttgatatacaattaatataagaccacttctggccttttgataactagaatatacacaatatataattattgaaaaaaatgaaggacatgataacaggtatcatgtcagggtgagcaacaatacatcgaccatcgacatattcattcttcaccatagtaacacatggactgtaagaaagaacatccaacaacaccttataaaaatatgcatcggccatcattgccatgatcaatcagcgaaccattcactccaaagaactttttttttttgccttttataaaaggcaaatacagctattgctagcgtatccaggaataaaaaagtggggtgggggtcaaacatactggaaacaccggcataagcacatcatgtctcatacaatattataatatcataatattacattgtagtctaaagaagtttcatatggaatcagagaaatacatcctaacttcacaagacaattgattatttttcacttgtggcacagattatctttcatgcaagtatgagacaaaacaaattagtgataactaccaaataagaactttaattcttcaaaataattctgagcattacaataggatagagaatataccagtaaattgttttgagggcactaacatatactatgttttttttatctcttcaaattgttttatgattgttttttcattatcaatgctcatgaatatctccttctcaatgtcgcatatcatcaaatcattgagccattcatcccccaatttgatatgcaaatccatctttataagcgacgtggctgaaaagactctctcaactgaagccgttatgccaccggcagtatcgatgttagctcagtgagtcgataaaccaatcgctacgatctgtgcattccggatttaaccattatttcaacaacctttggaaaatctgtacatccaagaaattctgaacttctcctaacatggctgatgaagtctttaagttgacctagtaacacaaaagatcaccgacattataatcttcagcataaattccaacatgtcctacaagcttatctagttccttggattaagagaagtcattagctcgccggcgccactcacctcttgcgtagctgaacgggttcaggagctcactacctcgatgcattggctgccagggatttggggatgggtattggggaattaggtagttgggctggggggctatttgtaggcaggggcggagctaggtaggagatgtgggggtgcctaggaatctggttaagaaaattttttagttatagttcatctattttcaccatatatgcaccccctcaatccaaatttaggcacttatatcagtctaatgtagagtaaagcaagtgagtggcacccctctccatttctttctagctccgcccctggttgtaggcctgtggcctattttctaagtgagtaggttgaaagtccaatagcgtatgcctagtccaattgcattcactggtctaatttcacgattttttcaacctccaaccattcatagatttttagcatacactccctactctatcatccatggtgaaatatttagggggtgcagggtgctctataggtctggagagggtaggcacccacattgaatcggctcctacacctatctaaacctaaatatttcgtctaggagtcaaggaactagtacttgataaacaccactgaatcaaaatctcctagtggaattgctcgctctttccttgtggtcgctgttatacctcacaatctggtccgactataaaatgg

SEQ ID NO: 16637 - DNA, 2533 bp, Oryza sativa
aaaccaagtgagtggccccccttttcattttttttttacctccgcccttggttgtaggcctgtgggcctattttctaagtaagtaggtggaaagtccaataccgtatgcctagtccaattgctttcactggtctaatttcacaattttttcaacctccaaccattcatagatttttagcatacacctcctactctatcatccatggtgaaatatttaagggggtgcagggtgctctataggtctggagaaggtaggcacccacattgaatcggctcctacacctatctaaacctaaatatttcgtctaggaccaaagaactagtacttgataaacaccactgaatcaaaatctcctagtggaattgctcgctctttccttgtggtcgctgttatacctcacaatctggtccgactataaaatgtgtcaccctgcaatgatagtgccacgagaaagccaataggcacatacccaaaatcgtaagaaccatttaaaaagagtatggattgccgatgtaggcaatctcataatacgaaatcaagatgacaccccgtctactattcaatatggaaggcccctaatcagaaatgatgaagacgtcttcacggccacagagtgtcagcggtcagaccgctggggagaggacacatatgcttcgatgtcactgtcagaattaagccgattaacacagatatattggacacacatacggtccgagccaccttgtaagcttctggccctttagcgcagcttccgcgaaaaaagcacccgcgaatccaacgcaccaacagcccagttctatgattgcaagcgatccgccacaaaccggttcgtccaccgccgaccgcgctcctcgtccatcacatgcacgatgcacacccagccgctagtcacactagtcgtatcactagtcgtatttgcttgagccgatgtgtgcacacatcgatcactagttgtatttgcttgagccgatgtgcgcacacatcgatcgctttctcggcaggtttctaggcggtacgtggcgtggcgtgcgcacgtgccgcctccacctatatcgcacggcacgtcgatatgggcatgtcgagctccatcggtcgatcgatcgcctgtccacctacgatgtacggatacacgatactggtacggcgatacggatacgttgatacggcaatacgggattttttttaaaaacatcaatatgtcgatacggcgagtatatataaaaatatttttaaaaataaaatatagggaactacaaaagggtaaagcaataagattatcttaaaaaatattctatgtattgttgcctgttacagaaaatatagtaaatatagcattgtattacaaatagatcaagtatattaaagttataaatatatcataagtatagcattgggtctttaatgggctattgaacaaggaggttacactgctaggtattggagaagtatctgataagtatcgtgtgagtattagtatttattttttcttttttttcattgtttaatgactgatactcctccgataccgtatcgacagaggtaccggacgtatcgccgtatcgggtacgtatcggataccgatacggcaagaaagtgaagtataggtgcaacatagccgtccgccgtccgcccgcccgcgcgcggcgtccgcgctgaaactcatgacgctgtctctcgcgatcgacgactacggtgatgcgcgtgccccgccgtcgtcggccgcgagggcgaggctctacaggaaaaataatatgctcacgtcgtcgtggcagctagctagagctcggaggcttattaacgaggttgatcacgagcctgggaacaggcgccggataaacatccgcacacgacggccggtgtacgtaaacgtagacgtcgtcccagacacgcccagttttccctgcccaaaactcgccatggttttacctcgcttgatcggtttttgctgcaaatgaaagaccgaaacccgattagtacgtatgagtagtaagtagtacacgccagatcaatttggctgtctcacactctgattaagtatgcctctcgggtcacatggataataataagcccaccactaaaaactgtcagatatggacctgttggatgtatattagtacttgactacttgtgcaagttaattacatcgtgcttattactttctttaatcagtttgggtgtgtttattacgagtactttctttaatcagctttggtctatcatgtttgcggcttgcttggtacaggaatgatgcaaccatgaaaccggccatctcgttttaaaagtccaaatggctgacgtggatgcaactgcctcgcttcgtttcgcttttcgctgacgacttcggcgacctgttcattattcagagcccatgtttgcagttatctgagaaacaaccacgactcaaaagttattcagtgggcattagatcaagttccttaaacagttaatctgtactaaaatccaacaacaatccatccaagcaagcaaaatcgcaaggggaaaaaagaggcccaccggccatttctaaacgcg

SEQ ID NO: 16638 - DNA, 3561 bp, Oryza sativa
  unsure (1)..(3561): unsure at all n locations
tttaaaagtccaaatggctgacgtggatgcaactgcctcgcttcgtttcgcttttcgctgacgacttcggcgacctgttcattattcagagcccatgtttgcagttatctgagaaacaaccacgactcaaaagttattcagtgggcattagatcaagttccttaaacagttaatctgtactaaaatccaacaacaatccatccaagcaagcaaaatcgcaaggggaaaaaagaggtccaccggccatttctaaacgcgtatagtatcacgtctatccaaaagcatacagtgtaattataaccaaacttttagcccgtcatttggtctctctaggactctaggtaattggattggagccagggatttatatatagtcacacttcatatgacatccccatttcgatactgaaacaatgcacaccgtgacaaaaatatactcctctatttggtagtattgtttttcggctcgtgagttgtcatggccgtgccaatggtagcccgacacatcaacgtccgtgacaaataaaatatacgatgactgcttcgccactggaccgcccaaaaactgctacttgatcagggtgatgcacgaacgttggcggctttcacttgtatttggcatcatctagggctagctagcttggacatgatatgtatcaaatccaaattacctacctatacaaacggattaagctaacgactcgatggaagcaactgaaaaactcccaaaattcccattggatcgcgagcagatagatatactagtcgtaaactcgcatgggatcactcgcgacggtccagatcgaacacgctgtctctttcactcgctcacctgctccatgctcgtccagtactactgccacgattattctacactatcctggtgttatttgctaatcccgatgcgtcactgcactgaaagtctgaaaccttctaatccctctgctataaaatcgctctgctttactgctgttttctggcattgcctgtgcgccgcgctgcgctgcgtacgtgacagcagaagcgacgcgcgcgcgcgcgagcgacaccagatgttgccgtccaggccgaggtgagcgcgcgaaaccgtctctctgccgccatttttttttaactcggcgatcgagcgagcgagcattccgaactgactgactgactgggtgagatgatcgccgtgcagatccgggtcctggggaggcgggacgcggagttctccggtgtccacgccgaggtctcgccacgagcgcagcaaatccgtcgccaccatcttctcgccgtcgtctcccgaggtgcgtctcctgatcgtgcgtgaaacttgtgtttgatcggcagcggtggtgagcggtgacaggtgacgcactggctggtgcagagttacggcggcgtcgtgatggagatggaggagaagaagacnnnnnnnnnnnnnnnnnnnnnnnntgggttgcggcagagcgacggtggcgtggacaaggaagtggtgggcggcggcgcggcgtgctccgacgaccgggtgcggctgctggagcgggaggtggcgacggcgaaggcgacggagatgaatatgctggagtcgctgatacagcagacgaaggagatggagcaggcgaagatcgctctcgaggaggctaagctcgaggtcgccacgctgcggcagcagcagggacgcgcccctgccgccgagccagccgccgccgcccagtggagcgtcatggacctcatgttcggcggcgtcgacgaggagatcaacgggctgagggccaagctccgggcggccgtgcaggcggaggagaagagcaggaaggcggccgacgacctcaccgccgcgctctccgccgtcaccatggaggccaagcaggtgaaggcgtggctgtccgacgcgcaggccgagctggaggacgccaacgccgaggtcgaccggctcagggagtcgctgcacgccgccgaggcggagctgtggtcgacgaccgagcagctcgacggcctcacgtcggactggaaggaggccgccgtttcgtggcgcgccagggagaaggtgcttctcgcgcgcgtccgggcggccgaggacgaggcccacgcggccgggcaagagaacgtcgagctcgccgagctgcaccgggtggtcgacgacgagaacggcagcctgcgtcgcgctctggagcgcgccgtcgaggaggtcaacgcggcgaacgagtcgctcgagctcgccaccggcgagaactccaagctgcaggacgccgtcgcggagaaggagagcgccatggaggcactacgtcaggagaacgagagcctcaaggccagcgaggccgaggcgcgcgggcgcgccaaggagctcgacggccagctcgcggcagcacggaaggccgccgatcacggtcatggcgccggcgagctcgcggcggcggccgaccccttgtcgtcgctgcacaagtggaggggcgacatgcatggcaagctcagcgccacattcctggactccaacagggtgatggcgggcaggaaggaccggatgttcgcgtcgctcagcaacatcgccgagctcaagtcggcggcggccgcggcggccatggacgacttcgactacgagttcgaccacttcgacggcgggcagtacggcgacctggaccacgccatgaagcagaagaagaggaggtcgatcctaaggaagttcggggatttcttccggaggagaagcttgtacaagcgcaacctagcgccggtgattcactactagtagatttttactacttaggttgatctagattagatgctttaatgttttcgcgtgatgctttgtatggtacgtgtttgattgaaatgattagcaaaaaaaaaaacgcccaataaatgaagagaaacatcatcgtgtcacatgcgtggtcttcacatctccctcctgcctgctcgaaaatttgatcattgtgtatggaaaccacgcaggtttatctgaaatccgaaggaaaggataggagaatagacactgtgagaataacgtgataagttcatgtatgatattgtttgatactatatgctgtccacagaacctgctttgcactgtatagatatacatgcataattaattaacacgttaatgatcatgccaataagtcagatttcggtggtgtcagtgcatttgtaagttattactcgaaaaatttccctttggacaaggatttgtgttgggcttgtggtttccggacggacatggggacaccggcactacgactttttaaggcccagctgctgcagtacgattattctgaggaataagttcacattgggtccctctatttgtcgcccagtccaattttcatcccttgaccgcaaaaccggatatgacccgtcccccaacttacgaaaaccgggtaaacgtggtccctcgtcggttttgaaggcggttttggctgacgtggcgcctacgtggcttgtttgacttggtcttcatcccacgtggcattgacgtggcgcttgcgtggcaattatatctcggaaaaataataaaaaacgtggccccacatgtcacctgcacaaacaaaaatagttttaaaatggtggggcccacgt

SEQ ID NO: 16639 - DNA, 13896 bp, Oryza sativa
  unsure (1)..(13896): unsure at all n locations
ctgacatgtgggaccacaggggcatctccttttcttattatttttgtgtagctgacatgtaggtttcatgttttttattatttttctgagatcctattgccacgtaagcgccacgtcaatgtcacgtgggacgaggaccaagttaaagggagccacgtaggtgtcacgtcatacaaaaccggacacaatactaccaagggatctcttttgcacggttttataagttgagggacccgtcatacccggttttgcaactgagggacgaaaatcggactggacgacaaatagagggacctaatgtgaacttattccttattctgaggccaccaggcagcccatcatcttgggctccgcaggccaaattgacttctgtcgttgtccgatgcgccgccgcgcccggcctccctcaactcctcccggctgcctggcgacctcaccttccaaaacacgttcccttcttccttctcttgggcaaaacaccgctgaactcgatgccggcatattcgacaccggcaagctcaacaattgcctcctgctcggcgagcttgtctcgacgatcaggttaattatgaattgtcccttcatttcctacggatggcgatgccaccgctacctcactgtaccaccacctgccccctaccgcccactatcgttggatgaacggttggaatcagtagcatccattcaaaaacgactctcgttattaataactaacaatacttatcagtttaattattcaatatcgatatcaatacaacgctgagacaaaatataaaaatcaagttttatatatggttggaatcgataactaaatgaaatagtatcatttatatggaacgatgctcagtcgaccgtgactattttcattccctttcctaggccaacccaaccagtgcatcatttaaattagagtaaatttcactttagatcaccttttattaccgatgtttcgctttagactatttcttaaccgatgtattttggattgggtaatcttacctacgtggcactttggactaccactaacttttttatccatttacacccaacttgacatatatcaatgttatacacacaaccatagaaattcattgattagtaggagccgacatactcgaaattgttcatatgcttaagtagagagttggggtggttcaaagtacaacaaaggtaagattacctggtctaaagtgaaaacatcggttaaaggtggtacaaagcaaaacttgacaagggtgaccaaagtgaaatttaatctttaatttatagacttgacaagggttcttatatttacggctaattatttttttattggtggcgacgtactcatcgatagcatggtgacttcatcaatatgaaaatatgccaactcaattttcaaaggtactcatcaggatatgatgtacgcgtgtgttatgagagtctatgtttaagtcaatttgtaccgtgcttcagaaaagaaatgagaaaaaaaaagagctagtgagcacgagggccttctaaaattcgagatctagacctatctacttaaaacggtggataataacctagctcggctcgtttgggctcatctattatctatatatctattatatactaaaagtccataaatcttcctacaaacgctcctaaaaacgctcctaggtttataatctcaccgtcgattttcatttaaattgatgggtctgttattttagtccattagattaaatctattgctttctcttaatattcggtagatacgagtgaaaccgttcacacacaaaaaaacttacgtacttactatggaaagaaacgaaaccttcagcatacgtacgcacgtacgatggcatcgtgtgatcgcacgtacagtactgttcatttgaaaaaagtacctacttacgataaatagctatttaaaaaaagatactgttcgcttgaaaaaaaattacttccatatgcacgagtaaaaataaaagctataaaaactaaaaaaacatatgtacgtcggtacaagaaaatagacgattttttaaaatagtattttctatactatagaaataaaatttattactccacaaataataagatcatgtgacgtttctacaagcactcttacaccaccacatgcatggctctctataattttgctatcaattttcatttaaaatgatagaacattagattagcccatttcctcttaatttccagggtatacaagagaaacgatttagggaatgtttgattgaaaaaaaatacaaagaaacatacatatatacgataataaagcccaaaaaactacaaaacaaaataagactttagatactgtccctaaaaaagtacgtacggatacatgagtaaaaataaaagctataaaccctaaaaatgtatatacgtcagtaggaaaaaaaatgacggtcttttaaaaatacgattttctatactataaaaacaaaatttattactccacaaatatgatcatgtggagtttctgcaagcactcttagaatgccatgtggcactctataatttcgctatcaattttcatccaaaatgatggatccattattttagatcattaaattaactcacttcctattaatctcctacgtatataggagaaaccatttactgaatgtttgattgaaaaaaaaatacaaagaaacatacgtacatacgagaaaaaaatatttatcagagtacgtactacgataaaaaaagctataaaacaaaataaacctttagatatattgttcccttaaaaaagtacgtaatagacagtctttttaaaatatgatttgctatactataaaaataaaatttatcactccacaaatatggtcacgtggcgtttcaccaagcactcttagaatgccatgtagcactctataatttcattgtctattttcattcaaaatgatggacccattattttgaatcgttagattagcccgcttccttttaatctcctgtgtatacgagagaaaccatttaccggatgttcgattggaaaaaaaacaaagaaacatacgaacacacgacaataaagctataaagcccaaataatactaatataagttggcagaaccatcgaaaaaatatagacggttttcaaaataggattttctatacgataaaataaaatttatcactccaaaaaataaatatgcaagttaaactagatcaatataaaaaacaaattaaatgtgtttaaacgctaagcttttagattttttttaaattttatagtcaacttataatcaggtgtaatatcatagttatattatagtgctaaatacattacaacacttggagctaacatataataataagtaatatcataacacttttttaaataatttaggcggcatataataattaatgtcatgataatcttagaaataatttcacatcatattttatggtcaaatataacactaactgaaatctacatgcatggaaaatgaaacaacattatgtttttaaattatatctgatttaattttagtttgtctgagattgagattctcaaagttttttttcataactactggattggtatgctcaggcaatgatcttgctataatacgaccccttaatccaatataacggtcataaaccacagtgacgtaactataagtgcacctcaataaattagttattataaataatttcataaaataaatacaattttagaattagtaaaggtgtctcatgttataggtgacgaaaacaaacaagatgctaaaaatatagatctttgtcaaaatatacaatgatataatactctgaagattgtcacagtttgtttagctatatatatttttagtgattaacttcactcatttctaaatattacattatatttgtaccataaaaaattaagcagttttgattaacaccataaacaaaattttgtctaaacaaaacataaagaaactatattttatattttataggaagaactaaagaactatttgcatcatatccatcttctctttgttcccctagagggcaccgagcatggataccacaagtatagcatggagcacatatatggttgagttgaggcaggcccaatggaggccaccattgataatagtgctcaacttcctacttactaatggaattatctctgagggtgccgatagtgaactaggattaattaaaattgtgctccacactggtcgtgagactgtgagaggcatgactatgttgacccatgcttgaaggaatcttgatggttccacccattagaggggcatgtctatttttttaacggtgctatgctaataaccaatagaagcgttagttttagaatatttattcgtagatttagaaataagtgttgacataaacatttaggtacatagttgaaagaatgttttatgcattaatgatgtattagacttattttggtggtttagatggagttccatttattaaaatcatatctatcttttaataacaatgataatggtgataataggagagtttacacttacctggacaaaagtgaattttgtttgaatctaagagacatccttattatttatattaaagtttgcggtctatttcacaacatattgttttgttactatgaggcaagatctatgatttgttatatgtatatggtaagatatgacttaattctcttagtagtatttatataaacaataaataagatgcccgcgcatctgcgtgggcttcctttctagttatcttaatgagccaactcggattggcttattaaccttaacgagctaaaacactagctccactcgcaagttagttcattaagctcattaggctcgttaacgaggtctatctcattaatatcaacttatataaatttgaatttttaattttatcatatattaacaaaataataaccactaattaataaagaacttaataaatacattttagtttgcatgtagttaaaagactaaacactagttcttatgtgttaaaatcctagctcgatttaacttgttatgattttgagttaagagatccgaactgaattcaatgcaagctgattcgagtgacaaagcttctaagtaccaccttgacctctgtcctataataattttatttctatgatttaaatttgttctaaaatagttgtcacaatagaatatactaatgatcacattaatcacttctagttcaaatttctccctattatgatcaactactctcctactttaacttatatttcgtacatcatttaataaggagtatcatagtacttcttttcaaatattaacatatgctaaacaatctaattaaaattataactattttgagacagaagtagtaactttttttcccccacccctaccacccacacctttgagaccaaaagacagtgagagtgcttctgccagtcatccggggtactggatcgggctatacaggatttgttcaatctcaccgtcacgcgcgttgtcgagagaatttgtacttgtttatagtttcttcttcacacttatacattgagcgcatcacagcggatttgatttgcatgtactgataacgattccttcttttgatctggaatatcttttaaaaaagaacagagtatattatccaaattatataatcccatgagtgtcatgcgtgtgtggcagtaggggcacacataggccccgcacggtgctgcccaatccaatcatttgaccattcgtacagacccataccatggacatactttcctcgtaattaaaaaaaatcaattatctacgtatatagttaggattaatttttttagacgaagatagtaaatacacacgtgaggtggcggtaggtctccagcaagcaaacaacggtgagggtggactccactactccaacgtcccatccacggcgagagcgggccaacaatcagcttggtggctaacagctccaagaagaaagtggcacggctaggtgtgtgggtataagtataactatcttttcgcccttaaattaacaccatcaaactaaccgtcgaaaccagggtaaaactctgcttcgttttcaaaaaataagagaaaaatgaaaccccataaagtggaaacaaaacataagttaaggttgaaagtagtcagcatggtgtaatcgccccaaaaattaaaggacagtactgtagaacatggtttaatttttcggtttggtcgattctacacgaggtctccgatattccgaaattttgaacaaatgtcggtcaaatttgaacaaaatattactaaattcataaaaaaaattgaaaatttaaaaatttcagccaaaataatatcataccgggagggtcagaaatgactgaaatttcattccggaattttgagccctgcagcagaatccgtttccgtggacagttggtgtgcgttttccccacggagcatctgcgaaccgcgaccaacatccagcttcagcctgtcacgctgcggatgggaatggttaggttctggattgaacctaaaccatttcacgtgaccactctgatccatggttcaatagggacaacccttaatgatcccattaaataaataggttatccaatggagcaaaaggttaacctattgaacctagcagacaacatttaattcacatgttcatggggccacacatatacaacacaatatatcacagacgcaaaggcatcccagggctacatttaagatatatgcaaagcagtacatccaatggctaatttttcggcgtacggccgtgtgactcacctatttttcggccgtggccgtaccggaaattattttctccacggcggcgaacgatcctgacgtcgcgcgtgctgtcacccacacgtaaagaaacggaaccctttgagcgtcgtcgtcgtcaccggattcaggatcacacgtcgggagggagaagggtagagataggagaacgagctggaaaaggaaacggagttaaaagtgagctccgcttctcgcttgaccctcaaaaaagggtaaaaaagaagaaagcgcggatgggccccgccggctttgcaccacttcaacccggtcaaatcttatccagatccagttggagtgtaattcgtattttttttctttaattaataattacatattatgaacaaattttatatgaatgaataaaatatactataaattaaaataacttagagcaacttatataattaatgctagcatcgaaagtttttagaaaagaaatttaaaaacatggcgtgaataatacatagtaaatccataatgaaaagacgtagcatgcgaattggcgtcagctggttaggatatttgtggtggaaccttcccacctggatttaatttgtagacttgaaacgggtgtttatgtttgcggctaactattcttacaatgctagcaacgtactcatcgacaacataatgacttcatcaatctcaagatatgccacctcaatttcaaaggtgcttataaaaatgctgtgtgcaagagtgtttatgagtgtccatgtttatagtcaatttgtgatgtgcttcgaaaaagaaaactagaaaaaagagggagctagttggcaaagggccatctaaaattctaggtctagccctacctccttaaagtggtggataatgagcaagttaggctcatttgagcttattacattaacgagatagctcggatcggcttgtgaaccttaacgagctaaaacactagttctgcttgtaagctaattaggctcgttaacaagatttatttcatttataaacctttagaaatttgaatttacaatgttatcatatattaacataataatacactaactaataaagaactaaataaatacaatgagtttgtatgtagttaaaagactaaacaatactccctccgtccttaaaaaaatgaatctaaaactggatgtgatatattttagtacaacaaatctagacagatgtatatctagattcatcgtactctaactttttttcctctcacccctaccacccacaccttccagaccatagaagatagggagagtgcttatgccagtcatccgtactagatcgagctgtacggattcgttgcgctaggatgtgttatatttggtactagattggtttttgtcgaatggaggaagtaatttttttcctcacacttctacattgagcgcatcacagcggattgatttgctggtactaatcgttcctagccttgttcaacgattctttcttttgatctggaatatcttttcagaaaagaacagtatattatccgaattactccgtatctattcccatgagtgtcatgcgtgcatggcagtaggggcacacacttaggccccgcatggtgccatcatttgcccattcgcatggaccagacaaatataagtctactaattccctgacaaaattttgagtattaaatatagataaaaaaaataactaattacacagattacgtgtaaattgtgagatgaatcttttaagccgaattgtgacatgatctgacaatatggtgctacagtaaatatttgctaatattgaattaattaggctaaataaattcatctcgcagtttacaggcagattctgtaaattgttttattactagtctacgtttaatacttcaaatatgtgtccatatatcatatgtgacatgccaaaactttacacccctgaatctaaacacagcctatgtaagggcaagtgctatggtagatgtgactatcacctccaaatttatctattttattcactcatgaactaagaggcaacccatataatgtatcacctctagtacacaaataccaatatatctaatactctcacacctttcttgaaatttttgtggaggttgcctcttgatttaggggtggctcatcatctctctcctcacttcttttcaggggcggaggcagcattttagcaagagtagggctgaaccatatagctataaattttttgtgcaaattctacgtaaatttcagtgtttctccattaaaaatttttgccacgtgtggggcccaagcccaagctgccccacacatggctccgcccctgcttctcttctccacctcatcactcaatccaatgtgacacttttaaaggcaatatatggggtattatagtatttgccctaattctacctgctgaactggatcagtgacgtatgaattctcttgctataggattgagccaccatctaagggcccctttgaatcgcagggtagaaaaaacggaggaataggaaaaacacaggattctgacaggaattgaagtgtaaaacagaggattgcaaaatacaggaaaaacacaggaatgatcgtttgattggagcgcaggaaatacgtaggaattagatgagagagatagactcaaaggaaattttccaagaggttggagctcttgctaaatttcttccaaaatccacatgcagtatgccattccataggaattttataggatttggaaagcttcaatcctttgaatcaaatagccaaataggaaaattttctataggatttaaatcctatgaaatttctacataaatcctttgattcaaataggccttaaaattagagtaaaatagagagtagtaatattaatcgcagatgatctagtatttcccacggagcatctgcgaacagcgatcaacatccagcttcagcttgtgataggcccatgcagaagctgaagccgcatgctgcgcgagaaacccctcgtacgagtggacgacgtgcggccgtgtggctcactcatttttttttcgcccgcgtggccgtgccggaaatcattaatttattccacgtcggcggtctcggctgcgaacgatcctgacgtcgcgcgtgctgtcacccacacgtaaaaaaaaaaaacggaaccccctccctctggcaggaggcgtcgtcggcatcgtcgtcaccggattcggaatcacacgtcgggactcgggagacgagaagggctgtgtttagttcttctaaagttgaacgttttggttaaaattggtacgacatgattgaaaagttatgtgtatatgacagattgatgtgatgaaaaaagttaaaagtttggatctaaatacagctaagggcagagagatagaagaacgagcttgaaaaggaaacgaaattaaaagcgagctccgcttctcgcttgaccctcaaaaaaaaaaaagaagaaagcgtaggtgggccccgccggctttgcaccaggtcggctcggtcaaatctcatccagatccagtggctctcgcgcggggcatcgtcatcgctcgcggcagccgggctcttctctttttttcctttggtctttgccttgccctgattgggggagtgggggatccggtctccgagacggcgacttatcgggtgggtgccttggcgtggcgacccgtgcccgggaacgaatccaacacacttggctagctgagctttggtttgttacgtgcgtttttttggggcggctaactaatgaataatgacacgtgatgatgcactatttcaacctagtaatcattaagtacgatccgtattaaattatgaggttagtggctagtatctttgattgatccaatttgtcgctaataaagagactctatactactttgttttatctatctatatttttataaaattataatcactacacacctaaaactcaacgtgtaagcatagtactccgtccgtcccagaataaagcaacttaggactcaatgtccagatacgtagtaataggatacgaaacatgccagcttgccgcatcaacccactaagcacctaaacttcaacatacaagtatagactatagtaattaaatttataatttattacattctaaaactcaaaatacacatgctaaatcattttcaaaatatttcaatccaaattcatccgttattatacaacatttaacatatatccatttatatatcccacaacaaaacgtggggtgccatctagtttataaggattgtatgcagacatgttaggactacaaatttgtacgcaacaaagtccataatgtgcacaaataagttaatgttaatattgtatttcaaaattattaggttaagaaaatatgaaaattaagactatcaaagtatgcccgtatttgccaattcaaattttggtaacggaagaaagccaatattaaaattcgaaggaaagtaaaactttgtatttatttgtttcggatttcctaacaaaaagctaaaatcaacaaaaacgattcgataatggtttaatattagttatgcaaatgtatgcaacattagcccttaattaatgccacgtaggtgtatcgatcgctatattgccataatcttttcatccacttggtatgaatagttattgaaaagtattttagttgatagattctcttttcgttctaaaatatatactccctctatttctaaatatttgacaccgttaaccttttagcacatatttaattgttcgtcttattaaaaacttttgtgaaatatgaaaaactatatgtatacatataagtatatttaacaatgaatcaaatgataggaaaaaattaataattacttaaattttttaaataagacgaacggtcaaacatatttaaaaagtcaacggcgtcaagtatttaaaaacggagggagtagcaatttagaattggatggaagatattctagtattaagcttatgtttagatttgcattaggatatatcttatctaagcttaggttactatatatattttagaacggaggtagactacacatatcatactcatcatgttcacaaagaaatcaatgataaaatactttgatctcactaatttccactaggaacttttccttgttgtaatgcgctatgcgcacaataactttggtagtacaccaattttttaatcatgttttatttgtacatgcatgcattagcgagctttaaaatattttttctcttaaactatatccgatctacgacctgatcacatagttgtattaattataattaaatctttaaaacaatatatcatatgattatattccgatgaaataaaaacaaatatttcaaaccgttaatactcaatattttatagacgaacataatgtttaaaaaaaataaatgtttcattgactgtttattttatttcactatatatagcataatgttttattgtgatcaactaaaatatttgaccgtcttatacttaaggtttgtttagcacatctccaactccacctttcatagagctcagccaaatagtttcagttccatttaaaatagaagcaaagctaagtagggctctctcatagagtgagtggaactgggtttagtcagctccacaactccactccagatccaattcctttatttaagggcctgtttggtatagctccaactcctaaatttaactcttggagttgggcctggagtggaattgtggagctgtctaaacctagctccacaactctagttcattttgtgagagagctccacccagcttaactcccaatttaggtggagctgaaactgtttggctgaactggggtggagctggagctgaagctgtgtcaacatgccctaattttatgagttagagctctacgtgctcttattatacagccttaaaagaaaatcgaaatcgtacacttgttctgtagcggatccgggctggatggacgcaaacccaccaccaccaggactgtaccggtgtagccgttaattaattaacacacgagacgagagtacgagacgagaccgccgcgaacctgcgtgccctgtgtgcgtgtgctgnnncgcccgtggccgtgcgtttataaaattacgcgctccgcctcgccttctttttccacacccacaccaaccccagccctaatcaccaccacccccccatcccaccatcgaaccgccaccaaaaaaagccgaagctcgctcgccgccgccgccgccgccggggacttcgccggagggaggagaagccaacccgcccgcccgcgcgcgcgtacgtacgaggtgaggcattccctcccgtccctctcgcgacgtgtcgggttgggttcggcctcttgtgggtggagggctcgagatcagggagctcgtcgtccccgggtgcccccctgtttcggccgggatgttccagatcttagcgttgctgggttggaaatttttgagtggttcggggatggtgatgtgcggtttgctgatttttttggtgctctccggcgtttgattgcaggcctgctccttccgtcggaagggaagcatcgggatggcgtcgatttcgccgacgtcttcatcggtcgccgccctccgcggccacccgtgagttctctgcttcctctctctctcgctgctacgccttgattgtgcttgcccgctgcctttggagctggttacacttccggattctttccggctcgattatgccttttgctaaggcctcacttttttcttttagtgttttggttgatttgacgactggtacactagtttcatgtcagaatctgtttgaagtgaattagtaacgagcgagctgttgagcgaactacataatacagttgaaatccggtcgtaagaacctttgaggaatgactgtaaaatatactagttttactcattcctttttaatgagaatatataggggtacttaaaataagagtttatatatattaattgctgaatctgattgattctactcacttctgtttgtgtaaatgcagggtgcagttcgtgaaaggcggtgcagtctccaaggaagcaaagggatcaatttccttctcacccgttgcgaattcaaataatgccaatgtgaaatttacgggcttgagggtagcagcatcattgaaaagggatggtgcttttccaggcgacggttactcagggaatgataacacggtgttaccaaagagcacttctgttcgtggccaggactatccaactgctgactctgtactcccaacggaatccatcatcgtgccagaaatcagtaa

SEQ ID NO: 16640 - DNA, 1578 bp, Oryza sativa
taacgagcgagctgttgagcgaactacataatacagttgaaatccggtcgtaagaacctttgaggaatgactgtaaaatatactagttttactcattcctttttaatgagaatatataggggtacttaaaataagagtttatatatattaattgctgaatctgattgattctactcacttctgtttgtgtaaatgcagggtgcagttcgtgaaaggcggtgcagtctccaaggaagcaaagggatcaatttccttctcacccgttgcgaattcaaataatgccaatgtgaaatttacgggcttgagggtagcagcatcattgaaaagggatggtgcttttccaggcgacggttactcagggaatgataacacggtgttaccaaagagcacttctgttcgtggccaggactatccaactgctgactctgtactcccaacggaatccatcatcgtgccagaaatcagtaatgctggtttgaaatgtgttgcggacatgttctcagatgaggacaaagacactgaacaagatttggatagcccaactgagggcttctcgtctatttccgaggccatcaaagatattcaacaaggaaaagtcagtatatgctaaccttttactcatttcatatcttgtccgtttctgctctatggaattctcctgacaccaggttgctcttgtagcttgtgattgttgttgacgatgaatcaagagaaaatgagggagatcttataatggctgcttctttggttaccccagaggccatggcgtttgttgtaagatatggcacaggaatagtgtgtgttagcatgaaagaagaggatcttgaaagattgaaccttcctttgatggttgcaacaaaggaaaatgaggagaagctctgtactgcattcactgttacagtggtatgctgccattcttattctctttcttttgccagcactagaatagtatgttatgaatttctatggatatcaaattttgcttaactgtcaaatgcatgcatacgtatgcttattcactttaccattggtttcctctgcaaaaggccaaaatgtaactcataaaaattgttcttcacatttttagttttaaatattaatgatgtgacggcatgaggtgtgcatttccttttgcacacagctttctaacaaaaaaaagggtaaaaaacaaagttgtattaaaccagtgatttgactttactaaaatattacttgttttccatcttagatctgagttctgaaagtaaattgccataatagagtgtaatcattcctaacactcactatggaggcttccagagaaactcatgatgagtttggtgttaaggcgtctaaaacttggctattgctcctttcatcattgttatgcatatcaaatgctgaccaacagtatttaacctaaggaaaaacttgtgttctttagaaaattttcaaatcaacggaacagatacagcctacttactagtttagttactccatttcataatgaaagagtaaacatcctgccttgtgagtttgtgttgaacaaatttgttttgatgatttgtttgagctactgagatgaaattcatctgcttt

SEQ ID NO: 16641 - DNA, 3639 bp, Oryza sativa
ttatgcatatcaaatgctgaccaacagtatttaacctaaggaaaaacttgtgttctttagaaaattttcaaatcaacggaacagatacagcctacttactagtttagttactccatttcataatgaaagagtaaacatcctgccttgtgagtttgtgttgaacaaatttgttttgatgatttgtttgagctactgagatgaaattcatctgcttttggcttataggatgctaaagagggaacaacaactggggtatctgcaaaggatagggcaaagacagttatgactcttgcatcccctgactctaagcctgaagacttcaatcggcctggtcatattttccctctgaaatacagagagggtggtgttctgaaacgagctggacatactgaagcatctgtagatcttgctatgttagctgggttacctcctgctgcggtcttatgtgagattgtggatgaggatgggtccatggctcgcctaccaaagctgcgcgtgtttgctgaaagggagaatttgaagattgtatccattgctgacttgattaggtgagtctagtacacaaacctgagctcctaatactgcatgtgcaaccaggatatatatcaataactttatcatttaaactgttataatataggccaatttggcctattaatcatgagtagttgctatcagtgggaacatatatacgctctaacttccctgagatataaatgctattatttttctccttgaaattgtcgtgatgtcctatctattggtgtgaacacatatgtcatggaattagtaataaaagattcttcttgcaattagtattgccatcgtatctgttatcctagataataacacaaactaatctcgaattgtgttgattgtagtagcccctgggttgcaactgtgcctgccctgctatttgatattcctctatgcccttgaaatgattattgacatgccaattagtgtactgagactctgagagttcttatctttctgttctgcagatataggagaaaaagagacaggctagttgaacgttcatctgttgcacgcttacctttgagatggggtaatgtccgcgcttactgctacagatctgttattgatgggatagagcatattgcaatggtgaaagtaagttgctgaaatattataaaatacttgtgttggaattagctgctgaatcagttttttttttcttgtcataagcctgacttttaagttactcatccaatcactgacagggggagattggagatggtcaaggcgttttagtgagggtgcactccgaatgcctcacaggggacatttttggatcagcaagatgtgattgtggtgatcagcttgccatggcaatggagatgattgagaaggctggaaggggtgtactagtttatcttcgtggacatgaagggaggggtattggtctcggtcacaagctccgtgcttataacctgcaagatgacgggcgcgacactgtggaggctaatgaagacctaggactgcctgtggattcacgggaatatggcattggtgcacaggtaaggaattcatggtatcatacggcattcgaatatagggggtgtttagatccaagggtttaaagttttggtgtgtcacatcagatattatatagggtgttgcatggggtgtttgggcactaataaaaaaactaattacagaatccatcagtaaaccgcgagacgaatttattaagtctaattaatccgtcattagcaaatgtttactgtagcaccatgtagtcaaatcatggagcaattaggcttaaaagattcgtctcgcaaattagttgcaatctgtgcaattaattatttttttagcctatatttaatacttcatgcaggtattcaaatgttcaatgtgacggggtgaaaaattttggggtgggatctaaacagggccatagaaaacaaaatgtcataccctgcttatagccttgtacaccagcttaataaagaaccatgtggtttatatatctgttcatagcatatgtttcaacttgcttacgttgaggcctgaggggctgtaaaggcatatgttcagaatctgatgcatacaaccaacaagtgtagatgaaataaaaaattattcccaactgaaccaaaatatattttctactttaatggacttggccgccttgcttagcgctttcctttcttgtcatgaatttgatgctgccaacaatttcatggagacaatttaagaattaccatgcattcatttcatttgttcaatggattgacatttgtactgttgctttgtagatattacgtgatctgggggtccgttcaatgaagttgatgactaataacccagcaaagtatggtggtctcaagggttatggattgagcattgtgggcagggttcccttggtaactccaatcacctcagagaatcggagatacctggaaacaaagagaacaaagatggggcatgtatatggattggccaatggccaagctagccatcagacgggcagcaatggtgccaaaggggagcattaggccaatcggactcaggttcacattctaatccacgacaatcttatgtgatggagtttgtcaaattatgctacaacatatgttcgtggtgaaccaatttttttttagctgacagtaggttgaaagatgggcgtaataaaagtatccctttatttgttgtaatccacagccacacaactgggttattactgtaaatatatacacacacataaactgctccctagcgggtacagactccagccttacctgaattgagaagactggcgataaaaatatcgactgagatccaaggcaatactagtatgaatctaactcccaatattgaaagaatttttgttctgggaagcctttggatccttacattatttcttgcactacgcatatgctgccagagtctttgtcaagcgatctgttcttgtgtttggctgcctttttctcgctggaatatgaacatcgactattcgactgatgctagtctgagctaaaaatgttgtactgactactgctaatacatacggcccctgttattttttttattaagatactgatttcatcttagtttttattaacatgcttttcaaactatcaaacggtatatatttcatgcgaaaactttctatatagaagttacttaaaaatatcagatacatttttcaattttaaaataactaaatttcaattaatcaagtattaatattttttttacatgcccggtatttaatcatcctcttaagcaaagctaaacttaaacgggggcaataataagctctcaaagaacctcgccggataagccgtggcaaggaacataaccttgtctcggtttctttggtttgctcagtgggcgatgggaagttggtacggttctaggaggattattgcctacagggctcttcaattcggtcgctggcgcccgcggtctacgcagctgttcccgctcggttccggaacagacgaacggtagctgaggctttgcaagacaagaggtggattcgagacatctgttcggcattggggattcaggcaatcctggaatatctcaagctttgggacattctgcgattggtttagctaggtgaggaaccggacacgatctcttggcgttgggaaagctcggggt

SEQ ID NO: 16642 - DNA, 4743 bp, Oryza sativa
caccaaccctcccaagtcccaaccgagctgagctgaccgcacgaaaagccaaccgaaaacggccgggaggaagaggcaaaaacgcggcgtggtgacgccaccccgcgctccgtttttctccacgcgacacttgacttcaccgcgacacatgacttcaccgcctgacgccgcctcaccacccactcccccctaatccctccttcgcttttctacctcaacacgcctcgttcttcttcttctctctctggttttacatttttactactcctcctagcttcccttcatctctctcttgatggcgaaacccttccccgatccgccgaaaccgccggtccccgagccgccgaaaccgggctccgatggcgcctgctacgactgtccctctcctcctcctcctcctcctccccactcgcgtgaccaccgccgcgtggtgatcgcgctcgccaccaccgcgtccctgctcttcgccatcctcctcgccttctccgtctactgcttcatccgccgcaggcgccagcagcgggcgcggcgtgaggcgcttctagcacctcccccttctgatgcggctggaggaggcggcgcaccgggtgcgccggtcgccgccggcgacggggcggtgggcggcgccggggagggggagggggagggggaggtgctgcaccacgcgtggcacatccgcaccgtcgggctcgacgaggcggcgatcgagtccatcgccctcgcgcggtaccgcgccggcgccggcatgctcggcgccaccgactgccccgtctgcctcggcgagttccgcgacggcgagctcctccgcctcctccccaagtgcggccacgcgttccacgtcccctgcatcgacgcctggctccgcgcccacgtcaactgcccgctctgccgcgcccacgtcctgcaccccgccgacgccgacgccgacgccggggacggggaacgcgtcccgccacccgccggcgctaacggcggcggcggcggcggcggcggcgcagccaccgaccaagcctcgagccccaccgatcaaaccgcggaccaagaaaaccctggtcaacagcagcagggggagcagcacgagctccgggtacaaatcgatcggcgcgaccagcccagctcgccggagccgccgcgccggagtcccgacccgcgcagcgcgcagagtttccggcgagtagcctccatgggctcgcgctcgccaccggcgccatccgaggatgctcctgaagacgagcagacgacgacgcagagcagcaaagagaaacaggggagcggcggtgactctgcctgctgcggcaaggcgccgtcgggctccggccgcttgcaccacatgaggaggtctttctccggcggcggaggccggcgatctctcccctcgcggcatggccgcacttctagctcgatgctgccgttgtgatcatctcgggggtaaaaagaaatacaaaacaaaaatatttactgaaatcgattgtgaactcggtatcctgtacagttgtgaacacccaaagagagattgcatcttacatgtcagatatatgaagaaatgaaccttgagctggagttgatttttaccttatattcctactatatttttgtgttgtgttcgttgcaattgcaaagatcgtacttaaaacttgcttgttctagccttctaggatgctaattactaatcagcacatcatacgcagcataactcaggtgtgacattaattgcatctcattatttattcgtagtctcacaagtagtcctatactcttaaactgacagtagtcaatgttgacctgaacatgaggatgccaagttgcctcttagagcacccgcaatggtaaagtaatgtgttatctataaaacatgtacatctcagcaatagactagattaatagtaaaccatctcaatagtatgtctacatgggtatctatagctctctaatacattgcctcgtttttctctatagactatctccaggttagtagatagctttgctctctctcttcatttaatctcttccaaataggaaaatatgctgatatggatctcttatagagagcctatagataaccattgtgggtgcccttaggacgcgtacggaagttttgctataggggctgtttggatgctatacttttcatgccaccattcaccatactttttatgctacacttgtctaagttgtggcttataaaaagtgagccacaccttagctagcaaaattggattgtgccacactttagtgagttgatgacatgtggggctccaatagatgagaaggaatcttgccacaagtgtggctatgaaccaaacaatatgctaacttggtcaaacttacctagcatgagatgtggcaacctttggcaaactttgagagcaaaccaaacaacccctcacgcgcacaattggcagataattttgaaaggtttatgatataaaatattaaaatttgatcggttgaggtaaaaggaacgctctgctgctatgctgctagccaacaaaccgagtgtcactagaggtcgacatatatacactcaccaaaccagttcagagctattcagaaagtgatgtgtccaagtcttaagccttctaggattctaggattattcctgtttgttcttggtttgcttatgtgaagaagaagctagagagaaaaccaactaaatgtgctgctaatttgatggaccaaagagaagaaattggatcattatatatatgtcgggtgacgtcacctaccaatttgattagtttaattagcccaggatcactagcattggccgagcatctccaagagcctaaccaaatggctctccaagttaaaatttggctaacttacacaaaaaaatctactacaacaaactagccaaatacctctccaagccattaggctggctaaattccccaccagactagctaaagttggccagccaaagccagctagctatatgtgggacccacgcctgttcccaccctctctctccacgctgcagtgcggcacgcaccgtgacgagggcgccgccgccctctcgtcgctgcggccagccaccgccgccccgtcgtcgcgcggccggccaccgtcccgccgagctccgccgccgccccctctagatccgccgtcgaggtcgtcgcccgccgctgccgccgccgccgagctctgccccgagcggcgtcgaggtcgtcgtcgcgagccgccggcgtctcgcctcccgcctccccgcgtcacggcagcaccgcgcgtggccgcccgcctccttgcgtcacctcctcgcgagcggcggtggggatggggatgggcggcagcgacggatgggagagggaaggggggtttggagagaaggggagaaagatgagggagaagaaggaggtgtagaggctgacatgtggacccaattgtcatagactcagaatagagaggacgaatggagaggctgttggggtaaaagacaatttgacttgctaaattgaatggagagttggccaaatagacatttggagagtcaaatttagagagactgttgaagatgctcttaagttatcatgtctactctgatctaacaccataataaactaaacagttactaaaatgactgtgtgcaccgtagggatggtgcaaagcccagagttatactcaattacacacgtgtaggttggctttagtaggatcttatagtgagactaaagcgatatgatgttggtcttcatttatttgtgcgtgagttagtgtatttgcgactgcgtgtgtctggtgttacttgtgtagtgatgtgtgggtgtgcaccatgaaataagaaaagaattaatatgtaatctttttcgctaggctagcgataggacatcggctaaatgcattaagatttaggaatgaaattacataaagcacacgccgattctacgtacagattgtggtcacagatctacataggtttcaaaacggccgtaaacactctacaacatgcacaaacctatacacatgtatatgcaagtttaatcaaagagcggcatcggtcggtccagccaagccagccgcttgttatgccatttcatattaatctatgttatccaaaaaaaatattttttttataaccagataggtaacaataacattcaaacagcgaggggacattttcttgagggatgaaaatatatgtccatagagggcgcacatcttggctttgtcggccacagcgatccagattgtcggaacgaaattaaatagatgccccttattgctaagaacatacaaaaaaaaaaaacttgcatcgggctagtatcttcggtttccaaaggaattcgccgcaggcggccttttctttcccaatgaagaacatcttgtatgcaacttgaggagtattgcacatctgtcgtgaatttccaccatagttcaaatctctgacatattatggcacaattccacttcatatttgtcgataattttttttctaaaattttaacatgtgtaaatatagtacaatcgtagtgtaattgcattgtaatttacatataacttacaatataattttgaaccgttcgattttctttaaaattcatgcaagagaggtagaaaaaaaatcacaacacatacatgagaggagattcggtaccattattacctccgttttcacggaattagcatgtcccaaggatttctgaaagttatatacaagttacactgtaattatattacaattatactatatttacatcagtagttaaaatttgacgataaatgtataaatactcccaaataggtaat

SEQ ID NO: 16643 - DNA, 1474 bp, Oryza sativa
ccaacacccgcgggttcttgcccccccaaaccctagcaaaggcggcgcggcgtcgtcatgggcgtcgccgccgccaacgtcgccgccttcgttttgctggccatcgcgcccgtggccgccgcgccgtcgtcgccgcctcgatctggcggcgactccctgagtttctccgacgtgatcagcatctccttcttcatggccgtcttcttccccgtgttcatcgtcctcctcgcgttcgcgtgcctccgcctgttccggccgctcgacgacgacgacggcgagcccgcgctggcggacacgtcgtcgtcggagtggtcccgccgggggggagggggcggcaacagggcggggctcgacgccgcggagatcgcggcgctgccgctggtgtcgtaccgcgacgccaggcggcaccggatcggggacgcgcggggcgacccgctggagtgcgcggtgtgcctcctcgagttcgaagacgacgacgccctccgcctcctcccggcgtgcccgcacgcgttccatcccgagtgcatcggcctctggctcgagaagcacgtcacctgcccgctctgccgcgccaacgtcctcgacgcgccgccgccgccgccccctcccccgccttcgctggagcaggacacggcgtcgccgccgccggctcacgagacggtggtggtgatcggcgacgccggcgccagcgaggaggcggaagcggaagagaggatcaggatccagtgcctcgcgggggtccgtcgcgcggcggggcggcaggctctcccgcggtcgaactcgacggggcacgagcgcggcggcggcgggatggagcggttcgcgctgcggctgccggagcacgtccgcctcgagatcctcatgtcgcacaggctgaggcacgtgacgagcgcggtggcgtccgtgcgcgtcagggaggggagcgcccacgacgccggcgccgtgcggaacgccgtggcgaggctcctgtcgctgttcgtgcccggagccgggtggaagggagacgacgagggcaagtccagcaaggcggcggaagggtcgtctcgccggcggcgcgacgagtcggcgaggggaggagtcggagaagagaagaggagcgagtaattaatggcgtattttgagtatgtaattcgatgatcggaaatgtaattttgcagagagttttttcttttccctttcccctcattctttttgtgagaacattattattgaataattcaacagccaacccgtaatcacagaacttcattgcaattttgagcttaatttcctccaaaaatggttttccacaaaagaaaaataaccaaaaaaaccattcaatgtattttgtaaatataatattccattcaatgtattttgtaattataatatttttattagcactcctcaatattaccgtagaataagttcacctgacgcccctataactttaggtcgagtttgtctaaggttcacaatccgtaatactagaaat

SEQ ID NO: 16644 - DNA, 1620 bp, Oryza sativa
ccgcagcgagggaggtgccacgtgtattgggtgtacgtcgatgctgggtgaaggaacaccgggatgcaaccgacgagaatgaggtcaaatgttgacttgcgggtgtaggagtcgccacgttgctggatacagaactctgcggactcgagcagctccatgaaccatgatccgccctggcaagttgtactgccatggcgagctaccgaagtgggtgcaggatggcgacacggtgaactactcaatgatccgggcgcgcacggtcttggtgctcctgagccgcggcgaaccggtgaatgcccaaagccagcggcggtcgcgtcgccgcatccggtcctgccaccggagcacatgggcgttggaggtcgggtgcaagtgggatgggaaaggcacgctgaagttgatgcccttccacgggttggcctcgacggcgagcaccgtcgtgttgcggatcgctgggtaggtgagcagtgcgttgccccacccgtcgtctccgcgcggggcagaagtccttgacggggcgggctgccaccatgaagtgcttcacccgccgccgctcgtcctctaccgccgccggcctccccgtctcgcttaagaagagaagagaagagaatagaggagtagaaagaaaacataagagaaaagagaagaagaaaagagagaaaaaaaaaagatgtggtcatgtggatcccacattttttccttcttacttacatgtgggcttcataatttttttaatttctttttgctgactaggatgtcacatcagcgtaaccaatgatccatactgttaggacttaaattgcatagttttatatagtttagtggtgaagatttctggtatttgggacgagggatgtcatacagactcaacttgaagctgaggcaggctagtgaacttattcttattactgtttcactaactagttttgggccttttttggacttcgagtcggctctacgggctgaattagggtccggctgacccaccattggtccagcatggctaggtcgagctaggatcaggctagcccatgaatttgtccaacaggatatatataaaagttcgttagtgaacaaaaagaaacagagtatataattgttcaaaaccgagaagaaagctaaacgggtaaaaacctctttctgttcactagatttcctttcctcgttaaaatggtacacttccattgccacgcacacgggggctcctagctagcgcgtacgcgctgctagcgagcacctcccctaaggtttaggaaaaagtacgaattacctcccgaactatcacggccgtccgaattaccccctaaaccacaaaaccggacattcttcacccccaactatgcaaaccggacgaattacccccctcaacccaatccgcggtggttttggtctacgtggcgtacacgtggcagtccagtcagcaatttatttattagaaaataggtgggccccacctgtcatacacttttcctttctcttctcttctctcactcttcctctctctcttctctcactctctcacgattcacagcggcaggcggggcgcggcgagcggcggcgggggatgaggcggcgagcggcagcggcgacaagggatgaggccgcggcgggggatgaggc

SEQ ID NO: 16645 - DNA, 6221 bp, Oryza sativa
cgccgcttcccccccgccctggacgccgccagcgccgccgcttccccaacctaccctggacaccgccgtcgccgccgccgccgctgccctagcccgccctgacgccgccgcttcccccacccaccctggacgccgccgccgcttccctggccgccctggacgccgccgtccggttccccctcctcgtctcacaccgcgcggcggcgtgcatcctccaccacgagatgacgagagagagaccgagagagattaggaagagagagatagaggaagagagatagagggggtatgacatgtgggtcccaccattttaaaaaaaataaaatgctgactggactgccacgtagaccaaaaccaccgcggattggatcgaggggggtaattcgtccggtttgcatagttgggggtgaagaatgtccggttttgtggttcaggggggtaattcggacgatcgcgatagttcggggggggggggtaattcgtactttttcgtaaggtttaactacatctattatctattaatctactagttaacacttaacactaatgatactagtagtaattaggaaagattctgaagattttttgagagatatttttagtaagaaattgaaaaaaatttaagttagatttgaaaacttttgatttaagtttcaaattttaaaaactttcaactcagattcaaaaactttcaattcgagatttgaaaactttcaactcagatttgaaaactttcaactcgagaatcgagattcgaaaactttcaagtctggatttgaaaattttgaaaacttttaacttgagatttgaaaattttcaactcgagatttgaaaactttcaactcaagattcgaaaactttcaagttcggatttgaaaattttgaaaactttcaatttgagatttgaaaattttcaactcgagatttaaaaattttcaactcgaggttcgaaaactttcaagtccagatttgaaaaatttgaaaactttcaactcagattcgaaaattttcacttgatatttgaaaatctcaaggccaaatttgaaaatttttaagtcaatatttaaaaactttcaactcaaaacatttgaaaaaacatgtgtgctaaaagattaaaaaaaaagcgcaaaaaaaaagcgaaaagaaacgccaaatgaaaaaacgcggaagaaaaaacgtaaaaaccggcgttagaaattggttagagaaaaaaaaaatctcgcgcgtgcgtgggccttgtgggccgggcgcgggcgccggcagcgatcgcgtgttagcaaaaccccacacacactacacatgcatctctcaagtgcgaacaattctagagaaaaggcagtgttagtgaagttgctcatcaattctccctttttcttcaatcccattaaaaacaattctcccttctctgcaatcccattaaaagcatctttcaagtgcgaacaattctagagaaaaggcaatattagtgaagtcgttcatcaattctcccttctctgcaatcccattaaaagtaccaaatcctgaattcctgataatacagcgaaaggagaaaggggcaagacaaagacaaagctccctgcttgatgctcacgcttatcagaatacccgagcacgaataattcctctgctagtgcagaacgaacgaatgagaacacacatccccttctcaaaaaagagagagcgatcgagagaacacacacgggatgacacatccaacaataaaacaaacgaaatttcaaatatatttgccacggtttgtacattacgtgcacgcgattactactaataagcaaaattataataatttcaaatggcaaacaacctggtgtatgtacaaggtttttcagccttcgcacgcgaacaaattaaattaattcctctacataaaaagagaaattttttttcacaaaatctcgccggctttgcacggatcagaccgcatcacggcatggcgtctccttcgcgctggtgtccgctcccacgccgccgcgcgcccacgacaccgtccttgccaggaaggacggccaccgccgcgcgccgtgccagctcccgccgccgcccctcgagctgccctcgcggctcgatcccctgatgccgaggacgaggctcgtggcgtgccggaggcgcctcgacttgagcacctcctcccggacgtgcggcggcagccgcaccgtgaacctctcgtggtcaccgccgtcgcccggccccggcgcgcgcggcgccggcagcgcgcacagcgagtgccccgtcgagttcgacctcggcatcctcgccgcccgccgcacggcgcgcagactctccagctccacggcctcctcctccctcctcctcgtctcctcttcgtcgctcgcctccgccacctcctcaacccgcaccgccgcggcctcgggcgtacgcgactcctccgccgccgccgcggccgcagcaggcgaggaggagaactccacggcaggcggcgacggcgctggctgcttctcgaggttggcgcggcacagcgggcaggtgacgtggccctcgagccaggggtcgatgcagtcggggtggaacgcgtgggagcactgcgggaggaggcggaggtcgtccccgtcgtcgaacacggtgaggcacacggcgcactccagcgcgccgccgccgccgctcctgtgcttcctgacctccgcgtacggcacgaccgggatcgccgccaccgccgccgggtcgagcccgcggcggcgccgagcagccgacgactgcccttgcccagccccagcgccagcggaggagtcgcagtcgcagcactggttgacgatgacgcatacgaagacgaggacgaagaagacgccgatgacgacggtgatgacggtggacacggcgcggttgaccgccctcgtgcccgtctgtggcggcgccggcgacgcctgcgcgttggccacgtggaaaccgccacctacgacgaggaggaggaggaggaggaggcagaggcagcgcgcgcgccgccccatctctctcggaaagggaggaggaggaaacggcggcggcggcggcaaagtgatggatggatttgcgatttgccccctttttcttcgtcggttcgtgcgctcctcagccgtggatggacggacggacggacggatgatatgctttgctttgtggtgccaggttgctagctgttgacatgttagcagcctgacggcggttgggggcgcgatggctgtgttgtgctggcgatccgcggaaagatgagacgatgccacatgccccaactgttcacgcccctgttcgtttgggggagatgggaaccaaactcctatgcacgaaaaacggagcggtccattagcacgtgattaattaagtattagctaattttttttcaaaaatagattaatatgatttttttaagcaactttcttaaagaatttttttgcaaaaaaacgtaccgtttagcagtttgaaaagcgtgcgcacggaaaacaagaaagaggagttgggaacctgcccaaacgaacagagcatattagtgatgctaccaactcctgaaccccttttgaccggcctgaataaaaaagaaatggctgtgtggtgattgactgagcactaagggcgtccataatactagctaaatgctcttgctttgttacgggtaaaaaaaatcataatactttcttaaataaataaaaacatattttttttatgaaatatgttacccatattttcgtataggggaagactcttcttaatttaattttatatgaagctatttatttagatttaaacatgtaaagttacgtatgggcatagatggctatatgccccgtggtccgacggcccgctttggcacagtttgacagttggctgctgccttggcatggtggcccggcatggcacgaagttcagggaggcgaaatagacttactttctgccatatgtatggcacgacccccaagaagagtgagggaaaatggacttattttaaccatgtataagatacggcccaaagaggagggacaaaaaatagacttactttagccatatatatatatatatatatatatatatatatatatatatatatataatatatatatgtatatatatatgtcacaacccaaagaagaggaaggcaaaatagacttatatgaaagaaagcacgatgagctgctgtgccttcaagccggctcggcacaacctggcccggcacaacctgacccttattggactgtgccgtggccgtaggtggagcacgtgggctggcgcggcctagcccgcccgttgagcgagccatatcggtccgactaatcttgggccgtgccgggccgaacggcccatttggccatctataagtaagggggtgacagattcactgtcaccatcattaaagtttctttaaaggagtagagatatatgaaatgttgatagtaaggagtgggtaagtagtataggaggtagtaaatccattaagcaatagcactgttgcgatagtactatctagtatcagaaaaaaaaatccactcctctcttatctattgtctttctaaccaactattgttcgacatgtgggttctagcttattatttatacattgcgagagttagaaacaacctataacctaattttgtaagtctcactctactacttatctggtgaagatacatggagaatgttaagggcaggtttggcttaccattcttaactgcaaaagaaaaaaaaagagctaattgtacttttgtacaccctctagctatatttttaatttggattagtaagattaccttttattacactttggaccattctaagtcagttctctagctgcatctactatctagtcttataggagtagttgctagaccccctaacttgcttgttatagctaaggatgctcattttacctttaatgttgagtgattgagttcatttaatatccttaaagctctcatgtcagtactaatcatccaacgtactgattggtcgctgtcgtttgaaaccatgtgcaatgctagtgataatacttttaggatcattcttaaagtaagaaatactatgctatcgcatatgctagtaaaatgtggactggatctcagttaaaatagtgcaacatttgaaaaaggagctccttgttgttgttttatcttttgataaagtcagttcttacttagtgcagcaaacattatagtatacattttacaagaacttctattacaaagtagtcttgaatgaaacttgagagatcttcacttgagtagtgtgtattgagagtgaagttcattcctccttttataatgtcaaatggcagctataatggcggttactagggtcggttcacccacaaatcgtcatcagcatccaatgggaagacaccatgtggaaggcggtggcaaggggtgccacccctggttcggctgaactagggcaaccgtgtcttagcccactgacttcctcccagagtatgatgagtgggcccttatgacggtgcatggtagataggcctcaattatgttggttttgcattgatttgtgggtctttcaatccgtgtactcacgtatgattgcccagagatgtatttcgtcatatgacgggtgtattttcatccaaaatcttctgcatacaaatattctaccatactcgtggaaatggttactaataaaacctaccactaagtttgctattccattttatttagttttatgtaggagttgatggtcagatttgatatataaagactgtcaacagatatatacttaaaaactttctgcaaaaattacaggggtgggatagagtatgatggagagcctagctgatggatttgcccctgccactatcttaagtgacactattttttttctcacaaattcttgggcaactgcaggatatttagacaatcttattcatacatatgcatatgcatattattctcgtgctcttgcggtcccatgtatatgaggaaaacatatactacctccgttttttaatagatgacgccgttaactttttctcacatgtttgactatttgtcttattcaaaaaatttacgtaattataatttattttgttatgagttgttttatcattcatagtactttaagtgtgatttatatcttatgcatttgcataaaatttttgaatataagacgaatggtcaaacatgtgagaaaagtcaatggcgttatctattaaaaaacggagggattatatcctgattccgtacggtaaggtatgggaatagtaaagcaagtgaagattc

SEQ ID NO: 16646 - DNA, 3638 bp, Oryza sativa
cccccctaagccccactaaatttttcacgagatgtggtggctggagcttcgtcaggttggctggagggaaggctggaggttgaagacgatgttatttcgcgatttgggcttgtttcgaagagcagcccacgaccacgagcgcagtcttcaagttttgtctagcccactccaagcaaaggcccacggtggcagattccagccggcccatttggctactccccctcccggcctcccgcctccccaattccccaatcccactggccacctcctcctctcctaaatccctaaccctaggcgaataggcgcgggcggcgggcggcggccgagcaggcggcggcggccggcgaggggccagacgggaggtgtgccaggcggtgccccggtggtccagtgcatgcccggagcaggtggcgacctccggtgagctgcaagctggcgagcgccgagcggcaagcaggcggcaccgtggcggcgtccagtgagccggcgatgggccagacaggaggcaggccaagcggaggcggtggtccagcactccagcgcctgcgccgccacgccgccgggaaggtggcgagccgctcgctagcgaggtgccgcgagggcgcaaggcgccgaggcaggcaggcagcaggtcagcggcacagtggccggcaaggcagcaacgagtcaacgacgcagtcgcagcctactgtgactgtgattgaagatttgaagttagaaatcggtaaactagtaacctctaatactaatagatagtctaaaattgtgtcttaatgaggttgtgcacttgtgcttgaaacttataattattttctatacatttttagattgtcaacatgtcaaaaagaacattgctcacgtattattttagtttaagcaacacaaatggcagtgatcctccatccagtaaagtgatcctccatccagtaatgagtgtttaagttagccaaagaaacccaagtcagggttttttcaatcggatgaaaaaatcatccaacaatttgaagatatgaaagcgcgtcagatgttagtacctcaacagaaattagtggtatgctctatgcctccattcctccctaaatctctaaattatttgaatccaaaataagtatgtttcgattattcgttaatttgcccttttctttgtataaattactactcatgaagaataatagacgattgggtgtgacacgttatctattcgatattggtttggtatggacaaaattctcgacatatcattaattcaatgtgtaccttgaactgacatttagccaatttacatgtgagacatgtttcgatttatgctggcgtaatttgttcagcccccactactattttttcctggatccgcccctgtctacgcgcttctgcgcttccattttagcctcttgtatggacatgcaaccaccactttcacgagcaagtagtgaaacaccatttgtcaatttcccgtccatcgcctccctctgcagcaaataatttgcagcaaaacttcgtcaaaattaaccgctttcaatcaaggcagcggctaattactatttataaaagtaacaggtaagtacttttttttaaaaaaataacttttatatgtaatcagtgcattagaactttagcttgttgggtccagacatgggcagggagctagataagaatgtaattttctgataaaattgcttgctgttatttataaaaaaagatgcagtttattagatgagaatgtactctatcttctaataaaattttgaaaaatatgagagaaagtacctcaatgcctcgaatgtcattcaggagacggccgcaagtgcccaccagcctaaatatttcgttgtattcttgatgtttgattatgtcgtccgtgagctttactccgataaaaaacattcccgagatcactgtagctccatgcgtgagtgaggtcacaccacactccatgtattcttcgaactttggcacatattggctcctctgccattctgcctcagtctatcatacacctcaatatatctttttttaataataaaatataatatcccggcctctactcaaaaagagttacaactaattattacaaagtagcatctcaatatatctagccactgcaatttgaacatcaacttgttaatagcaacaacattgcaacaaaagaattcaagaaatcgcacattggagactcactgtttctagcaagtacttggtaatatcatggccttgtaatgcagaagcctttgcgccaatctcgtttactgtagtatagagagcctgaaacagtagttttacatcttcagagtatagaactcttgttgatgaggcttatcccacctatgacaaccatttgcacaacgaattagctcattgattgagaaagatcagacaagatacactggatcaaggaatgaggatttgtacgtacttctccattaatgctaggaggttttcttgttcttcttttgatcctccaacatcaaagaaatcgtcaacaacagatgtcaacaaagctgttttagaccacgagatgcgagcatcggacatttcaggaggggatatggaagcagcagcagagaaatagcaatatgttagcttctggcgtgcgtattgtagctgatctagtctgttgtctttcacccacctgtccttttttttttctttttgccaatttgtctaagttaaagccatataggagaagtaataatgaataattatggtaaaacaacaaaagaagaaacataagggagcataacttgacaactgtctgaacggattaattacctacctatcaagttacttaagttcgtcctggtaattggattgagaggtgcagaagtcatcagcagccaaagccaaagttccaaactgacatttcacggttgtctaatcttcaattgtgaatggggctcaaatttaaaactgatcactatattattattttaaaatgtctgcataacttgctaaaaatcatttaagcagtgtgacgcgtgttggcacaatccccttcgtgtgtgaaaatactactccctcagtcccataatacaagggattttgatattttacttgcattgcattgtttgaccactcgtcttattaaaaaaattgtgcaaatataaaaaacaaaaagttgtgcttaaagtaatttagataataaagtaagtaaaaaaaataaataataattctaaaattttttaataataagacgaatggttaaactgtgtaagcaaaatgtcaaaatcgcttatattaagggacggagggagtactccagtagtacagtagcagaaatgaccacctaaaaagacaaattaagtagctgaaataaagtagtggcctcttttcttcaccaaggaaatttggatgatacgaagtctattaattgtcctccctcgtgcttttcccgctagaaattagcatgatcggtctaggtctcgttgatacagtggttatttgctcgtgtcacactcacacaccagcaatagccaaaagctaccagagactgggagagaagaaatgtcgtgcacgctggttgtgctttttgcctacaccagcatacagtatagaatcattttcgtaaaattaaaatttgaaaacaagtactccctccgtttcgaaatgttcgacgccgttgactttttagcacatgtttg

SEQ ID NO: 16647 - DNA, 10205 bp, Oryza sativa
agaaatcgctctgcctggtgtaaactattggacgatccaacctcataatgatattttcttactcactgccatgcatgcatggggttagtagcacttttttcacccatgcacatttatctctttatctttaaatgatctttactcacaagttgcatggggaactaatacgagcacatggacatgcggaggagcgcaacgaacacgtgaggggtttgggagagcgatgcggacgcgtgaggacacatgggcgtggttagtggcggcaatgagtcgttattaactcatcataatctatcccgtttagcgggataccgtggtctagtagtactcctcccttgactataattaatattccgtatccatttactcaacatcgatcaagccggcacgaaatgcatcaacatcgaacaccgaaacatacatacgcaagtctcgggcacacatgcgaatttatcagccaagatgttcccgtgtgtcatgtcactactggagaaccccacatctctcccggttcacaacccctttactcccatgtagcgaaccgggagggagaatccgggactaaagatgacgatttttagtcccggttaaaatatccgggactaaagaaccatcttgagtccaccgggtgtaaaaataaaagtgtcacgtgacgcgttttgttttgagtaaattgcatcctgggccacttttattgaccattgttgcaagttggactagaggtaggacattcttttcagtttgaaccagaaatctttgcaaaaattttcatattgaaccagtcttcttcttcctctagatctccccctcttctcttctcttccctgttttggttcgagctcaccacacttcctcaggttccatctacatgcttgacctacgtcagcgcctgagcttgagtgtgtggtagtctccgtcttgagctcaacacggcacacggcagagctccagcttgagctcaagcacatagccaatgaatcacggtggcacggtgggaaattctaacacgatatattatcactccacacttctgctccaccaactagtcaataggtcccattctagcccaagttcatccatggcagcactagcttaattggagctagggcacttaatcaacgctgcacattaaatcttgagcacgaatgaatgtggcaggggcagcgaaggctgagtagagctcgagcatgactgtactggtggagcttgagctctatctctactaaaaccaactagccaggtatgtgaatctcaaactgaaggtagagagagtgaggaagcagagttggaagaagaacactaggtcctaagtgtaacattttgtaaaaattattagcccaaagtgaaaataatagcttgttcctagtccaagctgcgaccatggtaaagaaagccggtccaatatgcaattaactcttcttctttttttcttttcttttcttttttattttttttgctactttcatattgatttcgcaccgaactcaaccacacagacaaaaacatcaatcacacagacaaaatcatcagcaaattgacatcacatattcatctgcaacttcatagaaacatctagaaatcatccacaaatttacatcccaaaatcatccacagattcaaaaaacatgtaaaaatcacctacaaatttacatcacaaaattatccccaaaatcatccccaaaatcatcgtcaagtcgtcgcctccggattgcccgctgcttgccacctctcctccgtgtgcgccaccgccggccacatcctcccggcgcgcccgcctcctcccctcccaccgccacctcctcccggttgcccaccgcatccaccgcctcgccgtcgccgctcggggccgccacctccctccaccgccgcgtgggccgtcactgccgccgctgctgctgctcgctcccgccctccacggctttggcgctccgccgcgcaccaccgtccgccgccgcctgccaccgcgtgcccaacgccaagaaagaagagaggaaggagagaaaatcgagaggagaggggaagggcgctagtaagaagcgctaagggatgagaagggataagaagcgtagggataagaagagagtggagaggcaccggttaccgaggagatagcacgaggggagatgtgcgggctgcagtttttcttttgaattttggtccaacaaccgggactaaagatagcagggggtctgatacggcctaaccaccttttgaaccatgactaaaattcataaagtatcgtgccggtttagaaccggggttaaagatctttttagttccggttcctattcgaaccggggttaatgtgatttttgtctaacctagcaaagatggtttctcaagtagtgtgttagtcccgtaaggtagaaagaacaaagacaatgcttgttttaattagtaaagctaggaaataaatatattcaacagctgcaaattaattaatacaatatattcctgcatgccctgtataaatgcggaggcccgcaggcacgaacgcggcaaccaagaacgtacaccagccagcaggaaattaaatagtcatcgaccaatggagaagctgaagagcgagctatggatgacagcggtggccacctgcatgtcgctcttgttgtacctcaccatcctgagacggcgccacgcgagcggcggcagatcactagcattgccgccggggccaacgccactcccgctcatcggcaacctactctgccttggcggcatcttccaccaaaccctcgcgaaactggcgcgcgtccatggccctgtcatgacgctgaagctaggcctcaccacggccgtggtcgtgtcgtcggccgaggccgcgagggaggcctacacgaagcacgaccagcggctcgccgcgcggccggtcccggacgccttccgcgcgaacggcttctccgagcggtccatcgtgttctcgccgagctccgatccgcagtggaagaacctgcggggcatccacgcgacgcacatcttctcccctagagccctcgcggcgctgcgcggcatccgcgagcgcaaggtgcgggatatcgtcggctacatccgcacggtcgccggggaggagatgtgtgtccgcgaggtcgtgcacaacggcgtgctcaacctcatatccacctccttcttctccatggacatggctgacgtgcgctcggagtcggcgcgcgggctacgcgggctgatagaggacatcatcgcaaccgtcgcgggccccaacgtgtccgactttttccctttcctccgccagctctacttgcagggcttgcgtcgacaaacggcagccatctaggcatcgttttcgggttgttggacgacataatcgatcgccgcatggccgaaacccgtgaccaccctgacaagcagcggcacggcgacttcctggacgcgctcatcagcctcgcctccgccggcaagatcccacgctaccacatcacgtaccttctgttcgacgtctttgcggctggcgccgacacgatgacgaccaccgtggagtgggcgatggccgagctgcttcgcaatccccgcgtgatggccaaggtgcgggcggaggtgacggacgcgctcggcggcagggagagcttcgacgagggcgacgcggcgagcctcacgtacctccagtgcgtgttcaaggaggcgatgcggctgcaccccgtgggctcgatactggtccctcacctggcggtgcaggacggcgtcgagatcggtggctacgccgtgcccaagggcaccacggtgatcttcaacgcgtgggcgatcatgcgcgacccggcggcgtgggagagccccgaccaattcctaccggagcgcttcttgcacaaggaggagtcctcatcacctccgctggaattgcgagggaaagactacgagtacatcccgttcgggtccggcaggaggttgtgccccggcctgccactggcagagcgcgccgtgcccttcatactggcgtccctgctgcacgcgttcgagtggcggcttccggacggcatgtcgcctgatgacatggacatgactgagaagtttgccactgctaacgtgcttgctacccctttgaaggctgtgccagtcgcgtcacacactagttagggtgtggaggaaagtttggttgaaattggaacgatatgatgaaaaagttggaagtttgtgtgtgtaggaaagcattgatgtgatgaaaaagttggaagtttgaagaaaaagtttgaaactaaactcggccttatacttatatatgtgtgtgtgggcgcgcgcgcgcactacgacgtaggaggcctcataagtgctccatgcctcattgtttcaggcgtctccatggttcccacctttgtatccttaaaagttataagtttatacttggaaatcaattgacaccaactttatttaattgttgtttgagttatcactataaaaaacgatttttcatgatagccaaaataggttttcacaagcggctaatggcaccaccagagatcaaagggtagtgataatatggtatttgcgctggtggttttcgtaaggtagctgcctgcgaaaatgaatttgcacaggcggctacgttgtatcatctacctgcatcaatatactggccatggctaaaaaaatttgatggagcgacggcgctccgtccacctccgtcagcacatgttgaagtttttcccaaatccacagaaattatttccaaatccatgcgttggtcccaaaatccacaaaaattattcccaaattccaaagttaacaaatcattacaatttaaatacatctcaatttacagtcacaactttccattcacaagtttccaactggagcaatccctacaaacaaacaaaccggcactacaagaatctatttaatctatgataaaaaaattcgtcatggatcactgaagattcgtcacagaaatttatctgtgacgattctacttatcgtcatctattgagcgtaatagattaaatctatcgacgttttctccaaaattgtcacggatcaacacaatctatgacgttttttaaccgtcataaaacgcttttggactcatgtagtccaccccaagcccaacctttatgatgaaattaaacgtcacagatggttgccacaaggcagccaatatggcaggtgacatggtcattgacatgtgtgtgatgacgtgtcactaataacatggcagctaatgttagcaaatatttttaaacggcccattattttttaaaacggcccattattattttgacggcccattaattttttaatggcagcccattatttttttttcagaactggcctattttaaaataggcccatttcagaaccaggcttatttcaaaactggcctattttgttaacaaactatcagatcaaagcccactaaacaagcccattaagtttgagccaagcaaattcaatccaatttctcataccatctcagattcaaaactaataacagataccatctcaggtttaactaataatagatacaatcagaatacaacagaattcaaacaattaatagttcatctcagattcaacctaataacatatagtctcagatactctgctccagaatcaaacaatagttccacagcaagcaacaaaaatttgtgtagcagaacaaagctatcaacttgtccaagttcaagaatcacacaacattcaagcatacccagttttggttcaacaaacacctgaaaacacttgcagcaccaaaaaaatcgaaggtccaggttcaggttccctccacaccggcaggacctgcaccaaaaagggttgccattgttgttctattagtttctcttgataaatcagcagttgcattagcagccgcgctagcactaggattgctagatgcacatgcactagtactgaggggtaagaaagaagtcaaaagttatggtgaaaaactattgcatgcttattctgatgctacatgtgctaagttgtagctagtaaaaatcttgcaagctgaataagacaaataattagggattcctgttcctgttcttcaacaactaggattaaattaggggtgtgcatgtacagtagaggtgtcttccaacattaatttaagttttattctacctcaatggtttagcttgggagagaaaggaaattaaaatgaagtccaattggcagtataaattggtagagtttaattcgtgtatgacaaactacatgacaactagacactagtgtattttgttcatttatatgctaaaactaagattttgctaatgaggatcttgcaaggtgaataagatactactttgagattttgagaaaaacaaagtatgcattagtattgattattcaatcctccaaggataaaataactaacagaagtagatggtcaaaattttcacttgaccaacaaatatagatagatgagataccttgaaatcatggagcaaaggtttcatccatatagaaatatcagcatttgagattatagccatgatctgttaaataaggtagactacagttagcaatgtaggtgactgtaaagggtttctacataaaaaaagaaaatgttttggagcattgacatatcctatcattggtgcttttgattaattagcttgaagaactaaaatgacaaagagacactaagcttgttttcttcatttatatgctttactaagctgtagttaattaataaggatcttgaaagctgaattagaaagtagtttgacatgacaagaaaaactatgtatgcattagtattgaatccttccaataataaataactagtacaagtagatggtcaaaatttacacttgaactatctatggagagagaatatctaaaatgggtacaaatcatttaacttagtttatggttaaatttacgcgtcaactgtatatatagatggaagatctaaaatgggtgcaaaatcagctaaaagaactaatattgtcagttttcacacatgctaaaagaaaatacatcacaaattctaaaaaaattacatcacaaatacatcacagatcaaacaacatagatccaatgaatcacaagttcttaaaaacacaaagaaatccccaaatcaagtcctccgcttgccgcgggccgccgcctcccgctcgcagcccaccgcccgccacctcccgctcgctgcacaccgcccgccgcccgccgcctcctcctaccgcgggccgccatcgcctccccagcccggcggccgccgccccttctcccgtcgactccgctgcagaagatagtgtctggttcgatccatttaagacgtgggagggagatatttagtcccggttggtgatatcaaccgggactaaagatcctcggcgccctgacatcgtctgacacaaatagaaccgggactaaaaatgattaccaaccgagacttaagatcatagagtccccatgtactgcttaaaccggtttctagtcctggtttctccagtagtggaacaaggcggcatggctgttggcccatggcacaagttaattgagtttttgctaccacgaatgatactaggcaaagaatggccaatgcaattaattcaattttttttacatcaagagaatagatcaaacagaacaaattaaagaaacagaacaaattaaagggtatatgtcataattacaccctaattacactacatttacagcctacttacataatgtaagtagggtgtaactatagtgtaattactaaagtagaattggaatgagtacccaacatcttttatattgatgtgcatgcaagttaatggttcacagtgataggttaagccttactagtggaaaaaaaattgactaatttttagtctaaaatgtgtctgacatttagatagatactcccttttaaattgatgtgcacattaatggttcactgtgataggttaagcctaactactaccgtagtggaaaaaaaaactgaataatttttagtctaaaatgtgtctgacattttactccccaaaacaatactactattcgacttcacgatccctttgccggtaccacctcgctagcgacatggtactgctcagtactaccaattctgagccgtctgatctacaccaacagacgatcgggattaatttggaacctagccctgctccatcataatagcgtatggacacaggactgatgagcatcgtctttctaccgccacccgcgcctggttgccgtcctcgatcgtctgctccgtcaaccacggaaactcttacggttggatgtacaggttccgttcaagttacatccataaatacatcacaagtatatcgttttcgtttatatatatgacagcaagtttaatcaattgtattttgggcatgtctgactgaagagctatgtttatatatcagccacactcttagctgcacctgcatgtggcaggtcaaatttgaacgaaacagacaacatacagacacagacaattaaaatgatagtagacgctgttaatgttattaaatatgtttgatcgttcgtcttattaaaaaagttaagtagttattaatttttttccagtcatttgatttattgttaaatatacttatatgtatacgtatagttttacatatttcacaaaaatttttaataaaatgaacggtcaaacatgtgctaaaaaattaacggtgtcaaatatttagaaacggagggagtaatatacaagaccggacagataaattctcccgctaccctgtacgcacgcttagaccttgtttagttcccaaaacaaaaacttttcacctattccatcgaatgtttggacacatgcatggagtattaaatgtggaaaaaaaaactaacacagtttgcgtgtaaattgcgagacgaatcttttaagcctaattgcgccatgatttaacaatgtggtgctacagtaaatatttgctaatgactgattaattaattaggcttaataaatttgtctcgcagttttctggcggaatttgtaatttgttttatcattagactatgtttaataccttaaatgtgtgtttgtatatccggtgtgataaccaaacctaaaatttttccccaactaaataaggccttataaacacaactggaactttgagcgagcgatgtttttataaaaggaactttcatgtaatttttgtactagttgagcacaaggggggtggggaactgttttttgagcaattaatctttctagatatcaaagggctcaggacaaaaccactgtataaatcggaagcatatatgcttgattcactgaaactctgaagggccgtaggggacatcagcagttgaagggctgtataaacttttggatatacgacgatacatttaacaaaatttgggtgtaatttcaaaattttaggacttatgtactgtcagtgtaatttactgattttttttttgcgttgactttggacttgtagtctttattttgttatgatatatagcaaaggaaccatctcaccagattaacaacttgtcaaaagtagggtcccgtgttacttaatcatgatgtgatgccacaaacccttcacagtactgttttgcattaatacaaacggggggatgccggtctgcctgatcaggctctcgatctcagccgcctctctggtttacagtggttgcttccctttactcaccggggagcaacatataaggaaggtgaacacactcgctagttccatgcgtgttgccctcttaatttgatgcaggcagaaagctgatcaacgataagctgctagttcttccctcttggaatctcttcctcctgccccccttggtctgctacgttttgcttctccagcgtacgtcctgcctctcgtctgtacaaggtgggtttctttctccgatgaatctataaacagacgaccccctttaaacatctgtgtccttttagtgctctacactttgcttctaacactaccgtttgtgttctcatacacagtggcgaagatcaatattaatagtaaaagaggccaaatagtcaccgctgataataatcaatacgtaaagtagggtttttattaaaaaaacttgaatttcagctcttaatttggaactagtctttatttctaaatcatttccatataaactatggacgtatgaaaacaaagtggcatttatctgtgttacttctctgatctctgtcattaatcaattttgtagaacctgtttttttgttaatgggctaatgttttctagacttgctaactgcctggccttgcccatagaatcatacagcaacaggggcttgggggggggggggg

SEQ ID NO: 16648 - DNA, 5333 bp, Oryza sativa
ttataataagttttatattataagtcgcttgattttttttctagtcaaactttattaagtttgaccaagtttattgaaaaatttagcaacatctaaaatattaagttagttctattaaatctaataaaaattaatatattttgtataatgtatttgttttgggttgaaaatactactatatttttctataaatttggttaaacttaaaagaaatttgactaggaaaaaagtcaaatgacttataatataaaacggaggaagtatttgagagtacagttgtcgaagctgttatactagacagataaattttattgtctatcacaatcctttctattgcaaagagatatctcacacatttcctttgctttccccaggagcagcaggtgttgagaagagcctgggattagggaggaatgcgggaagccagcaaggcatggtacatggcccatttttttagggagtatctaaaaaaccaccgcaagttttttaagggaaaaactttcaaatctaactatagtataattgtaatataattccactataactataatataacttgtatgtcagtattaaaataatatatgcaactttatatctaacttatatagagattataatgtagttacagtgtaactacactgtagttacaatgttactataatgtaatcacattgtagttatactacaactatactatagttgcaattgaatgttttttttttgcctaaaaatcttgcgacagttttttagcaattcctttttttattatagagtaattcattaaaagaaactcttggcctccgtactgactagtgattagccagagatgtgcacaaccaaaatactgccaaaattagtagaaaaaccacaacaacatgacaaaagatgaaaatgcattttgaaagatatatgaaaaaagaatacatgaaggccatctatgcaaatgaggcactctccaagagactgcgatagtaccctcccaaagaaaacatcatatatatgtttaccaatattgtcctatcaaaaagttaggttttcaccacaacaatttcaatacaacacctttaacaagggatagataaacgttggccaccaaggcaccaacgactgcatcctattaaagctttaaaaaaccagactcgattagttgtgactatcaacagatttagggtagatcaaacagcagcgtgctcataccatgtcgcagctgagtattataactaaacctcatgcattgctttgtgaaacatatccatggttgagtttattattccgatgggatatgcagcataagaatgaactgcatgacaagataaggaagcagcttagggatgtccaattacaaccatcttcatacgacactgcatgggtggccatggtgccagtgcagggctctcatcaaactccacgctttccgcaatctattgagtggatactgcaaaaccaatatgatgatggatcttggggtacaaacctgccaggtttggtagtcaacaaagacattcttttgtgtacattggcatgtgttgttgcactgaaaagatggaatactggccgagatcacatcagcagaggtacaaaatcaataattgcattcatgagggtgttgttttaaccttgtctagatctttgtactgtagggtgaaaccttcttatatagctacgaaaaatggttttggcaggactgaattttattggaagaaatttctcagttgccatggatgagcaaactgttgctcctgtgggtttcaacattaccttttctggcttgcttagccttgccactagaacgggtttggaattgcctgttatgcaaacggatattgatgggattattcacattcggaagatcgaattggaaaggttagtccattgcaaaatccaagtgtgaatatttgtatttatttgttatttttagctttgtatttacgtgtcaactaatattggcggtgacacagcgaggcatgtagggcgtgttcaagtagaaatacttttctaccctttctcattagcttatgaactaatttggtacactagagttcgatgaagatagctcaatctgctacctttaatagaactaggaaggtagcccgcgcacatgcgcgggcaccttacttaatgtggtgaaattttcttatgaatatttatgtatgggtgacttttaataataatgcttttattatattctaaactaaattaaatttacttattttgctttgaacgttggcaccatcgctacatataaattctaaaataaaattacttgagatcgtgcagttgtgtcgaaacaatgtatgtggttcccatgagaaatttttttatattttttgactgccctgaaagatatcttgcaccccctcccgcccacaccccccaaaatagtccaataatgtcatttattactgtagttaatttttatatctattttcattctaacaatcctcctaaaatgtttgaatttttctatttagaatgagttttaaatccaacaacattttttcaatttatttcatgtccatttttttttgagatttatgttttatgaatcatccttgatatgctttgatcttgcaaattgggatgaaaatagaagtgcatataaccttgcacagggtaaaggcatatgtttaaattttctctcgtgtattgaagtaatgatcatagattcatagtatttttagtgaattctcactaaactgaagtctcttataacaaatagaaatttctagattgttctacgttaaatgtcaagaatttacaatgtactatagcaagttttaccaaaaagaaaaacatggacaatgttaagagaaattaattaagttggtagaaagtcgttagatgtctaacaggatataagtaataggtggagatccatttgtggtttttctttgacatatagataatttcaattttaattgtcagggagataaaaaaacagagagtaaaggaatggtgcatgccacacacgggcagggagggaggaaggtttggcatgtttttctaaatgattaatctaacgacctaaatgatttgtcatatgtttaagtcgaaatcgatggttggaagttttcttttcttgtcagaatttggaggatattgtctcacttaaaagagcaatgtaacagcttaaagagtgtttataagatgtataatagacttttagcaccgcatgccgcaaaggagcgggagggagggaaggatgtttggggtgtttcttttataaaaatagatccaatgaccaaaaatagtgtgtcaatcgattcaaaataatgtgtccaatgatttaagtcaaaaccaatggttagatgtgtctttttttcaaaattcctatgattttctctaatttaagaatgtcgtgtaatggcttagaagcgtttatgcgatgttaatgggcattaacaccgcacagggagggtagggaggagagaggtttgagatgttttttatgaaaaaattctgcaaccagaaacaatgtacccattaatttaaatagaaacctatattcagatgctttcttttctttgtctgtttttctattattttccctaatttaatagtattttctctaatttaatagcaccttaggatattctaagtgacagtttgagagccgctagacctagtacgtggaggtctattgtgtgttcttttaacctgtaaagataattttgatttacgtacgtatgttcgcactggacgtggaggttccggatgtggttattttacagagatctaatgatataaagcaattaatgggtccaccgacttagataaaaattgatctgaatgtgttctttttgttttgataaaataggtctaacaggctaaaacaatgggtccactgatttaatgaaaattgatggtcgaatttcttaatttattagatcatatctataaattagatgctatgatcgatcatcttatttatcgaccaattcatgtagatgttgacagaagttacttaagtctgcacaaagttgttagatatctaacagtgtatgagtaaaaaattagggtggcatattttgattttattttcttagaggcctcaagatgaatgtgagttcagcagtaataattttgtagcgttacatcatagtctatttggatcttaattattgatttaattaaaaaatacaatggtacaaataggtcataaattgaaatataatttaaaagttacaactatttaaaagattgtttatctatttatagaactaccgaaaccaataaattaatatgaatgcatggccataaaaacattggatgtcttttaccttaactaacttaactaccataggagagagaaaaaatcaacagaagggagggagggatggctaacatgcgtgcgcacaccgaacagagaggaaggtttcggactacttttttcgaagatagatctaactaaatctttttttttagaatttctaacaatttttttattttgttagagcgccacatggcagcatatgagcgtttgtaggagtgccacgtggcggattaggagtgtttataggaagtttaatggacttttagtatataatagaagatagaggcaaaattctcatgcgtttaaaatactccctccgattcattttaccgtttgggagggctaatctcttcatggtggaaagcctagttatgggaaccaccgtaaaccgataaaaactagaaatttaccataacttgaaggttttgtttaatttttttgaagttatattagctggcttactagaccttaaacactaccgcaccctagtggtaagcctgattatcatggtaataaccggcagtaaagcaaacctgcttggtacagattaaataaagcgattatagaatacttttattttctttttatgtataacatcattgaattcccctcctgtatatttgtattcagagtccctttaatccaccccctcccaccctctctatttttttattccctaacctatcttaagcatacatctgactcacctttagtattttgttgatatcctacaaaatttaaaatttcatgcaaaaaacaacaagaagaagaagaatggggataggaagtgcaatggaactccacatatttagggaggatcagagccaagattagagatccctaatggataggggatgggttgaatacgagtttcaacagagtttgctaacatttgatatttaaagtgaagaaaatatggaagcatcattttggaatattttttatttcattttttcgcattcttaaaaactatgaattaaagtataatttattttgttgtgatttattttatcaataaatatacttcaaggatgacatatatttttacatattttacatg

SEQ ID NO: 16649 - DNA, 877 bp, Oryza sativa
tcttcaattcggtcgctggcgcccgcggtctacgcagctgttcccgctcggttccggaacagacgaacggtagctgaggctttgcaagacaagaggtggattcgagacatctgttcggcattggggattcaggcaatcctggaatatctcaagctttgggacattctgcgattggtttagctaggtgaggaaccggacacgatctcttggcgttgggaaagctcggggtcttactccgctcgcttggcgtatcgtcttttcttcgcaggaagaaccagcctcgagcacaagccaatttggaagtctctagcgcccccgcgctgttggtactttttgtggctggtcgcactgaatcgttgttggacagcggatcgtcttcggagtcgagggccgtcacacccggcttgttgccctctttgtgatcaatgcgatgagatgattgatcacttattggttgcttgctcggagtctcatcagctatggtggattgctctttcagctattggtcattctgagtgtctgcctctcaatgagcactcttttcactcctggttgtgtgacagtcgcaaaagaatggccaaggaacatcgtcgagggttcgacaccattgcaactttggtggcgtggacggtttgaaaagaaagaaacaatcgggtcttcaaccaaaagagcaggacatgagcggaaattgctagggccatgacggacgaagcagacttttggcggttggctagagccgcgatcccggccatggcgacccctatgtcgggtggaaggttgccacatttggttagaaaataaggttttttttcttcttcctccttcttgtatctggtccccttcgtgttttttgattttttcggtccgctctgtaaat

SEQ ID NO: 16650 - DNA, 3023 bp, Oryza sativa
tttgggaatgaaattttgggagagtggcatttgggcactggcattttgagagagtggcaaatagtaaattctcccacaaatatgaacaagaaataatcaggattgacagaatacttgcaataattttttttaagggaagtttcgatttttcagcatctaaccccacaaccctaccattggaccagctagcagttttgaccacatgactacagtttgtgtcctagttacataaacaatatatatagttataatacaattataatgtattacactataattacactgtatatacatttgaactgtttttcattaaatatctgttggaagctgtataacttaccggtaaaacttttatatttatatgacgtgtgatttgaaagccaaggctagattattctatttttgctagaacaaaagaaatcctggaaagttcggttcccaaccatttgatttcttcctcttttgaaccaactattcttttttttagaacattgaaccaactattcggataattttattcaattacggtgggaactgtagtggtcctctttgggctctctttgcgcgcaaatataggccgtaacgtggttgatcgaatttgatggttcatagggtctctttaggtctcctgtaaattttttcaccatgtcacatagaatatatttgaacacatacataaagtaataaatataaataaaaaaagattgtgtataaatcacgagacgaatcttttaagcctgattgatccatgatttaacaatgtggtgctacagtaaacatttactaatgacagattaattaggcttaataaatttgtctcgcagtttactggcagaatctgtaatttgttttgttattagtctacatttaatactttaaatgtatatacatgtattcgaggtgacatgccaaacttttataaccaacgatctaaaacgcccccatactagtacatactcctagctgccggatacgagatcaactgggcgtccacatgtgaaggtgcagccgccgatgtccaccggccaatcggccatctcgagatcccaactggcgctgctgctgcgtgaacctctctcatgatgttgccgctatgggttatcacgatccactcattaggcggcccaactaatttcttccagcaagcgcgttcgtgacaatccccgttgtggcccatgtcactgtctcgcggactggagtactggacgtcacgtcacgtcccggcctaaattactggtttgggccgacacgtcttctgttcattcagggattcggcggtagccaacatagattaagttcgctcttgagatcccttaacttatcaactaatacgatattcatccttcaaccgatattcgtccttcaaccagaattccaaacaatgagacactgctagagattgggagggtggtggaggtagagggccaaatcctttcagcaagaagcccaattgggtcatcgtcgacttcgctcgcgactggctcccgcccatcgcaaatgagcaccaggttccatgcgccttcttctccgtcttctccacgaagatgctcgtgttcgtcggcccaaaggcagcacgcacggaaaggagaagggcggtgcctgtcggccagcgagaaaaagggcagggagcggcagccattggacggggaggtcggcaagcgtgcatggagagggaggaggcgaggaggtcgacgagcacgcgtggagagggagaaggcggggagaccggcgagcatgcacagagagggagggagcggggaggccctcagcccgttgatccccatgtcccattggcgtcgactccccgcgtcttcgttcgccacaccgtcagtagtccccatcccgacaacagcgacgtcgtcgacgtctgtcctgccggtcaacttcctgttgctgctcgaatcgattcttccgggtgcacctaccatggtgtggccgcaatgccgcgttacgtcgccgtggaaagcaccagagaaaaagtcatggatgcatctctggggaaggtaaggcttgtgcctcaaggaggcggccacgtcaaaattgacaaattccacgtcgcgtcgccgccgccaatgagtacgtctcactaaagagcagctcagtaacatcccccccccagcacgctcgcgttggtaaggtgggaacggaggtccctagacctccccagtggtcgagctcggtgacgtcgccgccgttgcctagctcccgccgaacaccggccgccacccagctgtagacctagacagagatggggaatagggggagagggtgagagaggaggaagatgacgttgtatcactgacatgtgggccccacatgggtcccacctttatttaattattttttgttttacctgacatgtgggcctcataatttttatttttttatcaaactgtcacgcaaacgccatgtcaccaccacgtaggacgaaaaccttgttaaatcagccatgtaggtgccacgtaaatcaaaatcacttagggacctcgtctgtattggttttgatagtttagtgatccgttgtatctggtaatggtattgcggtacaaggacgaaaatctaccacggtgtaaagttaaatgacctgaaatgaacttatgcgtagccaacatttatgcaatggaatcgtgttggtgattctctggagcccactgccgggcacggagcagtggcacgcggcgaccggatggatattttgccggttggtgcggccgcgaggacttcgctcattcgctggtggaggcgcgtggagttggccagcggggtgggtgcaaatcaccaaacaagtccgaacgcgcgagtttggagttgctgatcatgctgcgcgccatggccatgcaggagcacccggcggcggccgcatcggaatttttcacccactcgatccaccgccgcctgacgcttgtatgctcttccccgacaagaagaccagaattcgtttggatcaattcaaccaatccctcttatcaatttagtttcacctcatccggttgatctgatcgatcacgtcgtttaactcaaga

SEQ ID NO: 16651 - DNA, 8208 bp, Oryza sativa
  unsure (1)..(8208): unsure at all n locations
ttgctttagtcaattattactcaccgaatcaccgttgttagggccaaatactatcacactgtaagtcaccatctggagcatgcattgccataggattctactactagtagcaggcacacaatcaacgcaagtacgcaacgacaggccacaactatcgttacccgtcactgccgtcgctgtcccggccgaagaacagatcagaagctgctagtaaagctttatgccggcacccacgcgaaagcccacgggggcgggcatccgttcggccggggccggggcagcagctgcgcaggggcgctctgccccggattcccttcacacgcgcatccgcgcgcgaggccgcaccaccggcgcgtggctcggcaggtggaagggaattcgggctagctgagcggtggccccgcgcactggtcacagtctcacagacgcacgcccgccggagtgggcatccttcgttcgtgccacagtcgaggcgtccaaattgaccgtggcgccccgccccagtccagctcaagcaaactttccatcagtcgccgcatcatcacgtggcctggttttgtcaccttcttggctccttctatgccgatctgcccggctggatagtcagcttctcgctgatgccacatcgttgagacgttgagctnnnnnnnnnnnnnnnnnnnnggttgtatttagtttacgttcattaataacaaaacaaattacatattccgcatataagctacgggacgaatttattaaacctaattaacccatcattagcaaatatttactgtagcatcatattgttaaatcatggcgtaattagactcaaaagattcgtctcgcaatttacatgcaaactgtgcaattgattttttttcccacatttaatactctatgcatgtgttcaaatatttgatgtgacgtttttggctaaaattttttggatctaaaccaggcctaagagtacaataagatgggcacggggtgccatattttacatcaaggagagtgtgccgtgtgtgtgacccatcttttcgctatatttatgtttaatttgttagctaaaatctaaatttttaaccttaaatttaaagttgattttagaaattttttgtcgtagtttagatggttataaaatactccatacatccagattcacagctaaaaatgcttacattttgggaccgagggttattttctacttgtaaatataccgtttcgttttttctcgagtataccgaacgatgggactgaccgatctggcctaattaattgcgggaacaacctttttaatgcaggggctgagttggggctagctagctaattaagataagccctttaatttgttctctcagtgattgggaacagcattaggaaacagtaaactgctactaaaatttcctgagcatgatgggaccggtatgtgacatggccagtacaatgatcatataatccgctgagatcgatcgctggaggttctgggtctcaggtcactcagccgaaacagtggaggaatcgattcctcaggataaccccgatcggcccggaacgaaaagggttcacgccctcacgactttccatcaggaattcaggatagcaccttttcggcacacgtcgtattcttaccagttgaaatctaagcttaggcagttgttccagttccagtaggagctccactgtggacttcggacttcaagtgcggatgcggatcccgtgagaagtgaagtgtttgccgtcagataatgctccaaatatgtaatactaacacactatttatggaaaatgaaggatacaatgcatacaatcattttagtgttaaccacaacaccatgccatgccggtagacgttgacagggatcgacgattatttgaacctagctgattaccgtgcaaagctgctcggcctgcatgtcgaagaaattaaacagcaaaaacaaggaaatgaacggcaacaacaaatgggtggttgagaggcaaacaccagctgctactgtggttctaatgcgtgcagctaagctcgcaccacaccacacaaccctgtgtacgagacatcattcagtggaggtcagggaaagaacagatcgcgacactcgggttgatcagaatggaccaaaacaaagttgcagataataagaggcaaacccacgtgttggttaggtacatcttttggcttttgtaccaggggcttatcgtcgtccttacatctgggattaatttatttccaaatttagaaactagatgcccttaaattatttctttgatgtgggagtatttttccatccagggttcatttcttaattaatgcacggaattaaatagctgtgtctatccagagtatagatgtcggaagctcacttccatttgtccaaagaaaataccatattctttcttctttgaacttgtcataggtggaaaagcatttcaacttctttgttagctataagaaagagattatgaaaattctctatttctccttaaagtcgaccacctctcaaacttgcccctctaaagttgttttttttatatgccactttgtaagtaatatttatccaatgtttacccctaccactcttctaaccatagtgtccattttaccctttttcttcctctcaacctttttctcctttctttgccaaactttttcctccattattttcttcattactccctccatcccataatataaggcatacatgcaaacatgcaattaattatgatattttctccattaaattattacttttttaaatcctccactcttatgctatctaatcctattggatgcatgcattatatttattaggatgatccaaactataagatgataataattatttcttgatttttgggttaagaatggttgtgccttatattttagaatggagaaagtaattagcatcctgacattggtctcctctttccactcaaccatggccctcgtcctcccctttaatcaccctttccttgacaggtgcctactccctcctcaaatggcggtgaccctcctatttagctcgccctatttcatcttggcctaatactaacccttacattattaaaaaaggaaaaacgctggataagagagaagagctctcatatagaaaaatatcaagagaagtaaggtttaaatttgggtcatctagcccactacttgtgctagtcagaaagaacccaaaaatttctcaccctctcaccattcattgacaattctctttaaccctctttatcacacgacatcgatatatacaaaacataacgagagatttagaaacaatcatagtgcgataagacattgggtaataggaacatgaagacaaagtgaagtaagaacaacaaaactgtttaaaatcattatcctgtgctattgaatagcacaatactgataaaaactgcattcgcagcgggtgaaagagagaaaatttgtttcgttttccgctcgcacacgcttcccaaactactaaacagtgtgttttttctaaaaaaatttctatatgaaatttgcttttaaaaatcatattaatccatttttaaagtttaaaatagttaatactcaattaattatatgctaatgacttacctcattttgcatatcttctcaatcttctcttttcttctcctcttaaactcagagcgcgacaaataaaagagaaagctaggttaatatggaagtgacaaataaaagatactacatagtgttccttcctttttattgttttggttttcttttacggaattatatatccttttcaaatcacacatggtagcgccttctagaattcgatggatcagtcaccaagtgcatcgatgtaattgtcttgttggcagcaaatcaaccatcctgacggcgatggagatcgtgaaattgaaaaggaatattagcgtacgtacttagtgccgatcatttagcgtttctatcgaaagtgcggctgatcgagttcaaacatgtggtaaaccttttttcatgacaaacaaagcaataaattaaaataccacaatgtgggaggaaaagctttcttcagtgtttctcgtggtgagttaattgtgatgtttactttcgtggcgagttaactgtgacaaatgacaaggcaatgaccaatagattaacaaccaaattacaaaaatccaaccgaaaaatgacagtgacatagctaataaacgcaggcagcatgtctaattaattatccaggtggcgaactggggatcgcacattgctagctttatttctgtgtcttccgcctttttatttttcgaagagccttgacacccgtcagagttgtgttgtatttactgcttctatagtgctcaatttcaacacacaaaagtttttgcataatcaggaaaaataacatttctatatctatataggagaccaactaactgttatattttataatatatttcaagtttatcaaaatttaactaatcgtctaatcctgagatgatgtgatactctgaaatgtggatactgttttggaaaattattaaaagataaatttatacagcgccaaacggatctcctgtcgattcatacaccagtgtaattaatcaaagctgcgcattgtaatctattggatttgactcagaaaccttaccctttcatcaatggaatcgcattatagcaactaaagctagaggtatatatatatatatatatatatatatatatatatatatatatatatataatataatgccccctcacaagtaataattaaaatatttcaattaatctgcccaggttgtcggttgaaaggcaaaccttccgaatcgactgaatctgacttgctgcttaacgaactgtttaaccacatggattagtgtgataacatgggctaataagtggcgatgtactataacgcacccattctctggtctggctgattacgttgtgtaaacaaacactatttttttctaatatattgacgtgcaaatcttttgcgcgttcgtgaaaagaaaataacacacccattctcgacaggatgagcgtgagtgcagctgcgacctacccctatgcttcaatttcttttttgacagttgcataggtcccttttatctttctgaataaaatgcactgctactagttactactattaattattgctaatactttccaatacataggtgatgaagcaagcaccttggcagtgtggaacctatatgtatgtattttatttcttgctgggcaataatgttcactagtggcatgtatagcaggttttttctataatcttggatggccgttaaatggtggaattgtacatatacatgcaactgcatatggattaggaaaaagttcaaatatcctctaaactttagatgaagtccgtctagtaccttgaactttaaaaccggacattcaaccccctgaactttgacataccatccatattacctctaaggtggttttggagaatggttttgcatattttggaagcttaaacaaacaattttgaataactaatataacatatttacatatcatcagttataagtcattaatttattcttacacattgatatcatactattatcatgttgatatttatttgtgagtgagagtaaataaagagcaaaaagaagtatttaaatcaaaattttaatatgtatgtctaaagcgtataacacgtgatcaaactcatctaattatatataaattagataaaaaccattatgcaaaaccatcttagtgggttatataaattgtattgtaaagtttataaattgtattgtaaagtttaggggtggaatgtccggttttaaagttcaggttgctagatggacttccatctaaagtttaggcggttatttggattttttagtcttttttttcgaacgattaaggcctcctttaatccttataaaagtaaaaagatagaaaggctcttaatgttcttctaaagtaaagtgctaagttgtgcttattttttaagttcatgtgaacttcgacgttgaagttttaattgtagttttttttcaaaacgaaattaaccaaacaaattcaaatgttgtttatttcacacttgtttactgatagagttcaagttacccgatagaattcaagttttactatccacaagcattacatacacatggactcttttcaataggaatttagttatgttagggatttgctgatgtctgtctctttaagcactcgcaagtatgcatatgtgacgtgtgtacgtggtggtgtatatgcgtgtgcagcttccgtataatcagaaaaaagatataaatggagaatagtcgacattgttaagttcgtgggacttgacaagaccactgtagattagtcagacatgtaccaagacttgtagaaatactctctccgtacatacgtaggtttatgtcgatatttgaacattcgtattatttaaatttttttattgtgattaacatttttgttgttattagatgataaaacatgaataatactttatgcatgacttttttattttttcatgaatttttaaaataagacggacggttaaacattggacacgaaacctacgtctgcacttaaaatgaaacggatagagtaataaacacgacacatagatgtgacccagcagaatataacatggttagaattggtcaaccttagtaccattctacaatttaaaccacagagacgaatgtctggactaggcatgcaataagcataagctatgatttcgcttcaccgtatcaggtgaagaggcctcagctcaccgaccccacctgtcagtggccaaagctggagcccctcaagaatctatccatcaatcctgatttctttttcccactgagagaaaaacaaaaggagggaatattgtggggagagaagaaaggccaagaggagagggaaggggggggggggggcatgagataaatggccaataggaaaagttgagaacaaatccaaaccaaccaatcccaatatccacataccacctctccattggaccacagtttctctctccccacaaccaaaccaaaactaagaaacccctgctgctctctgcaagaactccatcaaattccccagccaaaaacactcagataattttttttattagaaaaaaagaaaggagattagccagccagtctgctgctccatctcagtgctcacgcactcactctgaggagtgaaatccaatccagcccactccggagttcctggaaaatcctcgcgaagtccaagaaaaaaaatattaccactgccatttcttggtttcttgatagcttctcctagctgctgccgcccaatcatccgagagagcgagcaagtaagaaagattgattgattgcttgattgggagtgtcctttgggcgagctgtggtgggatttagcggcatgtcagcgtcgccgtcgtcgatgagcggcgccggcgccggcgaggcgggggtgcggacggtggtgtggttcaggcgggacctgcgcgtggaggacaacccggcgctggcggcggcggcgcgggcggccggggaggtggtgccggtgtacgtgtgggcgccggaggaggacgggccgtactacccggggcgggtgtcccggtggtggctcagccagagcctcaagcacctggacgcctcgctccggcggctcggcgccagcaggctcgtcacccgccgctccgccgacgccgtcgtcgcgctcatcgagctcgtccgcagcatcggcgccacgcatctcttcttcaaccacctctacggttcgattcctatatcttcttctcgcactgcgacctcttcttggtcaattcttccttttttttttaggctctgctattatgattcagacttcagcttagagttccagttaaatttgttcgatatttttccttccctcttctcgtttaacaggatccattgatccagaattccagataggtactatatctcacaaagggaaaaaaaaagagagactaggctaagcttccacgaacagcatcttgtgtgtctaccatttatggatatttcgcaccttaacacccttactcttcacgtcaaagagctccaagtatggagagcatctaccttagactttcccatcaaacactccctgaacactcggtcaccgtctccctctttaattcccaaaagttcatgcagccaccaacctcctcacctcctcatagcctatccaagaactccattaaatttagcagttggccaaggattcaggaatggtgtgtgtgtgctctggtttactgttttagcaacaagaagaatggttaatta

SEQ ID NO: 16652 - DNA, 796 bp, Oryza sativa
aggcttgctctcgctggttctgtgcgcgcagaaactagcgaggggaatgcagtagtgcaacgacaaaagtagagggtggagtattgtacaattgtgtctctttgatacattcaggagctaggcccttctttggttatatgtgtgcagaggtaaatgagaggatgatgaaaccgaaacacaattacttccgttgatgagcatcagttactggtaattagccaaattaacaccatcaatcaacagtaacagtcaagatttgtattgctctctaattgagtcatcaatcctctatgttaactaagttgataccccgcgcgttgatgtgggtataaaagagtaattcccagtgtgcaatattagcgtaaataatagagaatttatcttatagtaattatatatcatcacatgataggtggtggtataaaaacatattctgctactggccaaaaaaattcacaaatataaagataaagtctaaaaaaagttatgtttgcttatcaaaattctgaatgagagaaacaaaatcatataaaatactgctggaggtatagatggccataaggcccaaggcccgatggcctggcacaagcacatcacggcccgattggggtcgtgcctaggccggcctgacccgacagctgggtcgtgcctgggccgatgccttggcacggtgggccattccggcacggctcgatccaatgaggagggaagaaaaatagtttagggactaaaattagacttaatgcagccatacaattcatggcccaagagagaaggaaaccaaaaggaaaaagta

SEQ ID NO: 16653 - DNA, 3268 bp, Oryza sativa
gactactatagggcgaattcgagctcggtaccctaatgttctaaaattggatatcaaaatgtatctaatcgcatctgtaatggctgttggccaaccgacgactcaactcctctcacacgagcacacacacaagaatgaaaggcaaacacagtggattagagaattttggtgctgcacaccagcaaaccacaacactcaccagcacgctcctgttaatcaccacacaaaacacaagctaatacacacacattaagccatgttctggccgcactacccagccaaacactgcatggcttaaccactaatcacttccctacatgcaggccacatctcttgcatatagagcaccacactcacacgttcagttgctggtatccaatccgccgatgcatgcgtccatgcaaaacagattgtgacctcttcctgctcctgaacttgcgccatgactcaatcgaccaaacgcctggccacacacatatgcaaaactaattctaacacacacacacacgtacatacacatcatgccaccactcttggccactaccacgccgcacgatgagcatatatactactaactacagcttaacacaaccaaacactaaaacaacaagattaatttctaacaatgacaagacccagaaattttcactacgattttacatcttattttcctatgatattttggacagattgaatgcctagaaagtaggtcgttcaggtgccaagattccacccactttttcaagtgatttaatggtgtttatttcgttgctattctcttgacacatatcaagtctttgactcctaagttttaataaaataaaatctctgattcctgcttactcattgtgaaaaaattatttaatttctttgttttttggagtatttccgagcacatcaagacgcgcgccttaataacccctactcaatccgaatccaccctccagctatatatggccatttgggcggcacggcccagcacggtgctggcccatgtgctgaagcatcggcccaggcacggcccaacacgactcgggccgtgccgagccgacccgaagtcacgacagcccattgcgcttcttcataaaaaagtctaattttcatcccttatttctttgggccatgtctgaatgattgtattcagtctattttgctttggaaaaagtacaccgaaggacctcggacgaccggttttgtattgttaagggacctcgtatatctggtttgcggttcgaggatgtttttatcccaatgacaagttgagggaccttcggtgtactttttccttttgctttccttctctcttgggccatgaattgtatggctgcattaagtctaattttagtccctaaactatttttcttccctcctcattggatcgagccgtgccggaatggcccaccgtgccaaggcatcggcccaggcacgacccagctgtcgggtcaggccggcctaggcacgaccccaatcgggccgtgatgtgcttgtgccaggccatcgggccttgggccttatggccatctatacctccagcagtattttatatgattttgtttctctcattcagaattttgataagcaaacataactttttttagactttatctttatatttgtgaatttttttggccagtagcagaatatgtttttataccaccacctatcatgtgatgatatataattactataagataaattctctattatttacgctaatattgcacactgggaattactcttttatacccacatcaacgcgcggggtatcaacttagttaacatagaggattgatgactcaattagagagcaatacaaatcttgactgttactgttgattgatggtgttaatttggctaattaccagtaactgatgctcatcaacggaagtaattgtgtttcggtttcatcatcctctcatttacctctgcacacatataaccaaagaagggcctagctcctgaatgtatcaaagagacacaattgtacaatactccaccctctacttttgtcgttgcactactgcattcccctcgctagtttctgcgcgcacagaaccagcgagagcaagcctccgaaaccacgccccgctgcaacgtttgcatggacattctcactaatcgtctgcttcatcttatttctagtgttgttcacaagaacaaggactatatccacgatggcgaccgatactgggaacgtcaacaccagcaccgctgcttctggatttgggggattctcttttgggtatgtgtatctacacatggtgttaagcatgttccagatgatttagttcttgttagcacgaacatgtttagcactacatttggatcacttttatgcttaaatgtcatatttattcttttgtttttctagattaaattacgaagaaaaatgactagattttcaccagcaaataggcagcgttgccgttgatggggctggaaacccggtggatggcagtggctgcttggatcatggatttgccttgaagtggggccttcgctttccaaggcaggtggcttcagtggcaccggcggtgacggatcaaggagacaaggattcggcggcgatggctgctctccagcccggatctcttgttttgatcagtttcttttttttccttgtagttgtatcgtttggggattttgccggatgttccataaacaacattgaacagaacatcaacacactacagaaatcgacaagttgggggaggacaggctgcggcggtggctagtggtgacacacatacggatgcgagctgatgaaacgacgtcatgcttggaataggcctgaaggtgatggtgtcgaccttatgcccatgagatcctgaggactaggaggtcgtctctatctgtctgctttacttagttcagattgtactcctgttaaatgaactaggaaggtggcccgcgcgtatgcacgggcacttatattattgaaaggtaagattattgtttgttcagaaattttgtcttatagattaagggcaaactaaagtttagataatattattttataataatttaagggttctatttttcttaacgtatcttaaaaaaccattcacaaacttaagtaggagatggattaagtacttacgatttttgaatcatgtttcttttttctcgaataaataaaaaactattgctagttaattatcatataatccatctatacacataccgtgtagtacgaccacaaatgaaaaatgcgagtgcaagatactcaaaattcttttgattaaatcgtctcatcaaggcgcatgat

SEQ ID NO: 16654 - DNA, 32768 bp, Oryza sativa
  unsure (1)..(32768): unsure at all n locations
cggttttaatagttgggggggtcaagatatctagtatcgtggtttaaggatatgaatcagattcaagtactacctaatggagtcgaagtgaacttattcctgcccaaaaccaatctcaatcctcattttttcgggggttttggtagacagtggcatagtgccagcatctccaagagaagattaaaaattagttcccaaaaatcttggactaaaaccgtcccaaaaattattatgctaataaaaagttgagaatttcttatataccactgaaaattagttggttcccttgtatgccactcaaaattggctcttccctttatgccactagatcttcactatttatcatactattgaatatatgaatgtttgcagtcacatgattttgaaccaaaggttattttggtcatttatgcaagaaaaaaaaagacatgtgacttgaccctagtcagtcaacacgcagtcaacagtcgagagtgagagggtgcacaaatttaagccaatcgcatatagaggaagagccaattttaagtggcatataagataacagaccgattttcagtgatatataatttcagtgatatataaaaaataaaaatcctaatattatatgattgttggccacgtaggcatgtgggcctagttcagttgatcgatctttttttcttgccgtggatacgttgccgctacagtacctcgacgcctcgccgatcgctgctgcctctgattttcttttttgccgctatagttcatcgacgtcttgttgcacatgtggagaaacggaaggtcgagacgatccccagccatacgacctcctacctatggcgctgctacgatgcagtagtgcttgataacctggaagatttagaaaaaaaaaatacaacatcttgacagtagtgtattatgtaagggtttacagataattcataccattttatacttcacagtacaaatcatgaacaaaacaatatttctctgcattcagaatacatatcgaacatactcctttcattccacaatgtaagtcattctagcattttccacatttatatcgatgttaatgaatctagacatatatatatatatatatatatatatatatatatatatatatatatatctagattcattaacattaatgtgaatgtggaaaattctagaatgacttacattatgaaacggaggaaatagattttctagggtttccatggaaaaacaggatactggagatggacggcagagggagccaggctggcgttggacgcgaacccaaggcggcgacgtcacctggagtcgaaaggtgaggggagtcgctagcgaggagcacctctgagctctctttctctacctttctatctcgcttgctcctgaagaagacggcggcgctaacgggagtgaggagaggggacgatgaacggatgaaggccgagacggcgtcggcgcgctgcacgttccgaggatgaacgatttatcctgcgtatgcaccgaatttgggagcgcggagagcttcgaaacagtactccctctgtttctcttaatataaggaattttgacattttacttataccgtttgaccattggtcttattaaaaacaatttagaattattatttattttatttgtaacttgctttattatctaaagtactttaagcacaatttttcgtttttatatttgcacaaattttctggataagataagtagtcaaacattataagaaaataatgaatatcccttatattagagggagagaggtactatctattaagcgattggtcgcactgcacgtggtcggattctaattttcagcttttagttcggttcaggttgtcgggtcttttctctttccttttgggactgatgttttgtgggctcacggtttgtatttttgtcccgtgtggataacgcttgatggggctaggtttcctcttctttttgcctaggaataagttcaatgtgggtcccacaatttatcgtccagtttggaatttatccatgaaccgaagcacatcgtcaaacttaaaataccggattaatcgaggtcccaagcagtattaggtccggtttaaactgatgtggccagctgagtcaaacgtgggacccacgcggggcccacgtgtcagcgaaccatttttactttcttctctccccaactcttcagggcgacgtgtagcgggttggaggcgtggagaggggcgtcggccgccggcaggacgctgcgccgtgggatggcagtcggaccagagtcgcgcggctgtcttgcggcgacctggagtcgttgacggcggagcacctgtacgtgcgtagcgacgtagcaggtccgggaagcgggagctcgtcttggaggatgtggagcttgccaaggtagttgagatggagaccgtgttcgctttagtttgagcgtggatttgtgatttcttttttttttctcttcatgatttgctcgctgtagatgagcatggtgctctgatttgctcgctgcagtacgagtaggaactctgattttctgatttgatattttcatttgctcaatattgatattgaaggatttagtctaaaaaaattaaaatgtccagtgaagaaagagcatgatttatgatttacttacagattgcaatcctatccaatcttctgcacatgttatgcttgtcgacacaccgtatggcgaggtcctcgactttgttggagaggatgagagagcacaggtactcaacacgctcgcgcatgacgtggatgatggcgaggagctcgagacgcctgagctgacgaacgccgtcagcatctccagccctagatagggagctgctgtggagagcttcaacaagctacgccgtggaggaagaggaaggcggaggagctcgaggaaggaggagggaaggtcggcgatgaagaagatggtttttttcctcttctgccagccaccggttgcatcaagggagagagaggagaagggaaggaggccggcaaccacccctctccgccggcggccatttgtggagattatgggtaccccatacccacacggcatggttatccgactagttataggggataacttatatatatgaaatatgtaacagatcatgacttgggtattacgtttccctgtatattatggaacggcctaaagtcctggtttgataagattgtaaagtagatttaggaaaccgataccgtattggttaaggtttctatcttataaccttgccccccaacctatataaggagggcagggagcccctctaggggcatgagacaacctgatcgtcagatctatactacacccggcggattcaaatccccaaacaggagtagggtattacctctcatcgagagggcctgaacctgtctaaatcctttgtctccacatccatccacttttaggtctcgtgcgctaccccgttttattattgccgaattcatgtttcgacagttggcgcgccaggtaggggttgcgtcgagtttcctatcaacaagcgcgatggaatcaatttcatgagtcgccgacttcgctttcgctttgggagttttcacttcctttccgtcgaccacttcttcaagctcctcttctctgacttgatccaaatcagtcagggggaaactcaatctgatttttatcattatttatcatattgatttttaatctcagattaatttcttgctattttttgttgttgttcgcatataactacgcggcactattgaggcgattgatgctggtcatggactcgaggcgtctcagctttccggtcgatcggccgcgagtccactccgccggcttgtcctcgccaccgccattgctgatagcaacaacgacttcaccgccggcctgcttccgtcgccgcccgaccggtgtcatncgcctatacgngttggtcggtcacaccaccgctgttgggcgtccacatcttcaccgttggctcaccttcgctaccgtcgactggtgtttccgcctacacggctggcctattatgccgccgctgttgggcgtctacgacttcaccgccggcctgcctccgtcgccgccgactggtgtttccgcctacacggctggcctattatgccgccgctgttgggcgtctacgacttcaccgccggcctgcctccgtcgccgccgagtggtgcctccgcctacacggctggcctattatgccgccgctgttgggcgtctatgacttcaccgccggcccgcctccgtcgccgccgagtggtgcctccgcctacacggctggcctattatgccgccgctgttgggtgtctacgacttcaccgccggcctgcctccgtcgccgccgagtggtgcctccgcctacacggctggcctattatgccgccgctgttgggcgtctacatcctcaccgttggctcaccttcgctgccgtcgactggtgtttccgcctacacggctggcctattatgccgccgctgttgggcgtctacgacttcaccgccggcctgcctccgtcgccgccgagtggtgcctccgcctacacggctggcctattatgccgccgctgttgggcgtctacgacttcaccgccggcttgccttcgtcgccgccgactggtgtcctcgcctgcacggctggcctatcatgccgccgttgttgggcgtccacgtcttcgccgaccggctggccttcgccgctgccgactggtgtttttgcctatacggttgacggacttcgccgctgttaatgggcttcatcatctacaccactggcttggttccactggcgccgactggtgtttttgtcaccattgatggactgcttcgttcccacattggctacttctgccatcaccaaggggaatattacaaagctaagtcgtcatttattttattctttatatgatatttttccttttcctctgcctcactacaccaattggtcttccattgagtagtgagtcgggggctacagatgttatatcatattttttataatattcatcttgattgcttgcgacataatctgagtacaaaagtacctatcgagttatggagttctatcttcctatgctttccgtttggtttgccaatggatggttgcctttgggccgattcctagcacccgggggctcgttggatggaccgagtaacgcaaggtgctaagtattattcggaataaatcaaaagcatagagatgagataaatttattttctgctcttaataattgcaaaagtacccgagtagtaaactccgatccgtgaaactttgttccattaatgacgaactcatgtcactcatatgcatgtttgggaagtgcttaggccgactcccagtgcttggtggctatgactagttgggcagagcgtttaaacgtaatgagtcatctgctcggggaaatcaaaattgacaagaggagaaatacatatttataaatattttaaaatacttgattttttctcgagtattatatttatatcagatactactcatcctatatgtttgttctgcaggatccagatccagatatgcataaaagggattcatggctttaagcttatctcttacgctctaggaatggatcagtcagaacatcaccaccggccgcctcgtccgccgccgactggtgttctcgcctgcacggttggcctattatgccgccgctgttgggcgcctacgtcttcaccgaccggctcgcctttgccgccgccgactggtgtcctcgcctgcacggctggcctattatgccgccgttgttgggcgcctacgtcttcaccgaccggctcgcctacttcgccgccgactggtgtccacgcctgcacggctggcctattatgccgccgctgttgggcgcctacgtcttcaccgaccggctcgccttcgtcgccgccgactggtgtccacgcctgcacggctggcctattatgccgccgctgttgggcgcctacgtcttcaccgaccggctcgcctttgccgccgccgactggtgtcctcgcctgcacggctggcctttatgccgccgttgttgggcgtctacgtcttcaccgaccggcttgccttcgccgctgccgattggtgcttccgcctgcacagctggcctattatgccgccgctgttgggcgcctacgtcttcaccgaccggctcgccttcgccgccgccgactggtgtttccgcctgcacggctggggcgcgtcttcaccgaccggcttgccttcgccgctaccgattggtgcttccgcctgcacggcagacttattatgctgccgttgttgggcgtctacgtcttcaccgaccggccgccgcatccgcagctgactggtgtcaccgcctgcacggctggcctgttataacgccaactgatgctaccttcttcacggctggctacatcgctgtcactactaataggcatcagtatcttcaacacaagctgcctacgtttgccatggctgccgactggtttcttcacttccatggctgcatgattctgccagtgttgattggccttatcttcttcaccgccggtcgtctcgtctgctgctgactagtgctctcacctctacgtctggtttatacagttaccactactgatggacatcatcgtcttccgttgccgactggttatgccgccggcgactagtgcttttatcttcacaactgcgcgtcttcgctacaagtttgctcctgttgccgccgactcgtgttcacttcatcacgccgatgcaactttgtcatcatggtggagcaacttcatctttattatcttcggcactggcaaactctattgctgctacttcgcaagttttactacttcaccaacaacgacgtctttgtgagcctcgacatctcggcatgcgatgccatgttattttactacaacaagaggctctccaatattcaggatttctacttggacatcttcaacacatatcttcaatcaagcaatgactactcgacgacaagaagctataattctcgactctatgttcagttgtttcccaactaatcaaagagtcgggggctacacaaatacaaggctcaaaatttgataaattttatgtcaagctgaagaaatcaattaatcagccaatgagtcaactccaggagtcattatcttcatcttcgcttcggaacagacattctacttcaacaacttcgaatatttcggtttagacgagttgggcaacaacatcaactctcctccaattatttgtcttcacggttggcctactacgcaactgccgatagaggatctcatcgttatcatcggctgctacatcgctattgactggatcaccgacatcgtcatcttcatcaacatcttgtcaagcctcttcaacatagcctactctgctgccgttgatgggaaacttcgtcatcatagtcggctatctctattgccgctaatcatcattaccgtcggatgcgtttgtcgccgccgattattttcttcatcttcatgattggtggatttcgctgtcaccgttgatgcgcgtctacgtcttcatcgtcggtttgcttttgtcaccaccgactgttctttcgttgttgttgggcgcctacaccttcactgctagctgacctgactgttgccgactggtttcttcgcctccatggttatgcaacttcattacctttgattggtgtcactgtttttactatcactgacatcttccgttacttctgatgagcaatttcgtcttcatgttggtcatttcatctccatgccgactgcgtcagctattgccaatagacaattttgactatgacagaaggacaagctatatgctcaggggctcatcaactcaagcgtgggggattatatctccaatttggacttgttccggatacattccacatggattcatagtcatgagtctattttctatgctcaaagactggaccaattattattccccgtaagggctatcaaccgaatacttgcgccagtcgggattcaattattatatttattttggagtatcccataagggataatcattcagatcagaagctattcatatgagctacacttggtctatattacccggaagatttattactcgggagcatgttacatgcgtcatcctttaaagggtgtcgaaggcatgttttttggcctaggcctaatatgtctgcagcccatattttcaggtgtggcctgtcacgttcttttagggacttaggcacttttcgcttaggccaaagtgcgcgtgatcaagtgcccaataccttaaaatccttttataccgcagttactcgactttttaggagttggtacaatgcatcttaaaaggtgtcaaacagtaaagctttatatagctgccccgctgacttttttatatagtcaaggtgctgtttgggtttatcaagcaattgattggatacaatatcattgcttttcgccacgtaagtgtgcatttttattgaccaatattatggcttaggctgattatatattgtggtcattttctaggcggttggtaaatcctttatgagtttatttactcggattttacaccacatatgccatatgtttccaggtgtggtgaaaccatgtgtcttttagggattaaagcacgtctgttaaagcagtgtgcgcatggcgtatgtccaatactttggaaatttatttattcacaacatacaagcttctttatagctgttttgctatgtgaattttcaataatgtagccaactttaggttacactcatcatattttacaaagcagtcggtgtatcacttggatcatattattcagggattcacaccgcatatgctacatattaatattaagtcgcttggttgactacaattatcgaaaccactcggttggttagattatttattccttgattatatgtttggtttgttcaattaaccacatagtcgggggttacacctattaggtgcatctagtcgatgcatctgactttattttttcagccctccacagtcttctgatttggaaaaagtactcgggagatcatggcgaagatgattgaagcactcggctttggagtaatctagttcgagagaagattatctttccgactgtgaaggtctcaggggctactgtggagattatgggtaccccatacccacacggcatggttatccgactagttataggggataacttatatatatgaaatatgtaacagatcatgacttgggtattacgtttccctgtatattatggaacggcctaaagtcctggtttgataagattgtaaagtagatttaggaaaccgataccgtattggttaaggtttctatcttataaccttgccccccaacctatataaggagggcagggagcccctctaggggcatgagacaacctgatcgtcagatctatactacacccggcggattcaaatccccaaacaggagtagggtattacctctcatcgagagggcctgaacctgtctaaatcctttgtctccacatccatccacttttaggtctcgtgcgctaccccgttttattattgccgaattcatgtttcgacaccattgccatgtgaaggatacgagaggagagagaaaggagacagaagaattggaacggacatgtggggcccacttgctacgtcagttcaaaccggccacaatacttctagactgaaagttgacatggtattgcaagttggaacatagggtatacatggtatgtcgatttaggtatagatttcagattcagcgacaaattaatggacctagagtgaatttattcctttttcctatgaagagtgttgttttcgttttttttttggcaaaaatgagtccaatctttcattggcttggcccgtttatcgtatgggtctctcatcccacatatatgttatgttatttctctaatctttttccaatttgtttcaaatatatatcaacaaaatttatatgtctaaagtttatatacacaaagtttgtgccaaggtggagtttgttggagtttgtgtcgaatatgtgtatgttgtcggttgcagtataggacttggagttgtattagatgttaggaatagagtaagagtctgtctctatcctagtatctctcttaaatagaggggtggacctgctatgaccacatggcgatttagcatagcgagaaggagcggttgccggcggcgtccagtcatgagtcattgtaactttgatatgctgtaatatgctggatcatggaggagcgtctgtagtcagtgcaccagagatgtaggcctcggctgaactccgttagcaaatatagtacccggtatcatcatcatgttggcatcacctacgacgtttctttcgtgtttagctaccgatgtcgattttggggctgcttttataacagccgctttgcgcaaggatgggcgccgattgtttgcagcggagttgggagggacggagtcaccgtgtacccgtccccgtgttcatggaagaagggaagagcgatagtcgatggcggacggtaggcaagagcgatacggcgaccatccttctggtttgtgagctaaggattgaacgatattgggctaggcggctggcaagcatcaacctatcatagaaccataactacttaattatccttccaccttaattaaataaatgactcaaatggccaccaaaatcaacggtgggtttattcttgctatactagtacaccacgagtgtgagcgattcggcagtgacgcgcccttgctgctgcttgttgagcttgggggatgggagggcaggaggaggtgccagatcaggaggaagcgtcggctttgctgccccctccattatccaacaaggagaagaggcggcgccatgaccaccatgagctcattgcagctgcggcttctccgcttcttggtgaaaagattgggggaaattcgtcttcatggtgaagaaaagtgagtggagtgggtggcacattaaagtagtactagtagtagtacaagtactcgtgtgatttatttttaccgtgctctgcagctcccacttgagagttggtggcatagtagagtttgcactattaataaagtatgcaattcaaacatgatgtgaaaaacatgtatgttttgttttgagttgtatcttgcttccctttatggaaagataccatatatatgggagaattcctaatttcactatgtttcgaagcctaaattaactactaatctgacccttttttttgtttgcttatttaaccctgcttttcaaaaagaaatgaaatataaaaacttttcataatgatcagaatgcctcaaagcaaccctatccgcatctaattctatccattcagattaaccatatccattcatctctcgtatcccgtctctctctctctcggcaagtggcggcggcggcgccagcacgttgtaactctgatacgctgtaaaatgctggatcggggtggaacgcctgtaatcagtgccctggagatgtaggcctcgactgaactccggtatcaaatatcgtgcctcagtgatatcttcatgtttggatctcctatgacgtttcttctgcgctcagctatcgacgttgatttcggggttggttttataacagtcgcttcgcacaaggatcggcgtcggttgttgggagcgctattgggaggggcggagtcgccatgtgccagtccccgtgctcatgtgaagaaaagaagtgcgacggtcgatggcagacgatggccaggagcgatacgacgaccatccttctgcttcgtcagctaagggttgaacgctatttggctaggcggctggcaagcatcagcctatcatacaaatataattacttaattgtccttccaccttaataccgaaatcaatggtgggatttattcttactacgctagtacatccaccggtgggaggtacaacaaaaacaccgttccattggctatatagtacgttcaaaaagaaaaccagattatttcttcatgcgattgttgcaatcctaggtgacggtgtattatatgtgattgctagttaaactgcattttccttgtgatctgaaggaggaagaaaaggtggctgccatcaccatcgcagggtgtagagaaataacttgatgcacgttggaaaagctcatggattccagctccagtgacaaaaacaaggagacattatgcctccccaccaccaccgtcgggggtgatgcttcctccaggctcaggtgtagcatgcggtgataccaccatcgtgttgatcaggtccaccaggtgctgctccgcgatccaacaatcgacgcacaccatcgtcgttagtagggcagtgctgttgtaggcgtgcattgtcatacctctcttgagcttctggactttgtccgcaagagcgtctcttctattgaagttgctggcaagggtggcaaaaagatcgcaggtatccggcagagtgctgcgatgcgtgttggtgtggctggccatggcccttagaatcctgagctcgccggccctagaccacaagcgctcgaatgctgtcacccgctttctcttgttgttgcgcttctgagatggggttgaggttggcttcttcttaggctcaccgtcgccaagctggaattgctccttcaccttgggcgccttgggcgtggccttttggggtgaaggacgattattgcagggtgcgagctatggctacgattgcgagggtttggcttgggattcggcttcggccggctatccctcctgaggcttcggcttcaacggtgaggtgcccctgctgcttcttgttgagcatgagggacaggagggaggaggaggtgccggatccagatgaagcgtcagcattgctgcctcctccgttgcccaaggaggagaagatgctgtgccaagaccaccatgagctcatcaccgctgcggcatctcagcttcttggggaaaagattgggggaaattcgtctttagggtgaagaaaagtgagtggagtgggtggcacagtgaagtagcagtagtacttgtgtgatttttttcaccgtgctctacagctcccacatgagagttggtggcacagtagagtttgcactatcaataaagtatgcaattcaaacatgatttgaaaacatgcatgttctatatcttgccgtcctttgtgaaaagataccatctatatgggagaatttcttatttgactctgttacgatgcctaacctaactactaatctgaccctacctttttagtttgcttatttgaccctgcttttaaaaaagaaataaaatataataacttttccaaatgatcagaataccctcgaagaaaccctatccacatctaatcctatcctttcagattaaccctatccattcatctctcatatcccgtctatctctctctccctctctctcggctagtggcagcggcacggctcattgtaactttctgatacactgtaatatgctggatggtggaagagcacctgtaatcagtaccccagagatgtaggcctcggctgaactccgttatcaaatatcgtgccttggtgacgtcatcgtgtttggatctcctatgatgtttcttccgcgtttaactaccgatgttgattgcagggctggttttataacagtcgctctgcgcaaggatgggtgctagttgttggcagcacagttgggaggggcggagccgccgtgtgcccatccccgtgttcatgcgaagaagggaagtgcaacgatcgatggcggacgctggctaggtgcgatacagtggccatgcttctgcttcatgagctaagtattgatctattttgggctaggcagctggcaagcatcagcgtatcatagaagtataattacttaattatccttccaccttaataccaaaatcaacggtgggatttattcttactacactagtacacccactagtgggaggtatagtaaaaacacccttccaatggctatatagtacattcaaaaagaaaactagattatttcttcatgcgattgttgcaatgctgggagacagtggattatataagattgctagctaaactgcattttcctcgtgttctgaaggaggaagaaaaggtggctgccatcgccatggcagggtgtagagaaataacttgattcacgttgcagaagctccaccgccacccccggtggcgacgctgcctccaggctcatgtgcaaccacttttgtgccgatcaggtgcacctagtgctgctccatgatctaacaatcgatgcatatcattgtcgtcagtcgagctgcattgctgcaggcgtgcagtgtcatatcatctcttgaacttgtggactttgtcagtgagcttggcctggtcggcatctcttttgtcgaggctgttggcaaaggcggcaaagagatcgctggtatccggcagagcgccgcgatgggtgttggcatggttggccatgtcctctagaatcctgatcccgttagccctggaccatgaccgctcgaatctcgccacccgctttctcttgttattgtgcttctaagacggggtcggggctagcttttctttggctcgacgtcgccgaggtgcagctgcgccttcgccttggacgccttgggcatggcctttcggggtgaaggacgattcttgcggggcgcgggctgtggctgcgattgcgagggtttggcttgggcttcggccggcccttcctcccaaggcttcatcgtgcaattgcttcgccagcgaggcgcccctgctgctgcttgttgaggataagggaccgggggtgggggggaggaggtgccggatccggaggaagcatcggcattgctgccccctccattgcccaatgaggagaagaggctgcgccaagaccaccatgaggtcatcgctgctgcggcttcttcgtttcttggggaaaagattgggggaaaattcgtcttcagggtgaagaaaagtgagtggagtgggtagcacagtgaagtagtactagtactggtactagtactggtacaagtacttgtgtgatttttttttaccgtgctctgcaactcccacgtgagagttggtggcacagtagagtttgcactgttaataaagtatgcaattcaaacatgatctgaaaagcatgcatgcgttgtgttgagttgtatcttgtcgccttatatggaaagataccacatatatgagacaattccttatttgactctgtttcgaagcctaactactaatttaccctactttttttaccttacttttcaaaaaaagaaatataataacttttcataacgattagaataccctcgaagcaaccctatcctcatctaatcctatccattcatattaaccctatccattcatctcttgcatcctgcctctctctctcttgcggtggcactagctcgtggagggagggagcagcggcggctcatggtgggaaggagcggcagggggcaaagggagggatctgcctggccagctcccacagcgtcaccttcaggagccgtgccagagctagacacagagcatgaggcatctgtcgtctatggcgaatagcccgatcacgccggccatctctatggctttgaagctccgttctttgttgtacacctttgacgcccgcagatacttacctcggtagctcaacgagggatcacgagggatcgttccatcatcttcgtgtcgagcgccactaggctgcaggtagtgcgaggacagggtgtagaactacgtcaccagcatgtacctggtggcgttggtgtcgcggctgcaccacctgcgcaggtggtgtagccttccgtacgactatgatgtactcaccgcccgtacgtcgagcaggtagctgaccatatagttctggaacacctcgtacacccgagcgtcatgtagtagacgagaacagcagcatgtacgttgtatgggcgtggcacccgcggcctgtgtccatatgtcatatacagcagttcgattcagtgagtaacataatatttttctatagcagttaagaaatgtttgacaatatatacaagatgaaaataatctaaaataccttgtatggatatatattccattatatatatatatgagaaaaggccgcaatgatattccattatctaaaaaattagatatagctatacatatatattaatgaatggtgttatatattttttctatttattgtttctgtcagttgtactgattcagtttaatcaaatactttaatcgtcgtgcaggtcttcccatatataattcatctaaaacacaattcatatccgcgaaattcaatgatctgtaagaatgaaaatgtattcctatggagttaaatattccaagctgcagtacagttttatgaaatcttacccctgctaggaacacgtgcatcaactgatcactgtacagaaacaacgtatgggaatcagtatcaaatttggaacgggaaaattatgcagaatacaatgttcgaaacactgttgtagcatggcaccttctgtagaatgcctggaactttatggaatcataacctttccagtatctagaaaatattgaacttcaggctttgagcgaaatttatgattgtaatccttgtggcggtaatactgctatgtgagaaaaaaattaatttcatgtaacatatgaacaacaaaataaatttagtatatgtataatttagaaataaccaacatgcattttctttcttttttctttggttggaaggggatatgggagggaaaaactcaatatatcccaatactgcatcacgtgtatgaccctagttagccacccaaaggtgcaaggattcacagtatacaggctttgatccaaattaatttttgatatgttctcgcaattcattgttagaactgataagttagattaatgaattagcaagaagatatattatttatatgcaacatactgtgttctaatagtgattatatttgaaaaataaaagtcaaatatattttctgaatgccatttgtactaaaggtagctatcataaaatagtttggttttgtacatattactttgactgcacacaaattatcatgttatataaacaagaatatgtttttaaaaaggaatgtaactttacaaaccactccaatcctgccatatgtcattactagataaagaactatgcattccaatggttccatgttacatattggccagatgtgacatatcccaccagatatattctaagaatgcaaattgttttattaccattatttaattgtagcatgagaagtatttttgctagacgatatgagacttaatattcagatttaatgaatgactaaatgtgggtagtactcccaaccaacagtactgtttaaacactaaatctgtttgttggatttcaattgttccatgtgtcaggttttatactgtagttatacaaagtataaattttaaaagagtaacacatgtttgggtttacacaaagaaataaatgatagatatatagctcatttttcgatcatgcatcattcttttagggttaacatataacacatctttatgtcaaaaacatttgtgcatttaacattttcagccaatctccaagattactatttcatgtgtacaatcaccggtactttcagaaacgttgaacctgctaagattaaaaatccctacatattattgttatattgatgacagggctggttatctttccccaaaactatctaccctaacgaagtaaaacaaaacatttaaaaaaaaaacttcgtttgtgatacactcataaatttgagaaagaacacatttaactcttttaattaatcatgaaaatttatgaaacaaatataactgatcaacatataatattaattcactaaccttatctttggtcttctgatcatttcgaagatgattctcgatgtcccatccagttggatcaacctcatcttttcttggatgaaccttccatgattcaggaatatccttattgtttttcacttgtgtttttctttttcacttgtgtttttcctgaggaccacagaaacaacccagagtctgcatcttgtcgttgaccactctagacaagattgtcaccgcttagaatcctctgaaagtatataaccatggtgagaatcttgaacagtacgacaatacaaggtctcgtgaacgatttaaactaattcgatcatgtgataggaaacacacaaacacacacacacacacacatatggctcaaaaatcactgtgctgctcaccggattgcatacatttttctagaaactataagaattgtatctttattcaaatttgcatctataataaagaataccaatttcagaaaagatgttggaatatatgttgtattgcaggactgtttaacagaaataacaagggaagtaaaaaatcccatggagcgcaatcatattgtgttagttatagagaaaaagtgaagtcgaaattaatatattacagttgttgtttttccaggtgattgtgttccagtacttcaaaatctgttgaaatttgttatatatgttacagcactatttatcgtaatcaggaacataaacctacgcaaaacaatcagattgagctggatttaaaagttaactgagatgaagcaccgtttgtgatattctcatcaaaactaatggattgcgatatctgatatttttgatgaaccataaaaagatcatggagacaaaaaaaatcaggatatgatagaaattcatgaacctcaggttgaaacactacatttttctacctttttcctgggtgcaactcagagtccacataggagagaaatggagagaattactaaaactatttgcgatcatcccaaagctagcagccttcagttctctcgctatcggtttctgaatctgcctcgtggttattagccttacgagaatccacctcctgatcaccataaccaccaggatgcacacaaatattctgaaatcagcggtaactgttctctcgctgtcactaatgctgttgcttccatcagagtcatcacccgaataccatggattagctcctgttattgccacacccttgcctttgccatcaccagaagatggaagaccagatggtccatgggtaccccttctgatggtgccctgggtctagaagtaggaaacctgcaagaagagaaggagagacaaaagagaggatttggagatgaaaagaggattggagtaggggtagatccgggagaaacgaggtagatgttcatatctgtgctggaaacaggttgctccagaaaggctgtaaactttaattaggagatattcatattagctgtaaacttcccttctaactagaaaaaagttaaatgccaaacaaaaatgttgccagcacaagaaaacacatttcttactgttgctgccaaaaatgtgttttgggacgcgttcacacacaatatactctgcttaaaatagcttttttttattgccgtgcaatatgggatggtgtttacacaatactacatatatagcacttaatttaattatacacaatccgtctaacaaaaaccacttctgattagataaaatttggcattttaaggacagagggatcggagtatgtattttgttaaaccagtgtcgagggtatcatcaaccgccaatggttctccaaaacccctacgtaccccgcaatagtggagtttaaacttgtccttggaaattatgtattgtgctgagtgcacagctaatgcaattaggagatagcaaactcataccaaagtacggttacatagttgcatgtgaggctcctagctaatttgggattaatcctattgaggcacatatatggatttgagtatcagaggagagatggagatatttctgcatgcgttagcttgaagggcaccaaataaacttttatgagatatgctttgactaatttcaaatcatctccaaaattataaatctgtgccacacacaccgcttccattcaagcgtacatgcaacgatttttttctatacagagggcatcaggctaaaaaagacaaatgtcgaggacaatcccaaaataattaaacaaacaatagaataatatatcaataagtggattcacattttgcttcaaaaggactgaaggttaaaggtagtgctggttattgtgcacgtgcaatacacatcacagtcagatgcgtgccgtgggagtaggagggagcttatcagtagataatagaggaatatagtccctccgttccaaaataaatcaacttatagaattcaaactttgtcctaaaataaatcaacttctatcttcttattcactgttgattcgcaaatcaaaaaaatttattccttcaataccccttgcctacatatctaccaatactagctattaatatatgcaggtagttttcagggcaacacattgactccggtcttgggcacaactacaaaagtatgaggaagatagtgagcttttaaaggctgcatgccgtattcttgagacaacagttatgcaactttttgtcaaacataattcaataattgtgtactctttatcttgggttggcagtctttagcttgtttcttcttgatggttggtttcatcctttaagtttctttgaacttcactcattttgagtgtgagattgtaataattggctgtagctctttgagtaaaggccgggatgctctattccattatctaaaaaaaagctattaataattgtattttggtcctttatcctcttcattaatttcgcattgggaagctaggagttatctctttatggcacagagggagtatgcactattagataaaagtacaaatgtgtgccggtgcccataattgccaattacattgtctccgccacaaaagtgaagcagcaatgatagttagtacattcatatataccaccggtatatataacggtttatctatggcgtcggttctaaatttttcacccagcggttttatgtgagcacttttgtagagacattttgcaaattacttttaagatcagaagttttatagtgtagagatattttatagaggcattttaaaaattgcctacaaacttttactctagagacgttttctgctctacttattagattttatcttgtagaggcattctttcggcactgtaaaatagcctgatatgtaaaggcattttcttgagacactttaaactatgtacagacacttgttacaatgataatgtgtactaaaggactatatataattaactaaaggcacaaacatacaagtaatgacatggagttgagttagttagtgcattgaagataaaaatgatttgtccaagtgatctcaagtttaagacttgttaaaagcaaagaaactattttattctcctttttggactggtttcatatatttgtgatataatttaatgtctctagaaaatgcctctaccatattatagatattttataaaatgtctcttcatttgaattcaccataagacacttattagacatttttaaaaatgtctctatagtattgtaaaggcatttgaaaagtgcctctacagcactagaaaaatgtctctacaaagcatttgtttttagtggtaggaagatttatggcaccaacagttgtaaactggcaatgtaccactgactgcagaagagagaggtttagtgtggaccaagtccagcgaggtggtacacggtaatcgatggtctacatcgatagaaactgatcggccgggcgagatggcataccatctcgcacgccactggccacacgggacgccatagaggacaggaatgtgtaggtggcgcttacatcacaatgcaatggcagccatgtcaacagataacctggtcatttatgtggcgacacacagcgtggtggcggacaacaagaatgggacaagtggaatgagtactactccgtcccagaaaaaagcaaatcctagctacgaacctatgtctaggttcgtagctagaattggattctttttgggacggagggggtagatatgaggacctcacctatctcaacaatgatggccggtgaagacagaaggcacgttcgtgagaatgaagaagtgctgaaaatggatagcatttactgtggtgagcagcaaacaggttcttctagaaaagctgtaaactttaagtaaagagtaaattgcatatttgcatcggtgatacacaatcttgtaaggtgaatgcaatttagtatataaaattgtaaaatattcgtttcagtacacgaacttgtctagtttatgcgaatgagaccaaaacagtttggcaatgttaattttatgaagttgttaacatcgaaatttcgtaagcccctaagagaatcaccacgtcgccaatagttggattcctgctatattcggttaaggaaagtaatctgttaaaggaagcttatccagaaatgactgatttcaaagaggatgcggcatggcagtttatctattaattaggtagtatatgttagtttccttttaaatttaggaaagtgtgtttagtgtcctataagtactttatgttttctttttatcttttggaaagtttctttcttgtcctataaggactagtatctccccatgggtataaatatgcacacccgatgtcaatgtaaactatctccacgatcaatacaattcagcgcatcaccaccttttaccttttctactttatttcatcgtccggcgggacttggcacttgacgcggggctgcatcactttccaatctccggcgaaggggtaagtccaatatgttccgccggcccagacaattgtatcgtctacatcggcgtcattcaaggctgcatcagtacattcgacctcttggattgctctggtttggttgatatatttgcctggctatttatcatatttcttagttaatctagtcttactatttcaatttagctctattggttgtctctcgctttagggtttctgccggtatcggctaaattattttactagattagattagctaagacttctaccaccataaaaatcagtcaacggcttgattatctagacattgtgtttttttcatacttagtgctgcatcagttaagtttgatctactaagtcatgtttacaaccataatccctagcctactttttgatggccaataagggtttcatcggggtttcagccgatgaggtatctggatattgcatcggcttacaaggattacatataagttggatttagccaatcgcaagaaaggtttcactgtttatgtaatattgtggattttatgatatcggacctccagccgatatatgctttaaactttggatcatgtcattgttagccgattgatttctactggattatattgttgttgctttcctgcattatcgtcagccgattgcctttagattgttatttacatcaagcatcagaatctacatcagatatatagccgatagttcaaaacactatcgctattggtcggcatcgactagaattaatccatcggcttgtcagccgattggctcattgatatgctatttgtatatcttgtcagttgcagggtcaaactgactggcacgcccgcatctcatcaacctttgaacctgcactggagctaagcagatctcctataccagtgtgtgttttttcgcatcaacagaagttgatgttgattagcgatgtgacgtgcatacgtgtagtgagtatgcataatacatgcaatatttataaatttggtctctactttatcctttatcatggaaatgatgaatttcctatatttttaactctgatatcactgctcgtttttttatatttttctagatcactatatcatattctattttttattgatgaggtgtacctctcagatatatgtttacatagtatcctaatctacccaaacaagttcatgtaccacaacgccatatagtgtcctttttgcctttctccgcacgcaccaaacaagttcatgtaccacaacaagcattatataagttcgtgcactagattgtacccacctagttcgtgtaccagtgatgcaatttactctaaactttaattgggagatatgcatacactactggagaagtaatctttagtcccgggttacaaaccgggacgccgaatccatagtcttagtcccggttaccaaccgggagtaaagttttttttcttttttttccattgtgttttggtacttgcatcaccaatgccgtcaccccaaatccaaacaaatcatccacaattcacaggcccatccacaaaatcatccacaatccacaaatcattcacaaatcgcatgcccatccaaaaaatatctacaatctataaatcatccacaaatctaaaaaaaatctacaacaaattctaaaaacaaatcaggagggcccgcacagccgccgctgcttctggcctgttgccgccgcttccactgggcacccgcctagcactgctcgcctcgttgtgtgcctgccgccacctgccgcatcccctcccactggatccggcggaggggagggcaccgctgcccgccgcggagatgggagaggtagaggggaaggggaggagggaattggaggagagaggggaggggaaggaggggtggaggaggaggagaagaagaagttggcgtgaagaggggaggaggaggaggggataaggcgtgcgagcggctaccaatgccgagataaggaagatagagagagancgatgtgggagaaagatatttatacctggttggtataccaatcgggattaaagatacaatctttagtcccggctagtattattaaccaggattaaaattgatctttgccaaaatttgctataggacactcaaaaaatatgtaattagctataggacaccataaagacgtgaatttatctgaagatactccaaaagtgtggtaatttgctgtaggacaccagacgcattaaaatataatatccaccctaatgatggaagagaaaccacacaaaatgacaattttgcccttattatcttcttctcccttctcccagctttctttcgatgctcactcctagcaaggtccatcggtttgcccatggcggacagcaggctagcgtcgagccgccacgcggctagccgatcacgccgccgatgatgatggtgccacccgtgccagttgtgcaaggcgttgtcgtgctgtccatctagccggggcccgttggcttgcatcgttgtgccatctatctggccggcgctcgctgacttcctgtcatgctacagctacaacccggcaacccggtgtacaagtagtcctcatactacggcaacggttgcggctactgctacggcggcggcggcgcgtgccgctgcggctcgtgcgcgggtggcaacaagccgatggccggtgggtactacggagtggcctcggtgatggcgtcgtacgaccaccagggatggtactacggcaattggcagccgggctaccaacagaagcaatgctacgaggtccccaacgccggatgcagcatgtgatgtgtggcggcaggcgcgatcgccatagatgggagcaatccgtgcgtgtggtcattctcgctcatactcactcatcactagctcatggccagtgttaaaaaaatctttctttttttttgccaatgccccttttttgtttatttagggtttttagttgtgtatgtggacagttgagttgtgatcttaagccgagtggctgtccgccatgggtaagccggtggagctcactccaagtgagccagaagaagacttggaggaggaacgagaaggggaaaactgtcattttatatggtttctcactcatcaactaggtggatattatattttaatacgcgcagtgttctgcagcaaattaccacatttttgaagtgtcctcgagcaaattcacatctttgtggtgtctcagctaaatacatattttgagtgttgtatatcaaattttgccttgatcggcagtcccttggtgttatcagccaggactaaagatcaaaaagtaccgttgggcttttgaacctggattaaagatattctttagtgccggttcatattcaaattgggactaatgtgagttttgccatgcggacaaagatcaattcttcagcggtgatatttgctgtaaacttccgttatattaggaaagagccaaatctcaaatgtataaagttgtaacctctttatacttgatgttgtatccagcagaagaaaacagttttctttattgctgctaccaaaaatatattataatacgagttcacacaatatatacagcctaaaacaagtttctttattgccgctaccaaaaatgcaatatgtcccatatatgtacagatacatagataaattgctaccaaaaatgcaatatgtcccatatatgtacagatacatagataaattttggttttttaagaatggatggagtacatattttgttaaaccggcaagcacatcatcaaccgccaacagtttctgcaaaaccactatccgctacagtacagtttaaacttgtcagtggaaattatatattgtgctgagtgcacacaaaaatgcaattaggagatagcaaactcatactaacgattacctagttgcatgtgtcccctagcattttttttgggattaatcctattaagtcccatataaggatttgggtatgagaggtgatggagatatttttctatgcattagcttgcttatagcttgaagggcaccaaacaaacttttctgtgatatgctttgactaatttcaaattatccccaaaattataaatatgagtactctagcactacagacgcttcgatccattcaagtataaatgcaaagattttttttatatagaggacgtcaagctcaaaaaaaaaaaggaaaatcccaaaacgagtaaacaaaacaatagaataatttctcaacatgcaacgagtggattaacattttcattcaaaagttactggaagttaatactactactagttactgtgtatatgcagtagtacacatgttagtagaggagttgtgtgtctagagagtaggagggagcacaggagtaggtaacagaggaatatatgcacaaatctgtgccggtatcatcatcacaagctaagtggatatttgagtgaaataaggataacatattttttgcagaattaaaaacagggaaaaaataacagaaatgagaaaaaatcacgaagaagccaaagaagaacaacatcatcagaaaaaggtgtggtacgttgggtggtgcagtctccagtctccagattcccgctccttgagttgatgctcgccttaggcattattcattttgtaagggatcggatagaattagaggggataggtaacactactatagatataaaataaatccccaccaatccctccgtcatatattaaccactagaccttgtcagtagtgtcttgcctgactacaacacctgtcaatgcatagctggcttgcatattgtcgctaggtagccatctcgccgcttttactcgccatgaactgccagtcacctcatgccatgggactgttggagcttcctatagttcctctattcttctaattaacctttatttaatgtaaattaaaacaaactatagcaattataactgttaagttcaacagcaagttaaaaagaaaaataagaacatatggcatcaacaaaaaaattatatatgcctaaactgtgttaattaatctctgggtaaacaattaaaccaagagtcgcttcttttatcaaaatagattgttgaataagcataatgtagtggcaagcaggtagcaccttcaacggccatatctgttgtgtccacgagataattgcaatgctgggagacggtggattagatgagatcgctagctagttaagctgcattttcctcgtgatctggaggaggaagaaaaggttggcgccatcgccatggcagggtgtagagaaataactttatgcacgttggacaaactcatgtattccagctccagtgacccgaacttaaggagacgttttgcctccctccccaccacaccaccgccgggagcatggtgcagcgtgctgcaaccaccttcgtgccactcaggtgcacctggtgcgcagctcggtgatttgccttgccattattgccaatgttgggatacgcgtaggctacgatagtataaatcaaaattttctattgcataaactaggaaccatgcaagtattagatcatagatcgttaccactcgacgcgctgcgtagcggaagaagacgctgagaagtcgaaggaactctcgcgaagtagcgcactcgatgtagaggaagtagtcgatcgcaccggctcgaccttctcctcctcgtgcattctcctcgccgtaatcccacgccgatcagcaccgcaaaccagcggcgcctctaccggtatccacacgtacagggacggaacgccacgcgcaggtgcgctagcacccgcacgcggctagggttttgctcggggagggaagtgacggctagggtttctcacgtgatgcaatgcctccgccgatcacacccctcatgaacttataggatccatcactcaggcctccaaagcctgtaggactcctattcggatccctatccgaattaagctcatattcgatctccatccaatccccttattccggcccattaaacgtgcaaccctgtaggttcatatatactcggctgtaacacgaactccttttcggtccatgcgtcaacagtggcccctagcagaacgtattgacccaccgggcatacataaagatcatatcggctgaacctctagtgtatacttgtatgaacccatttgcctcacgatatcgattaagctcaaggctagatatgtgctatcctctaatagctcaatcattcactcgaacctattgatagattatataacttgtgattgactcctcaatcacctttggcatggacatgcacttccataatctacaacaacgaggggcccagagatatctctccatatgaggggcaaatcctatcttgattattcatatcccactacatgttttatagcatacctgaaaactacttttataactacccaattacggagtagcgtttagcagtccctaagtaagctactacacatgttgggaaccatgataatctcaggtctaaggattcaacaccaacactaaatgagatcactgatgacacaacacatatagctcttgcagtgtctcatgttgggtctatccaacaacatgttcactaacatgtgtccacattattaatttggtatctctataccatgatccatgagacatgatcatcaattaatacatgtgctgatcatctaagcatatttattccacatatgatatttgatcaaggatcctttagaaatagcaacacacaacataaagagtctgatgaaagaatcacatattcattaaccaataatgagtttatctattttaaggaacaaagtcggataaatatgtaaacatagtgtgtgtgatacaatcatccctatgattgcctctagggcatatcactaacagtctcccacctgcactagagtcaatcatgaacgtatcttatacccattgccctactatgtgcctcatgcttaggctgagggagtggctttgtcaacggatctgcaacattcaaatccatatgtattttgcatatcttcacatctcctctacacactatctcgtaaatgaggtgataccgccgtaaaatgtgtttggacttttgatgcgatctaggccccttggcttgtgcaatggcaccactattatcgcaatagagatccatagggctagaagcactagtcatcacacctagttgagaaacaaatttctttatccaaacagcctcctttgctacttcagaagcggcaatgtattcagcttctgttgtagaatcagccactgtatcttgcttggaactcttccaactcacagcgcctccattcaggcagaacacaaatccagtctgcgatctaaaatcatctttatcggtttggaagcttgcgtcagtgtaaccatttacaacgagctcttcctgtcctccatagactacgaacatatccttagttcttctcaagtacttcaggatattctttacagctatccagtgactctcacctggatctgattggtatcggcttgttgcactaagtgcatatgaaacatctggacgtgtatatagcatagcatacataatggatccgattgccgaggcatatggaatcacactcatcttgttttgctcatcagtcgtttgaggacgctgattcttgccaagattaatgccatgtgacatcggtaagaaaccattcttagaatcttgcatgttgaacctcttcaacaccttgtcaatgtatgtactctggcttaatccaattagcctgtttgatctatctctatagatccttatgcctagaatatatgctgcttcccctaactccatcattgaaaaaccatttttcaacgatgtcttgacggattcaagcataggaatatcattcccaatcaataatatgtcatctacatataggattagaaacaccagtgcgctcccactaatcttcttgtatacacaagactcttcttcgtttttgacaaagcccaacgccttgactacttcgtcaaaacgaatatttcaactccgagatgcttgcttcaacccataaatggatttctgcaatttgcatatccttttagctgattgtggatcaacaaatcccttgggttgtgtcatgtacacatcctcatcgagatttccattgaggaacgctgttttgacatccatttgccatatctcacaatcgaaataggcagcaattgctaaaacaattcgaatagattttagcatggcgattggcgagaaagtttcatcataatcaacaccttgaatttgtctaaaacctttcgccaccaatcgtgccttgtagatgtgaacatttccatctacatctgtctttttcttaaagacctatttgcactcaatggcttttacaccatcaggtggatcaaccaagttctaaacttgattgacatgcatggattctatttcggatttcatggctccaagccatttctcagagtctggtaccaccattgcttcctcataggtagtaggttcatcgttgtctaacaacaatatatcatgttgtctaacaacaatatctcatcagagtttagctttctcttttgaccactcttcttgtagttgggcttgcgcttatgcataaccatcacatggttggagtttttcttaatgctttcctcggcagtctttagcatcccatgcaattctgccaaggtcctgttcaggttgttcatgttgaaattcattgtgaacagctcaaagctgggagggagcgactggagaatcaaatcagtagccaactctcggctaaggggaaaaccaagcttatccagactctcggtgtaaccaatcagtttgatcacatgtgggctcactggattaccttctgcaagcctgcacgcaaaaaaggactttaaggtattaaacctctcagctcttgcttggtcctcaagcatgttacatagtcccgtaattatcgtatgaacatccaatgcctcatattgcctttgaagctcaagggacatagtagcaagcatgagacagcttatatcaagataatcattgcatcgcttttcatgctccctatgttgagcagcaggagcattgttgggcaagtcagctcgaaaaggctgtgtaagcacaaactctttgtgctcttgcctgagaacaattctcaggttgcgataccaatctatgaagtttgttccagtcaacttctctttctcaagaatagaccgcaagttaaaactggatggtgcaggagctgccatgatctacaatagaaatatatgtatgcaaaatccgcaccatgtttacatttaacctttcattaaacaatttaacaaaagatactcccactatgtattgtgaaacaaaattccctctagtaacatagtgagtcaagatcctcattttgttagtgtctagtgagctttggcatcacagctagacaactatcaaaataggtaagcaacaccttgctaatcacattatatgtgactcttgtgctattggggtgacatctccatgtccaacccaacctatgccccaaggtccaaaactgttttgataaccttgtcaagtaaaccaataatctctgcatatagatgtgcaacatctatcctattttatcatgataaaaagtgacagtttgctatggcaaacccatcacttattatcacaaccgtaatagatgcaattattggaagagcataaattacacttaatttttctgagggaatctatcctaccatgtcatataaaatatataacaacaataaagtaagacagatataaaaccccaagcgaaatctaaggggcaatgcacacagcggtcccgctagccggttagcgggcagagggtcgagggggggagcatagatctgatctacgattctccatgtgaaaaccttaacggcgtaatcaaattatgtcgaaaccgagtcaatctcattggctcgtttttctcattggcgtgcggttccagtggacatcggactatccgatgaacacaatcgcgctcggccttggtgagtactagacattccagtgaagtcaccaacacacgtaccgattgatctcatcaacccatgcggctatcggtttatctcatgttcggatcacctaagaactcatatacaacataatagatctcatctactacacccgcatatcaattatatgcaatgatctagatcataaactatacaaggcggctctgataccactgttgggatacgcgtaggctacgatagtataaatcaaaattttatatcgcataaaccagtaaccatgcaagtattagatcatatatcgttaccactcgacgcgctgcgcagcggaagaagacgctaagaagtcgaaggaactcttgcgaagtagcgcgcatcgatgtagaggaagtagtcgatcgcaccggctcgaccttctcctcctcgtgtgt

SEQ ID NO: 16655 - DNA, 23790 bp, Oryza sativa
  unsure (1)..(23790): unsure at all n locations
tctcctcctcgtgtgttctcctcgccgtacacccacgctgatcagcaccgcaaaccagcggcgcctctaccattatccacacgtatagggacggaacgccacgcgcagatgtgctagcacccgcgcgcggctagggttttgctcgaggagggaagtgacagctagggtttctcacgtgatgcaatgtctccgccggtcacacccctcacgaatatataggatccatcactcgggccgatccatcactcgggcctccaaggcccgtaggactcctattccgatccctatccgaattaagctcatattggatctccatccaatccccttattccagcccattaagcgtgcaaccctgtaggttcatatatactcggctgtaacccgaaaactccttttcggtaacatgtgtcttatgttggctcttgcagtgtctcatgttgggtctatccaacaacatgttcactaacatgtgtccatgattgaaccattgatcttaaattctacttgagcctaattaaatgtaggctcagatcagatttcaaattcttcatccaatttgaaacagaaggctgaattccttcgaagatgagtccatttctttctttccaaatattccaagttgctaagaggaaaatctccatgaaacactgatacgtgaaagccaaacgctgagactgaatcatttgatgtaactccaatgaagtgtcccagacccaaccaattttgatccaacatgccttactgaaatcacaatgaaagaaaatatgttcccttgtttctcttgcatcaatcaaacatgttgaacaaaagaccgaagtatttggaggagcacagtgctttctgtccagtaggtctctagtgtttacccgatccaagagcagaagccatccaaagaccttaatcttcatattaactttacattgccagatccattggagtgtcagtgggggtgtcagtgaccaaaagccaatcttatagaggtgttgcgaagtatacattgcagacccccaaatatatgtccagccatcatttacatctaaaagggcagtagtttggacatcagccaagagaacattgtactcatccaaagcctgttgagacaatggcaagaagaattgatcttgaggttctctcgccaagtgctgagaaacagagtcttccttgtgtcttgcaaacgagaacagccttgggaatttgacagatcttaccataccattccatagatcatcctaagattggtttagcaattcctttgaacaaaacatcaaactggaacacgtccttccaccaaaaagacccacagcttctagctgttttaggaaccgagttgggataataagttgtccagattaaatttacccatgggacctgagctctattataaaatttgtgcaagtgcttcatcagaagagctctattttgaattttgagatcaataactccaagacctcctttatctttttggtggaattaagatcatttcctctccatagacaatgtcttctggctctatcaattgattcaatcactgagactgggagtgataaatagcacatatagtaggttggcagagatgataacactaaattaaccagtgtaagtctatcaccatatgaaaggaaagctgagcttactgttaaccttctctcaatcctgtcagttagaggggaaaaatccaccacctttggcttagtcgttccaagaggcagacccagataagtgaatggtaaggagcccaatttgcagccaaaagtagaggcaagatgattggccttttcttcagtcaaattcagggatcatacatgacttggagtaatttaccttaagccctgaggagagtgcagacgaattaagcatggcctttagggcaaaaagttggggagcagaagcttccaagaagataagagtgtcatcagcatactgaattattggaatgttctcatcaccaattacaggtataggaaacttcaggattcccctaatatgcgctttattaatcaaagactgaagtagatctgctcccagggcaaataaaagaggggataaggggtcaccctgtcttacatctctcttgcatttgaaaaactttcttagtactccattcaatagtataggagtagaagccgaagaaaagattttagtcatccactcattccattgagaagggaaccccatagcagtcatcacctttaaaattgtatcatgctcaattgtatcaaatgctttctcaaaatctaatttcaagagaactatttccctctttgaatgtttgaactgatgaatgtactcaaaatcccaagctaagcaatcttgaattgatttcccctttataaacccatactaattttggtgcaccaacttggtcatcaaaatttggagtctgtcagcaaaaattttacaaagaatcttcacagacaagttcatcaaagaaataggcctgaagtcattaggggtttgaggactagtcttctttgtatccatattattaatttggtatctctataccatgatccatgagacatgatcatcaattaatacatgtgctgatcatctaaacatatttgttccacatatgatatttgatcagggatcctttagaaatagtaatacacaacataaagagtctcatgaatgaatcacatattcattaaccaataatgagtttatctatttcaaggaacaaaatcggataaatatgtaaacatagtgtgtgatacaatcatctctatcattgcctctagggcatatcactaacagccagctccctcagcttcacttcctgtgcagcgtccactcctcggcgtgctggagccagaaacggaagatgaggcgtctgtcgtctacggcgaacagcccgattccgccggaatcgcgcgccatctccatgactgttaagctccattctttgttgtacacttcagctgacacccgcacatacctgggtagctccaccagcgatcactccatcgtcttgtgtcgagcatcggtgattaactaatcattcattttcatttagtttccaataaaatggcctagcattgatctgaattggctcttatctttatacattagatgctcaattatcatgtcttcatgcttacgaggtttgttttgcttagcatagtgttgcaaaagaaaaaaatgattttctttcacatagaatatctacactcggtatgccatcattggtgagatttttttagttttattttcccatgcacattggtgggatggaagttcagcactactggtaataactgtttaatgctttttttgatgaaatgtaatctacaggtttatcacattccatatatgtctagattgacaccgtgttatgttaattagattcagtaaagaaaaaacctactgggtaaactaaattgatttgcacggatttcagttcatgtaccaaggttctttaaatgaaattctgtgttaaatttggatatgggatgtggtaccttttctcccagagaatacttcagtataatagctctttttcaaatgaggtaatgattatcagaatagttttttgctttcctaaaaaacttatcagttatagataacacatgtatggagttgcaagttgcagtgagcaattgtctgaaactgaaaccaaggcataatgaagaattcaaatttcaaactgcgctaagccctattcaccaaaaataagatatgctacaaatcaatatgtaccgaccgtccattcctcatgttcaacagcgaaaggaaaacaaggtttaactgttgcttttgtttatatattagtattgtagcttccatttatatatttagatcatgaaactcagtgtatgttgactacccaaatttgatttggttccatcaatccactcaacataactaggataagagtactatgcttcctgctctacaacatataatatggcccttctagcatactccctccgtcctataaaaaatgaatatagggccggatgtgacatattctagtacgatgaatctggacagatgtatgtccagattcgtagtactaggatgtaacacatctggtactaggttggttttttatcggatggagggagcatgtactattccctccacgctaaaatataagtatttttagcataatatcaagtcaaacatttataactttgactattaatagcaaaaaaaataaaaagatcaatcatgtaaaattgatgttactggatttaccattgaacaaactatcaaaatatgcaactatttttatttaaaatatcttatttgtatagatattgttggtcaaaatagcatctcaaaggttgtgttcaagtaaaacaaatgcttatatatttcgatggagggagtagaatatacaagctatagtgttacttttctttatgtgcagatttgtacggcaattattctatacatctagaaattgataaaaatggaaggaatatgtcatatatttcataaatctaggcttagaattcattttcttttttccaatatgtgcacattttgtgctgccttcaattggacgacttaggtttatttctcaaataatcattatttgtaaaaaaaagattttttaaatttatttagttttttaaccttgttttatttgttttggtgtgtcatgaatttcaagtgcctagatactaattaagtgtcaaaacttctcattgttagatttcttgtgtttataatgaattgcaagtttatgtaaaagcttgcaacatggagtaaatatatcttggccatgagaattttttcacttgcattgttgatggttttaataaagatattctctaatctttattatttcttattggtactacatatctgcaacacattctttgtagcgcatatttttgtgtccttgaagtaccgttatgcagctctctgactaaacgtgttacaaacgtgtcctggtatagcacatatcatgtactgtgctatctatcgttacacagttcttaacgtgttacagatatctgttacaataggcctgtcttgtggtagtacagtagaacaaattaaagaaaatacacaacatataaataacggaccacacattgcaggccagagatttagtcactctgagtgctcttcaaaagtcagttataatatatatactttgcgtccagcaatggctaccattactaacaaatttgggacatacaaaaaactatcgaaaccctaagcttgccatagtgacaagtttaagttggtgtttgcagcaagaaattctaactaaacaatttgtttgttttgacaaaacctaactttttgtataggtcggctacaaagcgttttcccaggcggtcaatcggatttttgcgtgcacagcttcggcccgtctggaacaaatcgtctgggaaaatcatgattttcgtgtgcgggtggcgcacccgcatgcgaaaaacagattttcgcgtgcggttgcttatgacgtccgcacggaaaaacaaaaaaccaaaaaaaataaaatttcaaaaaaaaaagaaaaccctagatcgggtcatcgccgcggctcccacctcgttgtcgtcggcggcggcgtcgctgctcccgcctcgtcgccgtcggcggtggcggcgacatcgcctcccgccggcctcccacgtcggatccgtcacggggggagggcggccagcagccggatccgtgcggggacggccgcgggccgcccgtcgtcaccagcccgcccgccggatccgccgcccgcacgctctcgtcgctgccagggaggggaggggaggagctgtggccgcccgtcgtcaaccgcccgccggccggatccgccgcccgtgcgctcccgtcaccgccggggaggggaggagccgcgaccaccagtcatcggccgcccacccgccggatccgcagcccgtgcgctcccgtcgccgctggggaggggaggagccacgcccgcctgtcgtcaccccccccgcctgtcggatccgccgcccgcgcgctcccgtcgccgccggggaggggagaggaggggagggcacccggttcccgccctggatccgtggcggggggaggcggcccgccccccggacccatgcggagaggcccgccgccgccggatccgtgcgggaacggccgacgccagccggatcccccgcctcccccgccgcgccatcgtcgctggtgccgtgccgccaccgccgctgccacggatgccgccgcctccgcctcgcttaccgagggcgcgggcttcgccgaggagggagaggggatggggaggaggatagagagagggagagggagagggagatggatggagaggtggttgggagggcgagcgcggggggagagaataaggcgagcgcgtggggagaggataagggtgagcgtgtggggtgggctatatttgtgtgcgggccacttaacaggcccgcaggcgaaaataggcttactttcacgtgcgggcctgttatgtggcatgcacacgaaagtagattttcctgtgcgggcgacgttctgatgcccctttttcatttttctgtgcggttgcacttatgggccgcctagaaacacactagtctagtgtccatgaaaatttttagtgtagtagtgttagatgttaattaattattataactaaaagcatatgtgtcactagttagcacatgcatcaatcccatagaatcaacactattaattatgtcgaaatactgaactccataattttcataagagaaattaaaaaaaaagtatttcttccacgaagtaccaaacttgtcacagaagcaaatgactgaaatgtccagggaaatcttaacttcttaacttcttaagaataccatggatactttgtgattatgaattagtttttaaagcaaaaatatagagcccaaacatatgatctagggagcacatcaatgccttttctaaagatgcatcttcgagtagtcacattgactacacaaaaccatgcggaagctgtaagggggattctggacctttccctccagaggcagacgtaccagaacctgtgtaaaaatgaaacaagcatatttaattaattagtgaacaagaatgtatatcttttctgaaacaaactatatagatctgcaatattttcaaatgaaacagtgcaacaatcaaatatatagcaatatatatagatctaataaattgtagtttgccaacagaatgttctttatcgcaaacattaataattaaagaagcacacatgtctcaaagatagaacactgatcttttcagaattagttgccagtgcaaccactcacaggtggaccaaacacaagcttaaacgagattagacatagctcaacacaggaaaataaaagccatcctagtgatgtgagatctcactggtggagaaaccatctttcgtcggtcggcctaattccacaatagtcccgattgcaaccaaaaccgggactaaagatgatctttagtcccgattaaaaagggtaacgggcatatttgatattttgtcccggttggtaacaccaaccgggactaaagatcatcttttgtcccggttcaaatgctgtcaggtcttggcaggccccctcgggatctttagtcccagttggtaactgcaaccgagactaaagatcgtaactttagtcccggttggtgatcccggcgatctttagctccggttcataacaccaaccgggactaaagtcccacccctatatatatatcttcttcctcctccagcccgagcaagcttcaaaatttcttcaaaaaggaggggaggtcatgccaaaatttatagtgaatttttttttgtgattatatacaaatcggaggtgcctaaaaggttagcaacttcatcctccaatgtttttttgtcgtatgacatttggagctatgttttgcacacttttttgtctccaaaattttgttgttagttgatgagagagaaaattagtgtggggaagaaaaaatatatagaaatttagtttatttgctaaagaaggttttataaaatagttgagaaggaaaatatagtgaaagttaatcttgaataatagaaaacaaactaaaatgaaaaattaaaataattacaacacattaatattagtttaaaactttataaatagtaaataagaattatttggtgtaatatttcataatttttgtatgaataatgatatgtcattattgtgtgactgttgaaagagtatgtaattattttataattattgtatgactgtcattattgtacaaataattatttatgtacgattttttttcatgtcatgtagatggatcggcaatggatgtacgctgaccggcggtccaaagagtttattgacggcgtgcattattttttgagagtggccaaagctaacaggcaaaacggttttatttgttgtccatgcaataagtgtaagaattagaaggagtattctgcatccaggactattcatttccacttgtttgagtcgaggttcatgtcaagctataattgttggacatcccacggagagcaaggggttgaaatggaagaagatgaagtggaagacgacaatattccggactttgctcagtacgctggatttgaaggaaatcaaacgggcgaggcggaaagggatgctgatggtaacgacgttgcggatgatcttggtcagatgttgcaggacgccaaggaggactgcgaaagtgaaaagggggcccataaattagacaagatgttagaagaccacagaacatcgttgtacccaggttgcgagcaggggcacaaaaagttggataccactctggagttcttgcaatggaaggcaaaaaatggtgttagtgacaaggcatttggcgatttattgaaactcgtcaagaacattcttccggagggaaacaaattgcccgagacaacgtatgaggctaagaagatagtctgccctctaggactggaagttcaaaagattcacgcatgtccgaatgattgtatcctatatcgcggtgactagtacgagaacctagaagcatgccctgtttgcaaagcactacgatacaagattagacgagatgatccaggagaagttgacgggcagctaacgaagaagtgaattcctgctaaggtgatgtggtatttccctataataccacggctaaggtgtttgttcaggaacaagggaaatgctagaatgatgcgatggcacactgaaaagcgttaacaggacgggatgctgagacaccccgccgatggttcgcagtggcgaaacatcgacagaaaatttaaagactttggaaaggatgcacgaaacatacggtttggtttaagtacggatggcatgaatccttttggagagatgagcagtggccatagcacttggcccgttacgatgtgtatctacaacctccccccgtggttatgcatgaagaggaagtacataatgataccgattataattcaaggccccaagcaacctgttaacgacatcgatgtgtacctaagaccactggtcgaagatcttaaactgttgtggaagaaggaaggtgtccccgtgtgggacgaggacaaacaagaggagtttaacctacgagcgctgctgttcgtaaccatcaacgattggcctgcacttagcaacctatccgggcagtccaacaaggggtacaaggcttgcactcactgtatggatgaaacagaaagtacatatcttaagcactgtaggaaggttgtgtacatgggtcatcgtcgattccttacagcaaaccacccggtacggaagaaaggcaagcactttgaacataaggcggaccaccgtacgaagcctaaacatcgcagcgggaaaacagtgtttgctatggttaaagatcttaaagtagtgtttagaaaggggcctggcaaccagcctatagagagcgaagatggtcacgcggcgatgtggaaaaagaactctatattttggtagttaccctattaggaattcttggacgtccgccacgcaatggacgtgatgcacctcactaagaacctttgcgtaaaccttcttggcttcctaggtgtatatggaaagtcgaaagatacactggaagcatgtaatgatctgaagcatatggaacaatgcggtgaccttcatccggaaccaaaggagaaaggaagccattacttgagtctagccagctacactcttagcaaggcagagaaggaaagtatgtttgcatgcttggagagcttcaaggtaccgtctggatactccatgaatataaaacgaataataagcatgaaggagaagaagttcacaaatctaaagtctcttgactgtcacgtgttgatgacacaactgctaccagttctaataaggggtatcctcccagacaatgtccgggcaacaataacaaagctatgtgctttcatgaacgcaatttcacagaaggtcatcgatcctgatagattagaagccctgcagaatgatgtagtgcaatgtcttgtcagctttgagttgatatttccaccttcatttttcaatataatgacgcatctgctttgtcaccttgtcaaagagatcggtattctcggtcctgtgtacctacacaacatgtttcctttcgagaggtacataggcattctgaagaagtatattcgtaactgttctcgtccaaaggcaagcatcgccaaggggtatggaacagaggaggtcattgaattctgcgtagaatttatcgaagaccttcgcctaatcggggtacctgaatcacgccatgaagggagactacggagaaaggggactctcggaaggaaagcaataatgatggtagacaacaatttattccgtaaagcccatttcacggttctgcaacaatcttcattggtggctccctacatcgaggagcactaggctctagttcgtgccagaaacatcggtgagtgcgatgcatggattacacggcatcacattgatactttctccacgtggcggagacaacatctcatgggtaacgagacgattaaccaacaactggtcttactggcgaggggaccatgtggcccccacaccgggtccccacgccgccgacgggccaagccacggctccccgacgccagctgcgcgcccgcacgccactggcgngtgcgcccaacattgccaaacgtgaacgaatgtgattgaaacgtgaccgaacgtgaacgaacttgaacgatacgtggacacccttgaacgaacgcttaacgaacgtgaacgaaaagttaacgaacgcgaacgaaacgttaacgaacacgggtaatataatgccatctattccaaagtcgcggggaatctattgctattatgttgatctcaggtaataattaattaatcatagcttgcaactgcaaatgtagggcttgggatctgttccgtcaattggtctgcgggacttggaaagaaaaacttggacggaggtttcattttccagtgagtacatgcatgatccaaaattatattgaattgaatctctaattatagttaatataaagagtatattaaatctctcatcgtttctcatgtagtgtgcaaagcaggatcagggaactaactgatgcggctagtacgtatgcgagtatgcccactgcctatcaaaccaaatatgcacaacacgagagctcgatgtacgtatacataaaccattcaaaatttcattgcgtatcgatttgttaagttgtttattaattttatatactgatacgtcattatttttcgaatgatagcgtattcacatgagtgataatctcccacaaaaggattttatcacggctgttcaagaacaactgatgggattcatcaacgaagaagttcttaatctcgatggtgaattctactacgacggatcgacaattcataacgtcggtccttcctcttctgatataacgccgccgtcgaagtcatagctataactactgagcaaatgaattgtactatatatgcatgtatatatatatttatatatgtacacatttactttagtgttaatatatattttggtaacatatatgcacataaaatgttaagtgctttaaattatacatatgtgtgtgtaattatacatatgtattgttacatatgtatgtatatatatatacatatatatgtatatatacatatatatatatatgtatatatacatatatatgtatatatagatatatatatatacgtatatacacatatatatatatatacgtatatatacatatatatatatatatagagtatatatacgtatatatacgtacgtatatatatatatatatatatatatatatatatatatatatatatatatatatatatatatatatatatgcaacaaacaggtacatgcaaataaaaaaaatggtgcaccgatctttagtcccggttggtaacacaaaccgggactaaagatggttgtggccgcccacgtggatgaccgatttttagtcccggttggtaacatgaaccgggactaaaaatcgatctttagtccaccggaactaaagatagctatctttagtcccggattcgtagtcctggattcgtagtcccggttggacaaccgggactacaaacgatttctccaccagtgtctgcggcggacccacatactctttcaaccacttgcagctggttaaaaaaagtttcatcttgtatttgtttaaagagtgaaatttcactttggggcacattttatattacccaagtttcatggaataaaatgaaaatatatatagcatatatatcattctgattcatcatccagagctaacaatgagtagtaaatatttttaaaaaaaacaacaatgcgattctgttatgaaaagcacattaattacctgaatttagagccatcgtccttgttgtacgaggtctaccacgaccgcgacctgtgtgcgcatgtcatagcagtccgattcagtgagtaacgtttccccatagcatgcagttacgaaattttagaaaatatatacaagctagcaagatgagcataatctaaaatatcatgattgttacaaatgtagatatatataaataaatattgttatatatattttttctatttattgtttctgtcagtattactgattcagttcaatcaaatatatattttaatcatactgcaggtctacccgtatataattcatctaaaacaaaattcatatttgccaaagtcaattattagtaaaaatgaaatggtattcctatggagttattaattccaagctgcacagattgatgatatcttacccctgctaggaacacttgcatcagcagatctctgtacagacacaatgtatgagaatcagtatcaaatttggaaagagaaattatgtagaatacaatatttgaaatcaactctgttgtagtagggcaccttctgtagaatacatggaactttacggattataaccttcccagtatctagaaaagatttaacttcaggctttgagcgaaatttatgattgtaatccttgtggcggtaatactgcgaagtaagaaaaagttcaatttcacttaacatacgaacaacaaaataaatttagtataagcaagtatatttcagcaatatccaatctgcattttgttttcttttttctttgattggaaggggatgggagggaaaaacttatattgccattgcatcacatgtatgaccctagctaggcacccaaagctaggtgcaattaatgattcacagtatagaggttttgatccaaattaaatttgtgatgttctcgcttttcatattgatagaactgataagtgagattaatgaattagcaagaagatatattattgatgggcaacatactttgttttgatagtgattatatgaaaaataaataaagtcaaatatattatctgtatgccaattatactaaaggtagctatcataaaatagtttggttttgtacagattacttttcctaaaatgagtcctatgttttcattgagcattataacacagattgtgaacactccataagtgatataacacttttttcactccacacaaattatcatgtcatataaacaagaatatgttttaaaaaggaatgaaattttacaaaccactcaatcctgccacaagttattactaggtaaagaactatgcattcccatggttcaatgtaatatattggccatatgtgatcatatggcaccagatatatgctatcaatgcaagttgttaattaccatgattcaactgtagcataagaagtgtttttgctagacaagataaaacttaaccttcagatttaatgaactactgaatgtgggtaatactcacaaccaagaggtgtttaaacactaaacctgtttggatttgaactattccaagtttcatgttttatattctagatatacaaagtataaatgttttagaagagtacacatgtttggtttaacacaaagaaataaataatatatatatagcttatttttcgattattattcgtttagggtaaacatataacacccaacggagacttttatgtcaaaatctcttgtacattttatcattttcagccgatctctaagatttctatttcatgtgtacaatcacaagtacttacagaaatgttgatgctggtaagatatagaatcatatgtattacttgttatatttatgatagggctggttatctttccctaaaataatgatatccaccctaacgaagcacatattaaaaaaaactgctttcatgatatactcataaaattgggaaagaatacatgtaactctttaatttaatcaattatgaaaattcatggaacaaatataatcgatcaacatataacatgaattcacaaaccttgtccttggttttttgatcatttcgaagatggatctcgacgacccagccatctggatcaacctcatgttttctgggatgaaccttccatgattcaggaatatccttatttgttttcgcttgtgttttctctgaggacaacaaaaacatcccagagtttgcatctcgctggtgaccactatttgctccataactattgccaccacttagaatcctctgaaagtatataaccattgagaatcatcaaccgtccttcattacaaggtttcgtgaatgatttaaattaattcatgtcataggaaatatatggctcaaacatcactgtgctggtctacacttgagtgcatatgattctctagaaatttcaacgattgtatcttttttatatttacatatgtaataaagatgttgaaatacatgtcagattgcaggacaatttaacataaataatcagggaagtaaaaaaaagccatggagcataatcatgtcgtgttagttttagagaaaaagtgagatcaaaattaatagattagagttgcttatttcgcaggagatcacattgagctggatggagagaataacttagataaagcaccatttgtttgttattctcatcaaaactaatggattgcaattattttagtttgatgaactataaaaagatcatggacacacacaaaaaaaataaggatatgataggaattcacgaacctcaggttgaaaccttgcacttttctgtctttttccttctgggctcaacccagaatctacatctgagaaatggtgagaattgccagcactatttgcgatcttccctaagccagcacttccagttctctcgctatcggtttctgaatgatctgcttcatggcgattagccttacgagaatccacctcctgatcaccatgaccaggatgcacaaatattccgaaataatcatcggtgacagttctctcactctcactgctactcttgcttccatcagagccatcatctgaataccacgcgttagctcctactactgcaacacccttgcctttgccaccagtagaagatggaagacctgatcgtttcccctccatggctgccctagctaggtctatagaagcaggaaacaagaagagaaggggagagagaagagatgatttggagaagaagagaagattcaactaggggtagatccaggagaatatatatatatatatatatatatatatatatatatatatatctatatatctgagcacgttcatatatatctatatctgagcagcaaatggcaagcatttactgtggtgaagacagaatgtgcccgttggtgacattgaagtagtgctgctgaaaatggctagcatttactgtggtgagcactgaacaggttgttccagaaagactgtaaaagctttaattagaaaatagctaaatgtcaaataataaagtgggaaactctttacacgtgtgggtgtatccagcacaagaaaacaagagtttattgttgttgccaaaaaagtattatgggacgcgttcacactatatatataccgtttaaagctactttcttcattgccgctaccaaaaatgcaatatgggatgcgttcgcacaatatatatataccacttaatttgtacaccctttgtcccgaaaaaccacttctgataaatagtctatatccagatagatagataaaatttggtttttttaaaggatggaggaagtatttaggccatcgtcttgacgatctagacaagatcaagacgttataccatgggttatcgtccagtttagggcctaaactggtgaattagaccgtttgatcatctaatcggtcaaatattggtttaaatcgtgtaagcctggcaattagacaacataaaaacaagtgttgaccataaaattgttatctagatcatagtctaggtaatgaaccaatgcactgttggtatgtcaggagaaacctggtggccctcccaaggactatatagctaagggttttaaccccagctaaaacccttctccactattcttagacatgtcgttctcacgaagtcacgccgtctctcctcagctagttgtcatcgtggactttcctcccacctccctctggcccatgactacaccagtagcttccctcatcctagcgtcgctagttctccatcctccctcaggcccatgactacgccggttgtttctcttataccagcatcgctacttctccgatattttatgaaagatgttaagtctacctatataatcgtcaaaaaaatatgcctgttgtatgttgtacaatatatcgtacagaccgtctagacttgcgcctagactgtctagactctagaccatgggttattgcccgtctagcgtcagtattttgttaaactagtggcgagacactagtacaaaagtaatttgtccagacgggccaaaagtcgttttcgcgtgcggacctccggctcgtctacccggaagggtctacgaaaatctaatttttccatgcgggtggtgcacccgcacaagaaaatcggttttttgcgtgcaggtgcttagttcgtccgcacgcgaaaacaaaaatccagaaaaaaataaaaccacaaaaatcgccaccgcggttgtgctcctcacgccaccactgccggatatgcatggattcgggcaggggacggccgccatcgcgtggtctgggtgggggatggccacctccactggatctgcgcagggcacggccgtcgccactcgcccaccgccgccgccgtgctcatcctgccaccgtgctggatccacgcggatccgggcgggggatggccgccgctgccgctgtcgcccctcatcgccttcgccgcattcctgctggcctctgccaccgtcaccccttgtcagctcgccacgcttccatcggtcaccaccactcgcccatgccgaaagagagtttgagagagagagagaggagtatgaggaggaaagggaggagataagaatgaggtaaggagagagagagaggggacgagttgaaaattttgaagcgttaaaacaatgaaagaggaggcttgacttctgggcggacctttaagaggcccgcctgggaaaatatattttttcgtgcggctgcttaagagggccatctgcaaaaaaaaattttgcgtgcaggtctcttaaggagacatatgtgaaaataggggggaccatctttctagacgcggatacttatgatccgtatgcaacctattgaggtgctcagtagtgagaacagccactggtttctccaaaaccactacccgctacagtggaatttaaacttgtccgtgaaaattatatattatgctgagtgcacggcaaatgcaattaggagatagcaaactcatactccctccgtttcacaatgtaagtcattttagcatttcccatattcatattgatgttaatgaatcttcaatataaatataggaaatgctagaatgacttacattgtgaaatagaggaaccttcacacactctttcattgacacacaatcggccacaccattgctgatttgcgcagacctcgacatagatccaatctatgctaattgaattagggtcttgcctcacttgagagcttaaaccggtataaatctgtgtcaccatctctccttgatcttttgcaccccataaattacattgccgatcataaaaatcgacaatgtgtctagccatacaaacggcttccattcaagtgtgcatgcaaagattttatttatatagagggcgtcaggcgaaaaaaattaaatttagaggaaacccccaaaaagattaaacaaaataacataataatatctcaatgagtggattcacattttcctttagagagtactggaagttaatggtagtactagtaattgtacacttgcaatacgcatcgcagttgaggagttgtgtgccataggagtagagggagcgcaggagtagataatagaggaatatatgcactggtaaataaaaagtgcaaatctatgccggtgctcatcattgccaattactgtgtcagtacctcaaaagcggagtggcagtgatagctagtccattcttatatagcaccggcataattaatggtatattcgtgccagttctaatttttttcacctcgaagctctctgggtgggcgggaagatttatggcattagcagtggtaatgcaccactgactgataaagagaggttaagtgtggatgaactccactgaggaaaccaattgtctagatcaaaggaaatagatcggtcggcggagttgacatcccatcttgcacgccgcacgagacaccacagaggacaagaatgtgtgcatggcgcttagatcacaatgctatgtggcagccaagtcagatggctcgcaatagtcaacaggtaacctggtcatctgtgcgacaacactgcatggtagcagacagcaagaagaggaccagaggaatgagcgagcaacgaggacctttcaactactagctcacgaatgatggctggtgtctgtcagtgacaacgaagcagtgttgctcctcaggttcgcaacgagatgagtagcttccgctggggctccggcttaatggaggtgacaaccaaaacttctggtgtatgtgaaaaccggtgttggggttgatgatgaccggaagcgctccaatcaacggcggccggcagcgtgaggcagccgacgtgatggtggctttgggttcttgctgaaggcaacactctggagtctggaaccattcggcttcaatcaattatcagccaggtttccttgttattcttcggtgactaaggtggtagcgatgcggcccaatgaagcttcaatcaacgaaggattcttggctggatttagctcaggtgccaatgttagggttgtagggtgaggactgggttctaggcccgggatctccatgagaagagttgcggggaaggggaggggggaggggacaatagagagaggcacgaagaagctttctattaacctggaggagatgaggcagcgacaaagtggggctgtgcaactaagtgtgcaagcggctacccgcgaaagctcacttataggctaaactaacccgcgagctcgcttattttgacctataagtctgttcgcgggtgacccacttacacccctattgcagacatgatagaagcacggtcttcgtgaggatagtgggggtgattcattgccgatttccgcctgatgatagaggggagatgttgagaagacggcggcgaatgaatctacaatatttgaaagcaaggaagggatcggagcaagcggcacggatgcagcaacacaatgggatcaacagttggcaggtctcccagccagagttttggagacaaaccttaacatgtgatggttccacatatcggcaagaggggaaacaatgaccaagctttggcagcttcgctgcaaatgtgccaaaacagcccacctctgttgcagatgggttgaagcagagacaggtctgctcggagagatggagaggctgagcgggacatgggccagatacggtcgatcagaaggatggacaggaaacaagagagtaagttcattctagctccctcaatttgtcgcccagtctgattcttacccttacctcaaaaaccagacacaacccatccttcaacttacaagaccagtgcaaatgagatctctcgacagtattattctaggttttagctgacatggtgcttacatagcttctttgactaggtcttcgtaccacgttccatcaatgtagcgcctacatgacactttgatccagaaaaaaaataaaggagcaaaatggaaaactaaagaaataaacaaaatttatggggcccacatgtcagtcaaaataaaaaaaaattaaaaatagtgggacccacttcctccacctaaccctccctccaaaaccgcgtagccagcccttccgacgggctggccacttaaacataccacttcacttacactttcatcatcgcttcgtgtaagggggttaactcgggagtgacatggttggaggaaagagatcttataagttggtttcacttgtgctaaactagcaaggtggtactaaacctacacacacagatcacatgggccacacatgcctcatcctaattgggccaagatgtcagactacctctatctcgtcaacacttcaccgaatggcacagagggagtggtggggaggccggtgaggcaacaggtaggaacatgaggaaacggggttgtcgagggaggcggagaggtcgacgagcttggtggatctagagtcgaggggactgggatctggaagggaaaggatagcgacaggtcctttcccccgctgttgcgccgcgccctgctcctctttcccgttggctgccacgtggcctcctctcccccacaacgtgccgctgctcactctccgccgccgcgctgcatgccgctcctctcccccaccgggcggtgagcttggtgaagctagaggcaaggggcaggtatctaagagggaaaggagagtagccgttcctctcccctgccatggtgccgcgcgtcgctcctctccctctcgtcagccgccacgcgccgctccactcccacgtggtgcgccgctcctgtctcgctgccacgccacgctctgctcctctcccaccagccactgcgcgctgctcctctcccccaccaggcaacaaacttcgtgcagccaaagccgagggggtgtcgatctgggagggaaaggattgtggccgctcctctctcctctccccgccgctacgccactcctctcttccgtcaccacgccattcctttcccgcatgggcaccccgcgccgctcctcttcgccgcattccggcgagcttggtagagcctgacccgaggtggtaggaatctaggagggaaaggagacagctcgcagcgacgacatggatgatgaatacaccagacgcgcgaggaagatatacagttcaagaggctaccccgggcggtgccaacaccgcgtctctgccggcgacaaccccgaggtcctctccctctagccgccgtgcaccgctcctctctctcgtggccgcctcgcgccgtctaagatgtacctttgcaatggatacggtcctcataagatgacgatacgcgtaaattgatttttgcaagcgaaccttgacccatcccgcagaaccgattattgcatgcgaacgccattacggctctcctagagcttacagggggcctcgtccgcaaaaaaataattttgtagtagtgagggtgggctttgcagggagggaaagagaggcagagagatttgagtaaactaacttggaagatgttttttcaactcggctcgagtggacttttgtaccggtttattaaaaaaccggcactgatatgtgggacatcggtgtcatttttttaactaccactaatgattcactagtaaaaatcctttattggtgccggttccaatttagcggttctaatcaggtagttattggtaccagttctaaaccagctccgaatcggcacatacagttgtgcacccattttttttatttttgtaggcattttttttatttttgtaggtgtgacaaaaccccaaaaaaatattctccattttattaggaacctatcataaccataggtcacttcccaaaaatcacatgattttttcagcccgtattcatagaatgcgcaaagcaaggttcgaacccaagacttctctctatatccataggcctcctcaccttctcacctagaaacattttttgtcataaaattaaatgctgttgttttaagactgctaccgtctgaacttataatctatatttaacactatagatgagctgaaattaaaattttgtcaactacttcctccatttcatattataagactttctagcattgctcacattcatatatatgctaatgaatctagatatacatatgtgcctagatttattaacatctatatgaatgtgggtaatgctagaaagccttataacttaaaacggaggtagtacaaaattgtagatctcaactttcatataggctttgtcttcatccaagatagtttagaaattttaaaatttcgcaaatccaaatagatccgagaccttataaatacaattcggatatccaaacaacctcaaatcaaatagtcattaactaaaagttgtaagttgtagatctcatcgaactgtacaaatttcatatacagtttattttcatgtgagttcgtatgaaaaagttaggtaaatcggtagcaatgagtgcttatacgtgtccggtcttaattttatcctaacaaaaggttgaaaacgcttcataagtgaaggttttaggctgaccggtacatatatggctggtctctatgtggtgttttacaaggtggatgtggtgttttacagttgtgtttgttagagatggttttttcagaaccgatactgataatgtgttatatatgtgcccgttctaaatttgtatatatgtgccgaggacttggccgtaatctaaccatgctatgtttgaataaatttcaatgtttcgttcgacaaggtcgagccctgcaggctgaatatattgcacatatgttatattatcgtgaatttcgggatcaagctttctcttgcgtcccgcctgcgctgtggccatcagaccatctacggcccggctccatttgcacaagctgggcccaaacaagacaaccaaagttttgccgctctctgatataactcttggctagtgttgcagtttttaaagcaaaacgtacacccaaggtccctcaacttgtaattgagatacaaaatcgtcctccaatcgcaaaaccagataccgtgcgtctctcaattaacaaaaccgttcgctttaggtccctcggtggttttgaccccggttttgtccgaggtggcagctaagtcagcgtgggacccacgtgggccccacatgtcaggctgccacatcatctccctccccccccgcgccccctccctttttcttttctcctcgctcatggctcacttgcagcagggcggctggcgggcgcgtgcggccgccggggggcgacggcgaggtggggggcggcggtggccgccgggggga

SEQ ID NO: 16656 - DNA, 34925 bp, Oryza sativa
  unsure (1)..(34925): unsure at all n locations
ccgcatcggtggcaaggtgacgaaggggtcaggcggaaaagaagggcgacgtcggcccccacacctgcaaccacccagcacgtgccgccgatgccaggcggtccctcgcgtgccgccgttgcggacgacaacgccaagctctcgcgcctcgtctcctaggccgaggccgacctcgacgctggccacgtccgcgctgcacgcaagcacgcccgccaggccacctgccttgacccggactccccgcgcgcctcgctcctcctcaccgccgtctctatcctcgtcgccgaccactcctcccaccgcgccaccctcctcgccatcgccagcggtgtcggcctggacgaatgtggtggggaacagggtggtgtcaatggtgcgcgggacgacgggcctcggggaaggtgggagggtgggttgggatgacgacggctgcaagcggtaggaggacggtgaagaggaggcagcggtgggaggacggcggcggtggcggcgatgacgacgacgtgggcggcagatcgaccatggacaacgtggctgtgtcctcgcgctccccgtccccgttgctcgtcgtcgctgctccccttctcccgcgtcaccgcgcgcgccgcgttgcctgcttgccggccttagcaagcgctcggttgacttcacctcgccgccgccggcttcctctgggccctcttcccctcatgcctccctcctaccctccccggcggcggcgcggtgtggcagagctcgaggacggcgagggcggcgcggcgtcatgggcaggcgctgggtgacacaactggagaacggcgagggcgacgcggagatgctgccggggtcgtggattgcgaccccgacacggcggcttgctcacgcatcacagccgccgtcgctgcctcgtcgcccgccgccctcagccccgtcgcaccactcgtggccgacctcttcgaacggtcaccggaggagtaggccgcgaccatcgcacttgcgcagagaaaagaagagaagagtgagagacagaagaggaagggagaaagaagactcagcctgacatgtggggcccatgtgggtcccatgctgactcagctgccacgtcggatataaccggggtcaaaaccaccgatggacctaaaacaaacggttttgttagttgaggaacacccggtatctagttttgtgattgggggacgattatgtatctcgatgacaagttgagggaccttgggtgtactttttccttttataaatgccaacacctaatagttctgaattcaccttatttaaaaagatagtaaagagatttcattgaagtgctactcctttctactttttggttattttttttcttttcacgatgggcttggttcaattgatattttctaatatttttttatatttttagggaacagtatgttttacccggtctctatatccaactagatatatgcaatcatttaaattgagaacttagccccctcaaacaacccaatctaaaatttgctcttacgaatatatttaaattgagaacttagccccctcaaacaatccaacactacaaaagtgatttttctgtacgaggcccattgatttttgcaaacggaccataactagtggcctataaaaatcgatggttatttttgcatgcggccccttaagtggtccgtatggaaaaatcgattttcacatacgagcctcttaatagggccgcacttaagtaaatatcgaaaagacatgtgctctactgctggctacagtgacctaaattgatatgaaattcgcacctataattctatttaggtcactgcagctagtagtagactacatgtcttttcgatatttacttattggcattctggctttggatttacatatgtgcggaggactggaatttcttctcatcttgcattttcttaattaaatattcacggctccagtttaatagttttatatgtaagccggttgttctgaagcattaacttaacttaaatagtggagtcgtatcttcacttagcataagaaaaaaactattgcaacctagctttgtcttgatagtataataccttaaaaaaaggccaaatgaaaagtttcttgtttgtttacgttacaataaaattagccatgaacttgctaacagtgctcgcttagaaaataggtcagttttttggtttggccataagtgagaaactgtttctctgcactcattctggtcgaatgtaattgctcttatattaattattgataaatccccccccaaaataaataaataaataaataaagtatgcacctaggcttttttccttgtaaataaatttagtacctgtattatctcaaattggagcaaactctattccaaaatcatagcaaaccagggaaaaagcaaagaccaccagtagcagtcatcccagggtagcgtcaccaccagaccatcttttcataaagtcccaatgactttgtataagtgaaggaattaataggaattgaaattcgacactcatgactcaattgattaatgaacacatttatacagctttgaaatttctgagcaaaacttggtccaggtttcatgagtcatgacatcgcggttaccagctgtttagcacgtgtagttgtggtttctgtactattaaatttttgtgcttacacttaactatcaagtaacagttgtacgacaccacaaatggaactagcagtctaacaaacagataactgaaagtagtaaccagcagacaagggtgcaattgtcctgttgatactacagtttactcccttacaatttgtttaatcaactacacattaactgtacggtagatcaaaatgcatgcatgagttggggagcagataaattatagtactattaatctaaatatttggctcattaatataggaattctatgtacttagactatcaatttaattcgagaagtttttcgatccactgtttcctcattatatatatatgttgatcctttcgatgatcagtactagtatatagttggtgccagatgagctagggcacagctggtaacggccatgcagccaccggcggctcaatttcttgtagaaacacgtacactataaacagtttatagacgctcataacacacacttacgctgaatatacataagaacatcagaaagaccgggccaacatatgttaagattgatcaagttatcacgagcaccttactatcgatgggaatatttcttaccattgaaagaataactagccgtaaatctaagcacccatattaattctaggatttcaacctgggtggattgatttcaccacaaggaatctaaccagttgaactatgcttatttcacacagccaccaacttcacgtttataatatgtaatatgtatatatcctattttaaatcacaaacgttctactttccttcccatcccaaatccatgtatataaaaaagctcattttccaccctaatcttgcatacgaaataaccagtccctttccacaccctaagggcatcctcaatgtttgtggtgtagtgtaaccttaaggtgggccctatgaatagtaagccattgttaaagccatacccacaatgctatggttagaatttagccataagatgggcccacatagaatggaaaaataattgtttgatctcttgttcatgaagtgaatgagagagaaaaaatattttctttttgcttatggtagaccttaagcataaggtgcactctaaactaatgctactttccacaatgtatatagctcactttacaagtgcaatcattaccttaaggtcacctttttcatacattgtggttgccctaatccccctaataaataagcgctcaaagaaagttttgtttcaaaaaaaaaacaaccaagagaaaaatttcggagaaaagaaaaagttgaaccacgttcactagataccatcccgctgaaagttcatccccactatgtataattaatgctatttctctcttctctcattaaagtacattagcttaattgtttgtagccattggatgcttgatctatgattcaagttatatccctcatatcaccttagttttatctttgaatgattactctatattatctccgtttttttttctttttctcactgagccacttcactttgtttttacttttaacagatcaatatatatgatttatatttatttcagtagtccaccacaaggaagaaaaaatatataaagtatataatgctatattaatcttgtagctatcttatatgttatttctactattatcatacaaaactcccaccacaacatgtgcggtttcatacagttaacagaagaggagttggctcaagcagctgcaagccccgtcaatgttaaaagagagtatccattatatgccattgagtttgtcacagatttacgatttgccactgacttcatcatgttctacaatatgccattgacttttgcttaacttctaagatttaccatcgtcacctggttagtcttcgttagtacagtacaaatttttccaaatgaccaaaatacccctgggacaaaacattcaaaatttggataaaaattctgaaatatcagattttatgtttttggccaaattttggatgtttacaatcttatgtttatagtatgatatttttggaatttttgtacaattttggaagtttttgtccttcgggtattttggtcatttcgacaaaattgtatagtgctgacagaggctaatcggacagcgatgataaattgtaaaagttaagcaaaagttgatggcatattgtagaacgtgataaagttagtggcatataagggattcacccatgttaaaatagtccattaaccaactctttttccaataatcgtatgttgtcacataccgtaattttctaattaattaaaacaggccctattatctagtgttgacatttaatgtagagtgaaatgcaccccgttagtggctaaacttatcgcaatgtgtcacctaggtcaagttactttgaaaatgcagacttattacttgaaacttttaaaaatgtgtcatcaagatccaaaaatgtcaggtggcgttgacgttgctgctgcctcccttatgctctctccaccatctttctctttctttctcctcccctccctctcttttcctcaccacttctctgtttgaatggagcaagagaccctgctactttcgaatactcttctgcttaggccattattgcctaggccccacaaagcatctccatcgggtcaccactccacccccttcggatctcctgatcccatgttgactggtctctgaccggcctccgatgtggccctgctcctccgtaaacctcgacgttgctgacctaccctaagctccctcgtcattttgcttatgcttctgcttctggtggcgccatttcgctattgttgcttctgcggtggaccacatgctagagagagaggagggaggtgggcaggtggcaacaatatcaacagtgccaaataggatctctgaggggatgtatgtatgcgtgacagggtatttgacagtttttggacctgtaagaaaattcagcaagtattaggaggttgatctacaatttcaatgtatatgttacatagcgtgataagtttagggacgcggggagcatttcacactttaatatcataggtcagtccatatgatttaggatgcgcaaggacagtacacatttatgccttttcacttgtgttccttatattgatggggactgcatgccagcaagttcagccaagaaaaatagtaattatgtgttgcaaatgaacatgatactaccgtgttgaataattcaactgaattaagtgttgcaaatgaatatggtagtactccttttgaacaattcaaatgactaacagaccactttgttgatgatttacttgataagaattttcaaattaattttttcaatgaagttgttattttgacaagcaagcatagtttaggtaattgaagatgaggcattgcatctggaccgtgcaatgaagtgcttgatatttggatgtagaagtaccaagtgaataaatttttacgtgctacccctaatatgcgtgcatggtagtcatctatataggattggtaatgagttagagaagtcataagagatggatgaaccatccttaatgtaaaaggtagcctcaatcccaccacgtgagcatcaagaagcagatagaaagcaagatttgagtcaaaacaaaccaataaaataaaatcattctatgttgacagggttttttttatcagaggtaatatattaacatgttaccgttttaattgatcagtacttttatttgatttgcagatgacttgaataaaattaaatgtaatagccacctccattagtaaactccctctaggaaataggatgtcaatacgccaagattaattatattcattagttagactacataggaacaatatactggaccacttaatgttttgtatctttattagttacgggacgaaccgtggattaatatggttaaataaaatcttaataaatgttttaatgcacgtagtttaacagatcacatcaagatatgcattaatgcatttgtgtgtgtgtgtgtatatatatataggtatagctcaatccaatccacaaaaaacagtagtcaattgtgcacactgactctttctaatttcaacaccttgtgcctacaattaggggaaatgtgatgcagacctgtgacaacaagttggttgactcggccagcctaattaacttgactctcaaacatactgtcccggccggtaaccttcattaattctcctatagtttcgcatctgagatatgcatgcatagtagcgacctttttctccctataaatatatgctcaagttcaagcaggcacgcaataaacatactaaaaccatacaagcaaccatatccacatagcttgagttaattagttcgtcgatatatctagcctagctatctcaattgatcaacatggggttttctcatgcgattgcgatcttgttcatcttcctcgtggcctcaccaccatcaccttcacatgctaggatggtgccaaacgatgatacccagcatgtaagcagcaggagtactactcctcgatgttcagatgagttgatccatgttcaggtgcctccaacgccggcgaagggcggcgctgggcgcagtagagcgctgtggtcagcaccaagcgatggcgttggtcattagttacaagcatgtatcgatctgctacccatggtttctgaaataattcttgctttgttagatttactggcaataatgatgcaagtctaaaactgtcagattttacaaagcatgcagctgatagatatattatttatttgtttctgatgttttataagtactattagatttctaaacatgaaaagcagctgtgtactagcttaaattgtaattttgataaattatatatatgtctcttgtagctattatatatttatatttatgtgtattggagagcttgaatattctgtgtcctcctccaaatgtttggcgctggttattttaattttaagctaaccaacataaaaaaaaaggagggagtatatatactccctctggttccatattaattgacgatttagacaaggtttaggtcaaacttttataactttgaccatcaataactttaaaaatatttagtttaaaggaactagaacaatatatagaacaatatatagatttgtcttttaaagcactataataaaagtaaacatgtatttatttattatatatattataatagaaaaataaggtcaaagatatatctcgtagaccgtgtcattgtccaaaacgtcatttaaaatggaaccggagggagtatgtgtttccaacgttgtcttaatatatgattgtgatccattttgtgtatttaaacattgcgaaattcacaatctatgtggcaaaccaatagaattcttatcacaactgcgtatcaataacacacatacatatatatgcccacgtatatactatgtgagaatttgtatataatgttagattgtcacgtgtgaaagtgacatttaacctcgatcggaactatagagctctgaatgagaaataaaacactgacaggatgaagtatgaacgcagcataggcggaggtgtgctggtgtccatcccccactgcttttacactttttataaattagtcaccgatattttctgatattttggaatagatatttgtttgaatcaagttaaaaccatatattcaaatgagaaaacatctaatagtaacatatttgataaaaatatattttgtctgtaatattattacatatttttttgcttgtttccataaaaaaggtaagaactgcaaaatggttcgccattgtaaaagtcttggagacatgaacaaagaagtacttctataaataaaaaggcaccaatctgaaagcgatatgggtgctgtagaaaaagaaatttcgaacctttgttttgcacaaagtagtatctatcgagcgttgaaaaataatctgagtaagacctttccatttgctgatggtgacgactcacaaaccaagctgaagctgggctttgaattcagaaccaccaaacaaatttaacactgcagcactttttgatagttagcaatgctgataaggaggtaactttgaaagggactggttcatgaatttcctgaactaaagtagctcagcggtacatttcgatgcgtctacgttagtcaaaacaatgaaaaaacagctgttgatcatgaaaccccagttttttgggccattatttcatttttgcataaaattaattcaggttttgcattttagttaaggcatgcaaaacatttttgcaatttaaaaggaataaatttcagaaaacactacattccagggctttcataacacaaaaccctaggttttgctattcgtttcatgaaacactaggttttaggacaaaatatttcataaaacgttgggctcaagcttatatagtccatataactaatatatttgtctataataattgtgaacaaatttatgagatagtttttagtacatatatatccaggtaagtcgttttcaacaatcgttgatcaccacggtttgattactcatgtcattgtcagttaggatttttcaaatttttagcgcaaaattgagaataaaaataaagtaaacgagagggatatgtaatttgactcaactaatatgaatttatgttgaaacaatcataaatgataatgaaatatgagtgttttatatatatgggtttcttgatacattttgccccaaaatatgggattccttgaaataaattacaataattaaggtttcgtgttactggtgccccagtggtttgtgttttgtgaaatttactcttaaaagaatattaacttatcgtcgacatgatgctttgtagttaatatactaaaataaagtgaagtgttcttacatatcatgaaaagctcctgctgaaatagttttattttagaacaaattacactttgcaccagttaggttagaccctttttaattttatactaggtttagcaaatactttacactagggtgcattgaaataagtttcacttaaccccaagatatatcatcatatctgtagaaattcatgattgacttcaattttcaattcttttgatggtaagcaactattttgcgaattcgatttcactgcccttcctctaggctgcaaacactatcatatgctggccaccgcctcacggggctacgcagctctgcctctagcatcctgccctcaccgagctcccgaaccttgtcgcccgtgtatcttactatctttcagcttgtgcagcgcatgctgactgacaattagtgaatcagcccccccccccaccaacacacacacgtccgaagaaaaacattgaaaagtggttgaatacaatctcaaatcccaacaattgagcaatacatagagctagaaagtaataaataatgccactatatttgattgatgataaagatatatttactcattttagtttgttttatagtggaacccaaagcaataaatgccaatctaaatagaggaattaaatagaaaacacaaaactggcgaatcagatatggtaacattaaacatcacaataaaatatagagcattaaattgacgagaccaacatgtatctatatctatctatatatcttatccctgcgattttgttttgcttctatataaacaacaacaaagttgttgccagtttaagtcccaccaaattaaacagaagtggtgcagagatactatacagttagcaccactgtcatcacggcaccattgaaaagcaatatgtcgaggccactatactcgatagctgttgctgtttgcatagtttttgtggttatgtcgaccatcccatcatgctatggaggtatatatatagcgcagatacttcaattttaatactgactagttagttttgatcgattaacccgccaatttctgtttgattcaatcaattcatgcgttaattaatattgcactgtgcattgcatattgaatgtatctctagatgaggagacattcaccgatgaagtaccacactgcaagattgtagcatgcaccaacaaatgcagaacccatcaccatccgaaatacactgcgcggtgtattcacaacaccaaccccgagcagtgttgctgcaaaaaggatgacgcccgcgtgaccaaataatttcatgcatggtattaatttctcggcctgcgcagtgtatgcgtctatatatttctcttcgatgcagataaaataaacaagtatttatttgcattattatatgatatcgacccaatatctttctgcctatatctatctatctatctatctatctaatcttgttgagcacgaccaatgttatcagaaatcgattagctgttaaatggtgaacacaagtgaacagacagtctagggactaccaaataattgacataaaaaattatcgatatctacatctacactatttttagttaaaaaaacaagtcgcattctctggttttttgctttttccactcccaaatctcgatatatgatatacagctagggatggatgtcgagctggctcagctcggctcggtctacctcgttaggataacgagctggctcggctcggctcgttatcctaactaggaaggtagcccgcatatacgtgcgggcatattgtttaatcttgtttgaactttcattacaaatgtttatgtgtagattatatttttgaaatattttttgactatattttaaacttatcttcgttaataactggtttgggtgtattacttgaaactgtatgtcctcaaatttattagaaaaaatatgtcataataatgaagttagttcatatctatttgtattatgtgtgattcttttttaaaattttttgagtttccaatctttatataacattttttaattttgtatgctatagatgactttaagtaacattttaactttagtaatgaaagatattttgtattaaaaatatagccaacgatactacttcatctaatcaaagatagacttatattacttatattccctccgtcgcataaatcgaaggagttaaattttatccctaaataatagaagaatttatatgtaactgagacaaagtgattttttttaaatactatcacgataatctccaaagtaccgtatcatattttgataaaaatctatagtgtagtgcatgttagtttagtatccggtttgttttcaacacctattttttctaatctcatgagacacctttggtaatttggagaataaatatgtacatttacattagcgttgtattttcatcaactgtttttacacctaaaatctgatttgaaattattatcataacataaatattacatgtcggctccatatttgtgatgtatttaggctatagataatagtagtttatttattttgaaggaatacaaccggatcgcaaattggatatataatttcaaaataatttaaaagatagaacgcttaaaagcattggttggatattttatatttacatttgtgtaaacttgaagattttatccctaaattgtagaattgccgattttttgactttatgataagtatgttttatgttcttccggcaaacgatatgtaagtattattgttttctcaatcatatgtacgtacggagtactttttccgatgtaacagttatatatttctcatgtatccatgtatggagaaatgtattatttttaaggcaaaatttgctacaggacactcaaatattgtggcctttactgtaggacacccgaagatcgtgaatcttttcgtggacactgtaaaaatgtggtaattagctgctggacactcctccgattattttattatttctggccgaatcagagagagaaagggtggtgaaagtaccaaaaagcccctgcgccatttttcttgtaaacgttggtcgaaccagacccgatcccctctcgtgtgagcccgagcttgacataaccaatcccctctcctttgaaccctagctttgagcctcagcggcggcggcggcggtgaggtgcgtcgtgagcgagggggttcgggggtcagcagcggattgaagcgaccgatggatctttgagctcggggttgctgcgatgacggaatcaatgtcgtgcctagaggggagggggtcacccaggaagaagaaggcagcggtgaagaaatgctcggtgcgttttacgagcagtcaatctcctttgaagccgattgatttgtcatgggtccctgactggtaagcattaatgggcattgatttgttattttctttcttgaaatgaaatttgttggggttatgtttgaagtggtttttaatcgatttcattgcgttttgtgttcacttgtgttcacgtaggatggattgcagctcggcatgtagagtttgcattcgggttggtccttatgtcgagtttactaagaacggagacccaaatatcatgtgagtaagaacattaagtggattgtagacaaggatacagtgtgttggattgatctaatgagcgatttggatgatgaggtcatacatagtcctcagcaagagctaaatgtgaaattttgggacaaaaatgcaaaccaatatgcgcaggtagcctctgatagatctttacttgatgctttcgatatgtacagggagatgaggaggctccctttatttgttgatgtgagtgatgacgcacagaataggacagagccttgtgtggagcagggcaacactgagccgcaagatgtttgcactgacattgtgttgttcacacaacaaagtcaagtaggacagtcctctatgccttctactaaaccaaagaagtgtagcacttacaaaccggttgatgcttggggagagaatgatgaggtagagtatgtcggtgtagatgatgagaaggataagtacaaggatttggtttcagatgatgaagagcatgatctagattatgaacctgggtctgatgaagatgtcgacgacttagctgcagatgatgagcagggttgtgaatctgtagtgcatataactgatcttgacaatcctaagatagctgttgatgtaacatttgaagacggtgaaacatttaaaagatgcattaggcagtatgcagtactaaaagaggttgaacttgcaattccatatagcgaatcgacgaggtacagagcatactgcaaggccaagaggtgcaaatggaggattcatgcatctagattacaagacaaattatgcctaaaacttacatgctcaagctttggacacttcacgaaccgcttgtttgggttagcaggggtcctcgatgtctttgcttccaactgcgtaccgcataacggacacttaccgacgtgcaactcgcctgtgactgggttacgcattgacgacgagcccgtgtacaaggattggtccatctcgccggccacctcaatctgccgcagatcgccgccgcacttctctgctcgaatctgctagcggcagagcgtcctagctcgccgccgcagtcaccggagcttgtcgacgtcgccgccgcagtcaccgaagcttgccgaccggagctcgccaacatcgcagtcaccggagctcgccgacgtcgccgccgcagatcgctgccgtcgccgcagatcgccaccgcacctaaccctagggtttggaggagaggggattgtgacactaaatggggaatgggtctgattcgacccatctccatcgggttaaacactgacccaagggcaaagttgccatttactaaagtttctttctccgattcggccggaaataataatataatcggaggagtgtctagcagcaaattaccatatttttacagtgtccacgaaaaaattcacgatcttcgggtgtcccacaacaaaggccacaatctttgagtgtcctgtagcaaattttgcctatttttaaataataaacctaatctaatggtataaattgaaacaactaaattgtgttttttatttttacaaatgtaaatttaaattagcgtcgtatattcatcaagtaatatttgacaccctaaaatatgatgtgaaataaaaaattataatagcataattattgtatatatcagcctcgtatggtaagttataacgaatagaggtcattgatgggatgtttcatatttataatacaaatttagtttaactatgtatatttaagtaaatttgtagtgtaatatatttatctttaaatagtagataataatatttaaaaaccatcgatctttttaatgatacacatttttttattgtttttattgtaagggattttgaaaatactattttgaaagaccaccgtgtatagattctttttcccgatggacagtaggtaaagtttcatttctttttccaagtcggatgtatgtacgaactacttatgttttttttccttttcaagccttatagttctcccgtatacgtatacagagtaataaggtattagtttttaaaataaaatacatctaatctattattaccactattttaaaagttgagtatctattaatagatggaactgtatatgtcttacttatttccaaatccatatataaatattctaaaaataccacttctaccgattaataggatacaccattaaaattaaaccattaaagttaaacaggaatgcccatttagtgggtgaagtcagtcataatcgtcaagactttcttactctactgccttgaatgataggtctctcattgggatagttgtcctcctccagaacttggagcacaatttaatgtctaatttactatcacacccctatgtagtattgcattggtatactgggatcgccttaactcagcctatatatgtctctgttatacttaggatagcatagcaaactctgttggttatgcttggtgcccctcggggaaggagaaagaaaagataaacgtgaccaagatagtagttttttttaatttttgagtagatttgtgctatagagtagacacaatatgtttaagatattaatcattactactcatatttttatagtacagctagaatactctcattcgaaaaaaagcaaggtccatcaccagatggtacttgaaagaaaattgccaaagagagacataacaccacgataatctccagagcactatattattgttcatattttgacaaatacctatagtttagcacctggtttggtttgaacacctactattgacaacaacacatgttatacctttactaatttaaagaatgtatttattcttccaaacttatttatcaattacgtagtatatttatcaagtgatatttgacatcctaaaatatgatatgaaattatttaaaaattatcattacaataattattatatattagcccaagatgtgatgtatatagaaccgcacgataaattttataagacacaaatattttatttaattaaaggaatataatgggatcacagattggatatataactaaaaataatttaaaagataactgtctatattttatatttatattatagacctagtttatatttgcacatatttgtggagtaatatatattttatatggtaaagtattatattttaaagaccatcgattctgttccatgcacatttgttttttattacatatatttcttattggctttatcattttctacggtaggtacgtgcattttttttctttgtaataatagttatacataagctttctaatacagatatactatttctgtctccttttatcagggaagtggttaagtacctcagaagatagaggagagcgtcaggcgcatatttccggaatgcttctacggggaatgctcattgaatgtgcattctccgtattataccttgaagaggactcgaacctccacgcttattagcacgagattctgagtctcgcgtgtctaccattttaccatcaaggcatcttgaaagtgaatcatattccataaatatgatatctatctaatgtgatatcttgaaagtaaatcgtattccatgaatatgatatctatctaatgtgatatgtagaatatatgacaaaggtggagtcttggagtatttcgatcgatcggtcatataggcctgagtcagacatttggttttcatctttatcgtacgtacgtacgcatgtgttcttccttcctgtaaacagtatatatagcagaaaggtattatatatagatctaatttattggtaaaaaaacgggtccaccaatttaaatataaatcaacagtatagatctaatctaacggtataaaataacgggtccaccaatttaaataaaaatcgacggtgagattagattgtgccacgtggcggcctaatagcaattgtaggagcgccatatggcggcttttgagcgtttgtaggaagtttaatggacttttagtatataatagatagatagatagatagatagatagatagatagataatagatgagctagaaacccagctcggctcgactcgttacccagctcgagctagctcgtttggctcatgagccaacgaaagaagggcaagcacgaggatgaggaagcatgaccacaagggcgtcagacggcggccatgcggttgacttggagatttgcgaggtaggagggttgggggcttggggcggtctgaggtaggcaggggagaaggcgtcgatcttgccggcggccagcagacgaaggggatgtggcgccgtgggctgtgactcctgggcggcgacgacgatttttgacaggatgagacttgagagcgattgtgggcttccagcgctacgggagacggcgagcgattgcggcgctacgggagaaggaagaaagtgagcgagcgattgtggcgctacgggagaagggaagtgagtgattggaggaggcatggagagattttagggttagaatagtgggcttattgggccttgttgggcatcgatctctactgatgggcttgtgatcttttttcgttggccttgttggacttttggtgcttgccttgccttggcctgctgtttgttttgggccttagctcgtttggctcgcaagcagctcgcgagctggctcgttatagctaacgagctcaaagcctagctcagctcgttaacaaatccaaatgagccgagccgagccaggcacgagccgagtgagttaacgagtcacgagtttttttccagccctatatacagccaaactccagaatttggtgatactaagtaatatgtacaatgaagttatgctagggattgaaatttcggaatccccctctcaatttttttttaaattttggttaaaatatagtcaaattcaaccaaaattcataaaaattttaaataattttgtggaaaaaaaatctaaaaattcacgaaattcatgaatttttttggtcgtagagaaattatgaaaaattcggtggtttctgagaaagtcatccaacatcggttatgatctctgatataaaatttaattatttgctaaaacttctggacttctttacttttgttctgatcatcaagagcccaagacccaagcttgttcatcacttcgggcatgttcacattttagctgaaatgaatcttaccaaattttagcaatgacaaaattttgataatttggcaatattgccaacttttgataggatttcttatatatttactagagtttggtaaaataaaaataaatagatgcacatatttgataactttgctaaaatttgataatgtttattttggctacaatctgaatagacccttcatctgaattgagtatatttttgcttaactcgagttagctagaagacgtagtcgcctgagcatgtcgaaaagaatcaaagaaacattggacagctcccgggctgttctattcgacatgtacaagttagaaacacaatcgtctgtatccttgtttcgtcacaagtgagtagcagttacagaattaacttcttgagttgttgcctagcaaaatagaagacagttttctacagctagagcatcctagaaacatggggtgtgccatgcatctcgttcgagaataggacaggatgtacagaaaattgccacatgattgaaactagcatcgttgtacttcgagcgctctgagctcatagaaaatgaaaagccaaaatatgaattaaacggccgaagagatttagttttctgttgccactcatttccttggaaaaacaatagtatcactagcagccttcaatattatattaatttccgtatgggacattaaaaagtcggtttgacatgcccaactagagttgggaggattaatggtttagtttcgtgagggctagaactttgggcggaggtatatatataggtcggaatgatatatgacttgaacaagctagaattgaatttttaccttgacgagtaggtagcatgtaaagacatgaatgattccttcatactgcatatctcttaatttattgggttgctacgcctacgataattaataaattatgtctttcatatatgagtgtcacggatgctcagtgcaaataagaggaagaatttagaggatagttgggcggttttgggaagaacaggggaaggaagtagttggtattttgtattttcattttacaatattcacttgagagtgtggcgacaggatatttatataactcagattcatgcacagctagaccgccgctaacctgacacggagacctgacacacttgcacaaggcaggactcagccgagcaatacaacaacgcggcactagaaatactcacccaacgatgcctcacaactccccatgcttaagcaacagcgtgacccccgctaaacctcgatttcagttgtcgcatgttttcccatagtgttagctcatcaggcacacctatacacgagaataatctagatggaacaacagtcttgtcagttgtcgcgtttagtcaggttgcggtgaagaattgcttcaggcttggcatcaagtttaatttcagctgtctgtagtggtagctcaggactcgccacagtgtcaggtttgatggcaactttcaacaatgacacatgaaccacaggacggataagaagaatggccacatcaatcttactatgtccagtgttaagaaatacattataaagacattattaataaatatgtggttatagtgacctgagtagcaccttaaggttctgagttcaaatcttcatagcagcgaatttcagattgggttatttgagggctcattttcctgtttgatatgctaaggtcctaattaaaatatgacgtatatgtccggttggatgtagagggcgggtaaaaaatacccttgtctaaaagaaaatcaataaatatatgggattataggatcacatcgaaactacattagccaaatgatattcactaatgcaaaacgcatggtgagcggcggttagatttcttcaattgtttggctctagcaaactttgatagctcttttatccttgttgatctccaggcctgccatttaccatggctgtttacattgcaggcatgaaaccatattgccatacctctgcttaatttctcgtttggcaagatggccatccattggtccaaacaaagaagctatgagtcccctgcatctgctaagcacctccattctgtgtatccaactggcataccataatcatactaggcagttcattcatgatgcctcctattcctaattgtatctttgtatctcccagcatcctctctgcttctctttggttcctctcttgtgatatccattgctaccagcttgcagctgactagtagatggaataatgtggttttgtacatatgaaactgtgtggagtaactaatatcagtttttcacttctgggtacagtgctggacacctaagcctgctgggtacttggttctgcgataagttgtgaaaaatatcaaatgaacctatacaaattgaaatatatatctggctgcgaagtttgtggtttagtgaacctatacaattctagcctaattgtaaaagaaactagtatgaacttttactttgttgggatgcaaagtacaaatatgttcaatacttttacacgatgtggatcagcaatacatacgcctgttggaacattttttttcttactaacaagaaattaaagtgatgtttcgtgcataattgaggacatttgtttttttacttcaaactactttctaaatattgccaaatcagcattgaaaatacaatggttgtagcaaaaataccattaagtctctacaattatatgatgatgcaaggatattttgccaattctgaaggcttgggatcgcttcattattgcatatttcctcgatttgtgctctcagttagttgttggagtactcccacaattaatacttgtgaagtatttgactagttctatttcttcttagttgcaaatctaccaaactgccaaatttctcatcaacgataaatcccctgaatagacaaatagattagaaactaaaagaatattatgaccacccacattcctaatgaagcagtgtataggcagcacacaagcagacaaacatctctcacttacatgtcgccatctcccattaggctggggttgctgtcatccccatatcatcgttcctactcgcaggcgttgcaccgccttcgtagacacaacccggaaagaaacaattcacaatatatgttgactcactcgatttactttaacctctaccatgcaagtgttgacgttgtcgcaatcctaaaactttggatacccggaaaggtatcatcatactgaccttcagcgcagatgagcacatgaatagtttcccgttgcctctaactcttatagaacaccgggactaaacaatcaaaatgacagtagaatatcataggccatagttaaatttcttacgggcaattaattttatggtcactaactatacgtaacttctataccaaaatatacaagcagaaacaacgataacagtaggagcagcagcagcaacatcaataaaacatttattactaatcatatataactgcattcggtaagacaaaatacacgttatttggacagagtgatcaatttacatactttagcacatataaatggccaaactagaagaataaattaatgtttttagtgctataataaaaacagataatgtagcggcacattttacatactaataaacatatatgtgagtttactctacttagcttgttttatgactttgactaacatgtagcatttgcaacgacaacaagagagcattgatagtaatcagtatctcattgaatttcaaaacaaacaaaaccccatgtagagctagccccagtaagtatacacaagcaaccatcaaacatagtaatatttcctttaatcagtaacactcatgtgtaagagtagttttaatagtctcatagtctcatattaagtgcttgaagaaagctcacgatggtactgaacttcttccattgatccttctcatgctcatttgacctgcattattcatcaacatcatctagtacatgcttggtgacagcccagcacttcacaacatcacttcaattactgtcagaactcatgataataccaagtgtggtttttactatagtaggcatcgagagttcattccccaacacttcctaataggctttgcaacagtggtcccatctcttatagcttgaaacataacttattggtgataccgagaatcccccaaacacttcacacagtaggccttaaaatagtgccatgtgaaatgattaaagagaactcaagataatagcaaacatggctgtcatctcgatcttgtggtttaaacaccatatattaattgtttggtgataccgagagttccctcaaacacagtaagcattgaattagtgccacatgacgtcaagtgcttgaagggaactcacaacaataccaaacgtgtctctcatctcaatcatatggttcaaacaccggttacaaatgtatgatgacacagagagttccgccaaatacttcacaacaacccttgaaataattgtgtcgtatgaagtgcttaaagagaattcatggtgataacaaacgtttatccttgtatagtttgagcactgtttacttacatgctggcgacactgagatttcccccaaacgcttcacaacaactctcaaaatattgtttcatgaattgcttgaagggaattcctggcagtgtcgtcgatggccatgtgccaactggcctaccgcatagggccccccaaaattctcatatttcaatacaagacactaatttccaatatggttttatcctattcattttattttttcaaaagttccgctcatcttgatgtattgatttggctataacatatttattttctttggatcaaatagatgttcaataataatcatggcaaccttaaagaaatatagtttatagcggtgacatgaacgtgcgttctaggtactaaacattccatttttctgcttgataaagaaaatcaaataattacattaagactcacttatttttcttacttaaggaggttaccgccaccatttacgtaatatttttttctgaataatttagtatccttttattgatatttctaaatataagatttcgttttatgtttcgcactggggcctaaggtgctgggtacggcccttattccttggggctccaaacctccatcatttaaaaattgaatatcatatatatggccatcacatgtaattcctgaagtacaaacacttacataccaaacttgaaaatgctggttgccaaccggagtttccccaaacacttcactataagcagctaacttttggccccatgctcatagttatgcaacagtggtgcaatgcaatgaggcctagctagctatctgctgaagtggtttgaggagaactccagtggataaccaaccaaattatgactcctagatcgacctaatttcctcgtttttgatgtggaccacttcacttgtttaatttgccttgctgatgagcacagagccggtggctactctctccgtttcataatgtaagtcattctagcattgcctacattcatatagatgttaatgaatctagattcatatatatgtctagattcactaacatctatataaatatgggtaatgctagaatgacttacattatgaaacggaggaagtagtaagctagctagtaatctgcctcctgtggactgtgcaatgcatatatggtccttgctacgcagttggcatgtattaattggatgaacttggcaacggatgcatctagccgtgatatagcctaggttaggacatggaatgtggcgaagagaatatatacaatgtgacctttgggctgcactgagctccgatcgaatcgtagaaagatagctgcaaaattccttatattaccaccggcagagcactctgtcgttgcccggtttctgtccacgtacattcctttcattgcatgcacagccggttcaggaagttgatgacatacatgttacatatactgtattctgccactctgttgaactaagctattttatgggttgattatctagtgtgatgatgaaattatcctgtgaaccacagatcatcatatattttcagttgtcttttgcctgtcagcgaccggtgagtgtcacaggcttgctagtgatcatagagggcagcaatcatacacgacctaatctgacataatttactataaaatttgtccaaatcgaatgtgctagttgtgtcattatgcgtatatgactgtataggcaggcagcacaacgagaagaagaaaaaaggttgggacatatacacaaacagaaggatggatgcattttctctgccaccaggtaatcgatgagtcatattcccaaaacccaaaactatatgctcaaagaggagaaagaaaaaggtgatgaaggtgtccaggttcaatgtatgcaatccttgtcagcagaagaatatatgtagagccccccagctgaccactttcaaagcatgtccaaacagcagtctagtttcagctttagaaggagaggagaggagagatatttgcagtacaagtagcttattaggagaatgaacattcctaaacccaagatacatcaagaactatccttcttcaagctgtagctgcctgtaggaggaggagattgtgtcagatggagttccccctttcacttcttggttcttgtttgcttctacaggtagagcggattttgtttctgatgattttcatgttcatgattcatggatggatttgtttctcagtatgctcgtttatgctgtagctggattgtatcaaggaaaataaatcgacgatgagtaaagcaattttatctgtattgtttcttgatctttttaattagctatagttacttgtctttgtctatttgtgtgctcggatgtgatggcctcattgaaatgagtcataactcataaccgtattagcgcaggtggtcttgttgggccggtcgatcttctgaactagtgtgctaagcccaggaatttttttcatttttagaattttttttaatatttacagaaataatctatcggccaaaaaaattgcaaaaatagaccatgccgccccagtggtgggcggcaagctgacgtgatagacggcgggtcgaccgcgccgtctgccgccgtcggccaaaattgcaattacccccttgccgcccatacagagggcggcaaggggctaattgcaatttttgccgcctataaagaggttgcgctcgtactttttgcatttgggccccttgccgccccagtagagggcagcaagggacccagatgcaaaaagtacggccaaacgatttttctatgttatgttaataataaataaagaagtatttattggtaaaacttattaatattgttataaaaatgtattgaagttggttgtttcgcaatttcatatgttaagtaaggtattattttgtaacttattcgacgtattagtactcggataattaataggcctatcgcagtctcggtcgtagaaacattatatggacttaaacaaggagaattatttaacatgaagaaatagtagtacaatttgaacatgatacaactatttccattgcggttacatagatgatattagattcgaactaggagggaggtagtgcaatagttgaacacaacgacgatgtagtaatgggacaaggaaacatgacagtagaaatttcaatatgcccctacgtgaggatccctttcctctctcaaaacacgctttagtaaccttgtattgctctggtagttcaagctgcacaacacggctaggtggagttagaacccttctggtatctatccattctctgtattgacatctccttggtggttcctaggaggaaagaatagatgtaaagcgaacaaagttagtaaatgttgtgagaaaataaggattcatgtaatcaaaatattcttaccatgaaatcgtcgtcaagaatatttggacaaacaaagaaccttcgatccaatgttgtaggctttatggaacgaagaacctgacaacgatcatcacacctgcatcttggacgggcttcccatggagggagtgccgtagttagcacccgccagtcgctctgttgttcacgacattgtcgttcataagccgcttttctctgtaagtattgctcagtactttcggatgcacaataccagcgaccttcttgtaaacaagtggttaggtcgagaacgggattttctgtatcgacccactcgattatgtgcaagccgtagtacgggtctgccgaatagagtagtgttacgaagaataaagcgattgcccatacggaatgaataagcatatgaagataataaaatatctcacggtcatagttagggcacctaaaaaagcgccttcctcaaatatcaggattcctcgaagccattagttggcatcgataaccgcataggcagagaggacgctggcaccaaggtggtagtaggtatacacaaggatcgctagccagttcagatcctcaacaccccggcgtctagctattgacgaaagccggtaggatttgtaatgaagcatgtagggaagagagtactgaatttgactgagttctgaaagattgtgaggcctcactcgttaaggcgacttatataggcgcaaaaaatcgagtgatatccctgacatgtgaacgtggaagggcatggtggatacgcctgattggcaccgaaagttacatgcctgatcggcgccgaaagttacattggtcgtatgcagcaaatggcgggcaaatactcgtatcgcacgcaaataaaggaggctgcatcggtgcagcagaaagtagtcgtgcatgtgtcgaaaggtatcgtgcatgcgccgaaaggtatcgtgcacatataacaacaacgtagttattacacaagtatacagtactggaaagtgaagcaaataaacaaaaagaagactgctctactggccctgccccgcgccgcgaccacgcttggtcctccaggcctgtgctcgcacgtggtcatgggagtaggtgaaacgatccggtggcacaacacgggtagcacgagtgtctggcggtggagtggccagcgcctggtcctgcgtctgcaccggcggtgcgcctcccagctgtgaggggccgatgacatcctctgtcaagcctgaagcgaagtcgaagtcagtgatatcgaagagcaaggtggaaggcagcaagcgatccaacgaggtcccagcatggtccagtggtggaccctgactcgacgtgccggctgcgtgtgacgaagtcccggtgtactgccagaactgcgctgagtgtgaggtcgacgcagctgcctgagacgctgaccctgcaacctgggagaagtgggcggcctgcgtcatagcgaacagggcgaaacctacacatcgacaacgggacccttgtaagctaagacataaaatgcatgtaaattgattgtcgaagtaatgttgtttttttaggtacctgtggggggcacaacagaaggcctagccgaggaaggcggggtgctgaacggtgcacgaaaccctgaagcaatcggcaagtgaaacggctcacatatatgtgcgaggcatgtacagaaaaatccttaaaaatacttacctccgtgcggagggggagtcggcctaggaacgtgcgcagctggacggggaccagttggtacgggtggccgctgtacagctgcgtctgcccgagcaacgtcgtctgcacgacaggtgagcactcggagaatcgagcgcatcgattccaccatccgcgtgtacgtcgtcaggtgctcctctacgggtaccggaatccccgcgcctaaacgttggatcatcgttgaaccgtcaacgatgacccggttgatgtcgtcaacctgcatggttaattttttcatacatattcgtaaaatttgacgaagagaaagacatgaaaacataaaggaatggtgcgatgcatggtactcacagcacgagcgaagtcctggtcgcggtgcctggcgtagaggtctctagtgctcgcaacgtggggctgcttctccaaggacttcgcgaaggtgaccctagtatgggtgcatggctggtactagcataggtaggccaggtacgcctcctcagtgtgtggctctccctcgtggtccacgacctcctcggttgcgagcaaccagtcctcaacaaaagtcgccaacttggcgggccagtcgccagctgactgctgacccttgcgcgagtaactgcgaattaatctgtcatattagtgtgaatcgacagatgttgcaaattattgcggactggtagattttaatgcaacaactcaaagcgtagtgaaagatcttaccggtgaacagcagctaggacggtcgtcgaaaacggtactggaaagggctgacggaagccgaactgccgcatcacgcggaaaggggcgtgaggctcaacgcagatgtcgaagaccatcggaaccatagtcatctagtacgcctggtccctggtgcagagtgtggacagacccaacggcgcccgagcctgggtagccgcggcactgtagggctcccacaggacgtcagtcggcagaaggcggtcgaactccataacaaactcaggatacgaccacctaacctggacgtgagcccatcggcgctgcaatacgagacgatcgatgtgatgtacaatgaacttagcaattaacttaacaatacgagaagatcgatgcaacgtacctgacgatggcaccacagagtacacatcgtagggtagtcgacctctggtcgctctgcgtacagtgactcctcgtacgcgtgctggtccacctcagggcggccgatcgcaatcctctcagctgcccagatagaaagaaagagagggcacccaccaaaggtcacgctgggatccgtcttcgtgcaagcctcacaaaggccacggtacagagccgccaacaacgcggaaccccagctccactgaggcacctcgcctaccgcggcatcggcgatgctcctggcgtagtgcacgagtcccttgtcgaccgcgtgcccgtgaccgccacagaacatcacccagccaaaaagccagagcaagtacacctccaaacaacggctgtaggtgtactcgtcggcctccgcctgtagctgctcgacctgcaagcgttcgataaaatgttaggcaccttaactgtggactaaatatgtagtatgcttgtcatttcggtacaaaaacacccacggtgaactgaagcagccacctcttcgtaggtccggtgttgcggtggtgtgccaacggctcgagcgggagacgcgatgcgcgctgtactagtgcgaaatgtgtcgtcagatcgtcctgccagtccacacccgtggtcactagcccaacagcgtctcccgcgagcggtagccccaacaagtacgatacgtcctgtagggtaggggctacctcaccgcacggcaagtgaaaagtgtgcgtctctggcctccatcggtcgaccaaagctgctaggagggaccgatccacagtccatcgtctggccgggtcagcgtcgccggcggcaacctccaccagccgacacatcggtaggaggccggcctcacgcagcctgcaataacaaactaatatgtcaatataaaaattattacagcgcaactaatttatagcaatacacttttcgtacccctcgacaaaggagtcgtgaaccataagtagctcaccgcacgtccgttcccggaacgtcccaagctgagccccctgcactgcagtaaggtgagaccggtgttggtgatctatcaccgggtccaacaactgagttgtatcctgacgtgccatctctgaaaaatatagtgtttcgtgttagaacaattcaaaaagtagtaatgtcaaacaaaaagataacttgtaaaattatgtacaacaagagtacatgctatttaaatataggaaacgttactaagggtacataacgatgacgtgcaatttaacatatatgtagagttcgataatataacataacataacataacattacgtgtcgaaatccgacattacatcagcatacctaaagacactaggtgccttagtctaacgttacatcacgagacctaaagacatgacatgccgaagtctgacattacacgacgaaacataaacacatcgataagttcgaataaaattacaagcaaagccacatgctaacatagaacataagaactacaccacgtaaccagacgtggcacgacgacgcctaggacgttgtcgatccttcacccgtagggcgagctccatctgttgttgatcctgatagtcctgcctccgccgcacttggtttctccttatctttaggacaatgcttgtaggtgtgcccacgttcatcgcatttgctgcaacgcttcaccctgccagcctccgactcgtccatatcgttgcggatgcgatgagtcttcctccttccagccttgcctcggagctgcgatgggtcaggaatattgagtccttcatcgttagtctctatgaactccccagctatgccgaacccataaatctcgccgctccatgtatgatatattgcttgcttactgaagtactgtgaaacatatactgcatctggtatgccacactccgctacggcagcaatgacatgggtgcatggcctgtggagcagcttcggctttgcacaagagcaatgacatgtgccgtcggctttgagaacacactcctgcttcactctcttgcggtagatacccctgcctgccttatcttgacatagtatctcaaacctgtgctgttgggtaccttgcactagagctcgatgtttcatggcctttttacgcaactcctctagctttttctgcatgaaagttccaaacaaaatgttgttgttcggcatagagggatgaactgcctggaaccgatccctaaaatacctgcatgtcccatgtaaaatgaactccactatgccaactagtggcagtccacggacaccgcgcatcacccagttctaaacttctgccaaatttgttgtcattattccatatctagcaccacctgtgtcatacgccttggcccatttctcttttggttcatgcagaatccactgagaaaatttccgaatctccaatccagttcttctaaccaatgttggactatccgttgggagaggtccagagtttgaggagggtcagcatcggcggtcaatggagctgctgcacgctgatcactgcatttggctgtcaactcatctaatctcttccaaagctcattgaattttttctcttggttctgattgcatagcctcttaaacatgttcatgagctccttgttcttgaattgcttgaagaaattagctcccatatgacgcatgcaccacctgctctgtacatcttcccactcaccagggtatcctcgttccatactcccaaactgcaactcttctatcgctcgcagaatgccagcgtgcctatcatgtatcaggcacacatttggcctcataccaacaacttttgttttaaccaatttcaggaaccaataccagctgtcggtattctcactctcaacaaaagcaaatgccaagggcaatacctggttgttcccacccctattgttgttagtatctagccccgattctttcctgtcatgaatgtcccatcaatgcagagaataggacgacagttcacgaatgccatcttgcatgcatgtagagctaagaacgccctttgcagcacactcttgccaggatgttcaattgaggggaatttcttcacttcataagagctcccagggtttctttccttgataacaccaaagcaggcgtggcaaattgtcatacgaggcttcgtaagttcaaaagctcatctctataattttctatttggccctccaggccttggcatagctaatagtatacttgcatgtctcttcgatgtgtcggattattgaccttagttcatatgtgagattatcgatgacatgcgcatacatctcagatgcaacaaatgcacatgtaatattcctgtggtatttctgaacaccaggtagataacatgtatgcttggtaacgactgaaactgtccaataatctttccatttccccttatacgcgtgcactttccagggacaaccatctttttccttaacacaccgaacttcatattgggaccggttggacttggcaacccaaaactctctatgaagtgacactgcaaaatgttttactacctccttcatatcttctgctctactataaatcgctccttgaataaccgcattttcattgtactcccatctcacactatcctcttctgaaacgaccagcgcagaaaaatcctcactagcccattctgctggattaatatccgtctcatcatctgacgaatcaccttcctctacacgctcattgtcagaatcctccctctccatttcatccacaatggcaccgacagtctccccctcgttggccactccacctggttgaatgcccactggagctactacacccccatcctctcgtgcgttgacctcctccacagaagtctcatttacttcagcacttggtccctcgccatcatccatgttcatctgcacacatggatccttcgggtgaacaaacggaaccatagctagaggctacccgcgttgcaatgcattttccacattccatctncacactcgagagtttgaactggcattagttcccaataaaaaccctcagttgcccgacttactataacattgattgttatgtcacttatctggggatcaactctcaagcccctcattaaccatccttttatagaaggtacactcctctcagccagtctatcaattcccctttctgatacaataaaatctgacagatctaccccagttggcccgtaacggacgtttcctgggccatggtaaacttggaatatttgtttgttcgacatatctatcaacgaaataactagatcatattaatctttcatgcaataaacatctacaacgtaatatcttcttgtgtatgccaatgcaacggtaaagtattgattccaaactagtagatctacgtagttaccgatatctaaaatacgcacttctagattagtacaactaaaaccctaaaaatataatgcatttattcaaacaaagttttaaaaaatacacactatttaactcaatagtcacatataggatctatgaatattacctgaaatcggcgtctgaatccgacagggcttcgccccttcttctcttctcctcccctttcttcttttttttttcactggatttgagggggaggaatgagggctgggggctgggcgacaggccttttataggcaggccttttataggcagcgaggcctgccgcccggccagagggcggcaaggggccgcctgcaaaatggccggccccaactggcttttttgtattcgggccccttgccgccccaacagagggcggcaagggctttactgaaaaaaaccctccctccgtcaccgcccgccccaacagagggcggcaagggatttgtaagctctatataagatacgcatatgtaccgtccctgcttgttgggcatcaaatgacaaaataaaaaacagaaatccccacctatctcgtcttcttcctctgaactctcgatccccgattccaacagcttctcaatcctcactgatagaacattatgcgtgtcgctggtggctgtcacgacttcgtggtagtttggtatcagacacaagtcgatctgccactacggagaaagcatttttgctcccggtttataactccctataattatggttttgtaaccagaagtacgaatccgggactaaagatgggtatctttcatctttagtcccgggtgaaatgaaacgggattaaaaatccatctttagtgccagcgccaatcccggttagtcaccatttttttttcttttttcatcattgtttcttttttctttcccaaatcgagttggtccttcccaaatagagttgctccctacatatccccaatcatatctcccatccgcccgttgacgcgatccctgccgccctccacacggcaaggtcgccgcctgccgccctccgcccggcacaccacgctagccgcagccgctacaggcccggcccaggcttggccgcctggagtggtagaagaagaagaaggcggggaggggaaagagagtggaatggggaggaaggggagagaagagggaatggaggctaagatcaggattatgttaatttaataagaggggagagagaggaagggcaaggggataagattgactattgagatgatgaggcgcgcggctcggggtgaattttggtcccggttggtataaacaatcgggactaaagaaccatttttagccccggttgttcataccaatcgggattaaagataattggggcttaactcgtccgacaacttcttgaaccgggactaaaaatgatatttagttccggttgataacaccaaccggaactaaaaatcaaaaagttttgtcccggttcctattcgaaccggcactattgtggtttttgggtaacggaccattgatggttagtgtgcgcacatcctagcgacgaataaatcgcagacaacactcacggagaggatagtgtgatggaacgagatattggagcgcaccatcgagctcacctccaatatcaacggtattctcggctcgctccaaggcacaggttaaacaaaactaactttccgaagtttgacgaggtcaatcccaaactctggaaaacaaatagtgagaagtattttagtatgttcaggtagagaagatttatttccgatgattttcgtattcatgattcatggggagatggatttgtttctcagtatcctcttgtagtagtatgctgtaactggattgtatcaaggaaaataaatccatgatgacgagtaaagagaattatctgtactatctcttgatctttttagttagctacttgtctttgtctatttgtgtgctcggatgtcatggaaagtgtcatgactcatgagccagccttatgtgttgccgtattagcgcgggtgggctgtttgggcgggtagatcttctgaacttgtgggctaagcccagcgcagtgtggttgt

SEQ ID NO: 16657 - DNA, 3049 bp, Oryza sativa
atagttatatccgagctaggtgtgtccttatcatcctccccttcttgattagaaaccgtcctcagtttacctttgtcatggagagtattgcactaatctttggctatcacaatatcatgtgctgaacattttcttgatgtccatatgattggatcctaaaattctttgtagtcgaaaaactacaacactcccttttttgcaaaccaacctgtaactcatttaaataactagaggaactagatagttaattacttatatgcatgcggtcctctagacaagacatttcatcatgaaaaggaagtatagttaaattcgaacaaatatataattgatgcacattatattctcctttactatcataattgccaataatatgaaaaatcacatcagaagggcatggcaattcaaatctagcaaataatttcttctctaaatagttgagtggacaaaaatcatcaaattgaatagaaccccaagtatttaaagaatatagcaatttaagctattcattctcgctagcaatgtgaataacatgtttaaactcaacactgggtggctctactatagaactaacatgttcattcactagttgtgccatggatataagtgtagcatcacacaactcttctttatcacaagagacatcaagcaatttgttttgtgacaaaggtatttcaacaattgtttccactatgggttgctctaacttagcacaagtagtggacatagttggcacattataactatgcataccttgagcacttgtagcaccattatctttaccttttttctcatcttcagaaattgtaggcacttggtcaattaaacattcctcaagcatgcgtggagctatgtataggtttttttcctcttcgtctttcttctcttcctcattacctttgttgttctcagatgcctgcaaaatattagtatccaaagcaatatgcacaataatacgttcgttttgtaataactcagacttagttgaaggcatcacaatagtatctttcctggtatctctgaaagtctcattgattctattcttcaacctttcaagatcatctttgaaaatttcagaaaagcttattggttccaatttcatttttcgaccattatgtctaaatgtgtatgtattagcaacaaaattatgcaaaccattattatcatatacccatagtttaccaaacaacaaagaacatgcttgcatagggacaagatcaaaatttgcaatatcatggtaacttccaatcgaaaattttattctcacaattctatttaccttgaacttaccacaagagttgaaccatttgatgtaatatggatgaggatgcggttgtgtaagcaactcaagtttctcaaccaaatctgaactcacaaagttattgcaactctcactatcgattatagtacgacatgctcaatccttaaccgcaaactttatttcaaataattcgtggtactgccattgctccgctttctccatttgagaacatagcacttgttgcaccaaagtactgtcatcatgtgcaccttgttggtatcgctgattttgagcgccactcatacctgtcattgcaaacacaaaaacaacagcaaacaataaaggttatccctaataatctgctacgcggtgtagtggtgcccctcaacaacttagccaaatggagcaccttaccaagctcttacaagtatcttaccagcaatgctaaggacggtacaatcggtggttggttcgtgacaccatgaaggacatgatgtggcgattgcaaggatcaaagcggtgctgaccagaagtatatatgtgtagcttggaaggcacaatatatagtagcaaaggaacgcaaatgtgctaatcagaaaatgcaaagttgaataatagttcaaagtactagtcaatgtgttggcctagtctagactcaactcttgctcaagcaagcacccgacaacactaaggactagatatgaatcaatgcacaactctgcactctgaaaacatactcaaaggatgaatggttttttttctttcttggtgcggcttttctttaagcacgtttctgcaattttttttcttttctttttaggtgcggctttttttttctttctttttctttgcacctttctgccttttctttcttttttatttttttactttttttttcaacaagaactgaaccactaacctcgaacaaggactcaaatgtaaatatgaatattacagggactcaaatgcaaagaacaaaactaatattggatcacctcaaaaaaggattgctcatatcatgtaggttcagtttttataaaaacatctcaaatccgatacaacaaatatatgatatagggaaaacactcgatactcggtccggaggtggagagatcggtacggaggagggggaggtggagagatcggtacggtggagggtgggaacggcctcggtcaagtggaagagagaggtggactgtgtagtggctggtcaaggtggagatggactcttctatgggccttgatgtgaaacgtacggtggcccaagaaaaaaaacaaaccgttcttttcttatgcaaacatatatatatgcataaccggccgggataattcagaattaatagaatttcttttcaaaaagaaaaggatcaaacgggtttaatataaagacctggtaggagggtgggatggaatgatcggtgcttacctttgatggacggtggattagagcgggagtacaaacacctgggtgtacagattcattttcatatatatatatatatatatatatatatacatatatatacatatatatatatatatatatacatatatatacatatatatctatatatgcaaataggatatatactgaaattttcggaggaagctcgtcgcccccgcgcaggtgacacggggggcgaaacactagccgccaccgccgccttccttctccccctctacctcaccttgccgccggcaaaactggctgacgagctatgacggttgcggtgggaccttctcgcggtgacgcctctcctttgcgcgcgggcgggggggggggggggg

SEQ ID NO: 16658 - DNA, 7141 bp, Oryza sativa
ggggtctcccaggctggccggcgacagatctggccccgccgtcaccggacctacgacggcgacgtcgggaggcacgatgtggaggcgattaggcggcggaggttgttgcggcgcggggcagcgtggtggtggcggcccgcggggtggccggcggtggctggcgctcgcggcaggtcggcgtccggggcggcgcattggcctgcctacagctgcgccggctgtctccgtcagtcggtgggattgggtcctgccggggggtcgcgtcggcgactccgaccgctccagtcgctggcagccaccatgttatctccttccttccctactctttcttcctctttcaaccgtctcggcacaagcagtagggggtggccgccccccattttcttccttcttacagttgctatgttgctcaccccggtgctcctctctctgcgctggtggtgaagttggaggtggttgccacagttgttttggattgtcccacgaagcccgaagatcctcgctggaaacatggatgacaccgatgtctttgttgcccttgctgccagttctcagtttcaccttcagaccggccaggcctcctcccctccttgatgctcctcccttctcttggtcgcctgctcccagaccggccgtggagtcttttggtggttgagtttttttcgtccgtgttggtggtctagtctgttggtagtaagggcgcttgggcctcgccgatgcttcacgtgccctgtggctatgtaaacctgtagttgtgccgagtgtggagcgatgtgcttaccccctacggtgttagagtttttgtgttaaagtggagttggagctgtcatcgggttcagccgatgagctaggcaacgataacactcaacactcttgctctagcttcttagaggtcctgtacttcttgagggagtcttgggcgacagccctgcctggtcttctaggatcggtgacatcgatgcctatgggtgtcgtttcctcattggaggtgttgccttgtggactctctccacttcgggtgaaaacccagtccagttttgggcgggcgttggcagcggcttctgtcattgttcacctccttggaggctacgccttgaaggccttgctcttctctggatcacttctgtgggtctagtcgttttgtcacaggttttttgtgtcttttgtgtaaggttttgccagtttccctttagcaaactgtgcagctgtacggttttcgggccctattttccttataaacagggtcaattctcttctaatatatccggtagatctcctaccgtcttatgtttcaaaaaaaatatatatgcaaatgcatatgtatatgtacaaaatacacatatatgtattagacacgtataatttaaagcacttaacattttatgtgtgtcagggttacggataaggtataccctctatccttggatatacgtcatgtactggtatggtatacctgcgcgtatacggacgttctctgtacatgttaaggaaattcatcatggagtccacagatggaaggagtcctactcggatagaactgggtcgtcactgtatcgtgtagggtccgatgtctccgagttctacttggagaccaactgacctgcggtataagagggaccccccgggaggatctaaggcatcgaatctcaccgccaacacaaccaccacagcctacaaagtcggagccttcaggagcctagtcatcggggtgatctaatcgaaccaactcgactgcggtctcgtcggtatcatagagttctgctattccctttataatctgtggttttcactatataatctaatatcaactggattagggctattacctatcaaggggcctgaaccagtataatccttgtttcctatttgcttgatgtcgtactacgtagatcctcgtaccagcgtaccctaataccctctatatccggtctacgggtatctcccatcgacagtggcgcgccaggtagagacaaacgaccatgtaagacctggtcatgtaatagttctcgccgtgtgtattaaccaagccatgtaatcggaaattgagttttccaccttcacggctgggggctagggtcagtgcttttttcaaccaaggcaggtcaagggtccaagagccttatcctccgagaacgattctccgacgacaaggccgggggctagggagagtgtatgactcaacaaactgactgatcgaagtcggtaaaagagaagacgctcatatacaaaacattggtttgtaaatttaatttattttcagttttccatacatattataacatgtcaccctttgagcgttcactcgggggctatttctatctaatattcttttctgagtattgatttcaggaaaattctatttggcattatcgaagactccatgtctctatggttctataccaagatcggctaaggcgagtacgacaaatgttgacaaggctccgtcgcagattctgcgctttctcgatcactcgagaacggttggtgggtctcgacaaggaatacggaatgaagagatggtgtacccgccgagataaaatttcttgacttcaatccaaattctcgattacagcaagacgggagacttagttgtatgctctgtactttcttggttgacatcggagattgactcaaacaaaccctataggtgcccacatgaggctgataagggaagtctaacgttatctctgaactcaccgagaatggtcacgtgagctcgataacagttactccaaggtctgcggttgagaatatgaatttgttcatttgcattgaagtcgggggctactatcagggttttggataccacatacctaatagttgttgactaaatctcggtaggacccaccacataccatgtcctatacggaaacaacctgcggatataggaggagttccggataagggaagacaaccagagttctacatggaaacgacaaggactactcggattgtatccatattggtttccctagttctacttggacaaggggacacctatgagtataaatacaagaccccctaggaggagaggagacacggaacaacagaagccacaacatacaagccaacatacgccaagacaagacgccggatatcgacttcagagataggcacggctagtcccctacggtgcctacggataccgtcaggagagatatagcgctgtctctaatctcgccggatgcggattcgaggaggaaggctaccctgttgtcgactacgagtcagaccttcagaccgccatatcgactacagttagataggctaccccaaatattatactggtgtgattatgatgaataggagcaacgaccggctttggccaacaggatgtagggttattacttgacaattcaggggcctgaacttgtataaaaatccgcgtctccatctcttttactacaatctcgcatatatcctagtaccaacgatccccatactatgcaaataccggaatcgcgacatcaaacgtcgacaatgtgcatatatgaccaaaatatatatttacgctaaagtaaatgtgtacatatataaatatagacatgtattacaattcattacgtgctctagctacggcttcgacatcggtgttatctcagaagaagaaggaatgatcttatgaattgctgatctgtcgtagtagaattcaccctcgggatcaaggacttgttcattgatgaatcccatcagttgttcttgaacagccgcgataaattccttgtgtgttaggttgtctctcatgtgaataacctatgaatgtatgaaattaattaataaacaagaaatcgatacgtacgcaatgaaattttgaatggtttatacgtacatcgggctctcttgtggtgtagatttgggttgaaaggcagtgggcatactcgcatacgtagtagccgcacaagttagttccctggctctgctttgcacaatatacatagcaaacgacgagagatttaataaacacttatatttgaattagagattcgatataattttggagcatgtactcactggaaaattgaacctccggctaagtttttctttccaagaaccgcagaccaattgacggaactgatcctaagccctacatggagtttcaagctatgattaattactattcgagatccccatagtagcaatagcaaaattcgtaataacagtggaacagatgatatcacctgtctataagttcaaaaacttggtcaaaagtagactcatctttattcattgagtcatagacattgactctgctagcctccaagtcgaaaagtaaaaggacccggtggaatatgcaatttgcgtgagatgatatatgaaactatacatgtatgtacgggaacgaaatttgttcggaagatagtaaaaactaactctgtgttgtacggcagtagtatgaatgtcttgaaatgctgctccttcaggagatggacaagagtgtcctctgtgtttttcggatacatgatcatttcgatgttaactttccgagggtcgatgaatccagtatcgaaatccccccgccatcgggccctttgaatctcaattctacaatgagaaaatgaattattatggtgtacatatatacaaagagctaattaaggagtgtaataaatctaactcaacaatacttacaaaatccatgcgcttagaagagagatgtcgaacgggatccagagaacatcttctccttgcaggaagttggacgttctgatcctcgttccgatcacctctctaccgttggcaatcatttccatttactgttcatggaatcggtacatatgtgtcagtagggactttagctgctcaggcttgacaagcggtttaccgagttcgaactagtatttcacttccaccgttgggattgatgcgcctttaagcaactgagtcctagttagtccggtgtcagaaatgaattcttttattccaatttcttgcccggtcaccaacggctcgacctcctggtttggttgctcgccaagctgagggactggtttggacttcctataatatgccttcttaagtgttcgctcgtagtctattagctttaagacctccttgactagtttcaacattttcttgaagaagttcttgacacttgggtctacaggtatcttcttttctggactccgaggttttaattgcctcttcacttctgctgccacataagcgtctagctcctcttgtgtgcaatcatacggcggctccttgttttcggcggcatcaactttcgccttctgcgttgccgttgtgcaggcaggcggtggagcttggcgagaccttgacttggaaggtgccagaggacacggtgcacgagccaaaggagacggtgcaggagcctgaggaggagacggtgcacgaggcgaagaaggcggagaagatggcagagccgaaggagatggtgcaggagacgtcgcttgtttcccaagaaggatgatgtagcacttgcgccatagtataatggtttggcttgtgtctcgtagatgcatatcaccgtctccttcaaggtagtccaacttgaggtcctcgtacgcggcttccaccagctcaacttcgaccctcgagtatcttggtggaatcggcctgcagtgttaagtccctgaagggtccgttgggatggccattcccgacgccaccttcacgtgatgagaggttatcttctattagtaatcaacctaagtagcaacttgcggaatgtacatgtcaaaaatcataaaactatgagcataccttgattgataagttcttgaagggaatatacagctcacatggtgtccgctacgtgatttcatcaatggggcaggtggtttcgtcctgagtttgcatggcgtccatgctctgtgatcctacctgccccgttgaggcacagctactacgattgcctgaggggctgaccatgataggaggaatgtatggctggggatcctggctccgatatgcggccatgcgttcatccacctttcttgccacctcctcttgcatgctaagctcgtagttcgataccttgtactcaagatctgcaatttttgcctcagtatttctcttgctcctcatccgactcctgtacgtatggatgtcctccatgaatccaatcttccaaggaaccacgcctttccctcgtgttcgtcctggatgctcgagagtctgtagggcgagtgtcagctcatccttctctctgtcgggtcggaatgtgccctgagaagaggcttccactgcgtccgttagtcgactggcagcctcacgtatctgattgctgaacaccagggagccatcaacaggtttgagctttccaccgtgagcatagaaccataactttgatcgatcgggccatttagaagtggccagttcgatacccctctcaatcaagccggcttccatctcctcccacttcggcattgcgacgctatagccgcctgacccaggtggtgatggtacttcttcttagcggcattttctttgtttcggtccatcagcgcttgcccttgtttccctgtcttgtaagcaacaaactcatcccaatgatcccttagcttcgagaatatgttgaagttcggtgtctgcccctttaggatgtatttatggtagagatctcccttgaagctctagaactgttctgccattttgctaagagtccactgtttcactatgttctccgtacccgcagggagcgtgaatgtctcgagcattgtggtccacagcatctctttctctgaatccacgacaaagcgtcataatccctgcgtgcccttgttctgcgctagtacactttgctaataggcacgttatcccttacaacccaacagctgtgtcgtacgtaattcctggctacatctgacgtggcacttcagttatgatgtgccgactctctatcttcttcacggcacctcgttttcggcatgccctcttctgtccagcggagggttgacttccactagcctcctcctccttggtttattagagaatctgtacgagcgccaccaacggatgcccaaaaggaataagttcactttgactcccttaataattagtgtccaaatctgattcctatccctaaaccataataccatatatcacgacccctaactattgaaaccggaataatttgactctttcaacggttttggagagcggtttcgctgacatgacg

SEQ ID NO: 16659 - DNA, 5204 bp, Oryza sativa
ttgatttccatccaggtgacgcacgatgatgctggagacggtggcggctgtgcccgccaccggggatggtgggcggcatatgctgctccacctctgctcgctccgcgacatcaagcacagcgacggctggatccgtgtgttgttggaggaggctgagaacgagaggatgcacctcatggccttcatggcggtgcccaagcggaggtggtacgagcggctcaccggccgctgctcctcgccttgacatgtgggtccacatgagtcgcacgctgagttagctaggttaatcatagttaacttgccgtgccaaccaaaatcggacactatattgtccaccggacggtattacaagttgaggagcgcgttatatatatatagtattgtgatttaagaatgaaattcaaactttagtttaagatgagcgactctaagtctaagtgcacttaaggcttgtttggtttacaaccataccaaactattggcgatgccaaatcatgggccaatttttttgctagtgccaatattttgacaacatttgtatgatattagtaagtattggtagcaaaccaaacattggcaaaattactgttaaaaatgccaatattttggtatggcaagttttggtttcaaaccaaatcagcccttatttcttgaaattttttatatttatatttattttttaaaaatattttaaaaaataaattaccatttcaaacatttgcaaaaatcgctctactagaggatgagaagggcctacatgtaaaatttcctgcaacacataagacgtagtatttgtacaatttgtaaaattctcatgtgatgtcagttgaagttaaagtttatatgaaaattgtagagcttgatgatatttacaactttgcagttgacaacttttccattaaaataatttatgagtcttaatacatatatttatatttatatttagccccctcccatgaggttttcactaatctgaaaattaatattgattatttgatactctaaatagttttaaatgaatgagtggccaagtacaaaattatagatctcatcgagctccacaacttcgatatagaacttgtctccatcggaggtcgtttaaaatgtaggtctgagaatttataaaaataaatctaagacattctaaggaatatttagacccataaattattctaatggaaaagttataaacaacaaagttgtagatctcgtcaagctctacaatttttgtgtaaattttaacttcatccaacatcatatgataattttacaaatcatacaaataatgtgtgttatgtgctgcagaaaattaaaattttacatttagaggacgagaaggaactaaatgcaaataatttggaaccccgtgttgccacgtcacataaatcgccctctattagggcgatttttagggagggaggagtatatttttacaaaactttgaaacggtaatttattttttaaatcttttaacaaataaatataaaaataaaaaattccttatttcctctgttctttccttcccttttcaaggcccaccaggcatcagcccatcttaattttccttttctttgcagccaaggagtcgaattattgcacgaataaaattcaacccaaaagaaagaatcagaacattcagctggaaattgtttgataacatgattttcctttgaggaatgatgcaggagtataagttaagaccacaacttgatttttggtttgagatgcatttagatttgattagagttgatttttttttatttttttcatctttatttgcaagtcattaatagcatgtagataaaaagttttacacattatttttttctaataaatcatatggataagcacaaacatgtgcaaaacgaggttttagatggtatcagctacaatacttttcgaggtctctcggtaaccaaacactataagtttcagtacctacactgtattgttttcctagtacacgctatagaacaaaattaggataaaaagaattgtagaagagaaggtagaaggcataaaacataattaagtgaaaaattatgtctagatattgtttacaaattcaaaagtatagcttgctagctttaaaaattaacacatcttctaccatcaacctaatagcccacctagttatagatatatactactccctccatctcatatttccaaatctgaaaaatctatttttgataggcaaatttcaatccaacaatctatcatcttaataactttctcggatttaatgtatgactctccattcttccacacaagattggttgcatggacatcgagaaatgtaaatattaatgaatcgcttgtttacgaggaatgactagtagcatgtttaaatagatgataagtagaatcacttattattggtctatgtgtcaagatgaaatatgactatcaaaagtagatggagggagtacatcattaactctcagacacaacttatagaggcttatgccttatggtgcagttagctataaattagtaatctgctactcttctctttcttatttcttatactctcttctccatcttagcacaaatctgatgtgacaattcttacatcccacccatatatcatctcattcttagtcgggcacctccagttgtcaccagggctcaaattttcggaatgaaatttctaaagtttcggtcttttcggaaccctcctcccccgatatgatattatttcggcctaaattttaattttttttatatatatttttgtgaattttgcaatattttgtttaaatttgactaaaatttattcaaaactttcgttatatcggtaccctccgatagaaacatccaaaccgaaatattaaatcctagttatcacttgccaccacactggtgcctcgatcgctgccccgagatcccgccgagggaagaccatgctattgggcacctcgtcatcttgccgcttgcgatgctggtcaacgctgcaatgcctcatcatggccatgcaagcgcaccatagcatcagccgcgccgctgcaccgtcgctcctacccttaccagcatgtctcatccgttttttttacaaattggtccttttcaaaaacttattttaaaactagtcccagcaaaaaaacttcaaccaaaaataagccgtggactcagcgccatggacattggcgctaagttataacgtatcagcgccaacgtcgttggcgctaaattcagcatgaattcgctgaggtccatacgatttaaatagccacgcaagcaacatatagaaccaagactgtgatggtgtggtggttgtgacttgggctgtgatccatagagtgttaggttcaaatcctggtatccctcatctcctattttcttttgtatttttgggtttttccttttctcttcctcctagcattttttagaattaatgtattttacaaaataagttttgctctcttgactactcactcttgttctttacaaaatgactgttccgtttgtaaatttgttttattttgaatttgatttgaaatttcagtttaagttctcatttgccatataatatagcactttaattttttttcaaataaaaaaagttgcatattttcttttgtatttttgggttttttccttttctcttcctcctagcattttttagaattaatgtattttacaaaataagttttgctctcttgactactcactcttattctttacaaaatgactgttccgtttgtaaatttgttttattttgaatttgatttgaaatttcagtttaagttctcatttgccatataatatagcactttaatattttttcaaataaaaaatttgcatattaaacatatattttgaagatagtattacaagacaaaaaaagaaaataaataaataaagatataaaaagaaaacgagataaaaaaagaaaaaacatattaataaagagtgagggagagaagaaaaagggaaaagtaaaaggaaaaaaaagaaaaagaaaacgagataaaaaagaaaatatatattaataaagagtgagggagagaagaaaaagggaaactagaaggaaagaaaaaaggagatgggagtcgaactctgttcctgaagtttaaagtagaacgctactaccattatgctatcaatctggcgttgctagagatgcctccgaatttatttaaatcgtctggacctcagcgccaaatagatctcataactcaacgaatccatgccacctcggataagagtttagcgccaacgacgttggcgctgatacgttatagcttagcgccaatgtctatggcgctgagtccacggcctatttttggttcaagttttttgcagggactagtttcgaaataagtttttaaaaaggatcaatttgttaaaaaacggatgttactagagctgatttttgcggcttggaccgtcgaaacaagaattcggcaataataaaaggagtagcgtacgagacctaaaagtggatggatgcagagataaggatttagacagattcaggccctctcactcaatgagaggtaataccctactcctgtttggggatttgaatccgccgggtgtagtattgatctgatgatcatatgtgctcataccccctagagggcctcctgcccattttatataggatgggggacagaattacaagataaaaaccttaaccaatacggtatcggcttcctaaatctactttataatatcatcaaaccagggactttgcgtggaggagaggggcggcgggggcagcaagaagtggccgggcttcgtccagttcttcttcgtcctctccgtggtcctctgcgtgctcctctacgccccgcggttcatcgtgcttacgcccacctacggcctcgacttcttccccagccgccgcccaacgacaccacctcgaccgcccgcgtcgtgggagatcataatgctggcgacgtggtggttcttgacaaccagctgcgctcgccgtgctcgtcgctcgccggcgacaccatctgctgcgaccgctcgaatttcaacaccgacgtctgcttcatggccagcgacgtgcggacggacccgtcgtccctgtcgctcctgctgttccccaagcagccgccgacggcgaacgccaccgtggaggagaggatacgtccgtacacgcgcaagtgggaggcgctcatcatgagcagggtcgaggaggtgcggctccggatggctcctcccggcacgacgcgccgctcctcgtcatg

SEQ ID NO: 16660 - DNA, 14940 bp, Oryza sativa
gggtcgaggaggtgcggctccggatggctcctcccggcacgacgcgccgctcctcgtcatgacggcggggggctacaccggcaacctcttccacgcgttcagcgacgggttcgtgccggcgtggctgacggtgcaacacctccgccgccgcgtcgtgctcggcgtcctcttgtacaacccgtggtgggcgggcacgtacggcgagatcatctccggcctcttggactaccacgtcgtcgacctcctccacgacaagcggaagcactgcttccccggagccatcatcggcacacgcttccacggcatcctctccgtcaacccggcgaggctccgtgacaacaagaccatcgtcgacttccacgatcttctcgccgacgtgtacgagaccgcaggagacaccgtcgtcgtcgacgttccccagccggcgccgcggcggccacggctcgggatcgtgtcgtgcagggggaagcgggtgatcgagaaccaggcggcggtggcgcggctcgcgaggacggtggggttcgacgtggacatcctggagacggcggacgggttgcagctcccggcgtcgtacgcgtcggtgagcgcgtgcgacgtgctggtgggggtgcacagcgccgacctgaccaagctcctgttcctccgccccggcgcggcgctggtgtagatcgcgccgctgggcgtggcgccgatcgcgcgcgggtgctacgcggaggcgtccgcgcggatggggctgcactacgagcagtacgacgcagaggggcacgagagctcgctgagccgcaagtacggcctccgcgacgtggtggtgtccgaaattgaactataagccaggttttccggtttctccaaattctcaccaactagcttctcgtagttgtagaatctagaaattgaactaaaagacaaaagctaggttttccggtttctccaaattctcaccgactagcttctcatcagctgtttctcagaattttaagctcccaaaactggaatgtaactaatatgtgacttgtctaatcttccaaaaattgcaacagatcaagtagctagtacgcacggcttgctggagcgaggtcctcagttcgatcccctaccagcgcacaagctaatcctcaccctagtttacattttcataggcaaacatttggctccgagagacattttgaaactggggatgagttgcggccttttccgatctgtctataatccgtgctaccttggccctgtttggttccatgggctaatgtttaaccctcaccttttagcctcaaattagccctcaagaatccaaacatgtgggctaattttgagctaatgtgaattagcccccctcaaaacattagcccctccaaggggtgctaatggggctaattttgtatggggacattaaaaagcagctctctctctctctctctctcctctctttctactctctctctaacttttagccttgaattagcccatggatccaaatataccaccctaggctaatgtttagcctaccaattcatgactaaacattagctcttaaaattagccttgggctaatcttccaaacatggcccttgtactttcgcttcttaattactatggcgtaactttccctgttctcaatatatgcggcgacaaagctcctataccggtttaagaaaaacaaacatcctgaatatcatgaatggcacatggatcgagcaaccatattttgatccatgacttgcagcttggagcaccggagatatattactggaggacagtaatgaacgtgaactgatggtcaactacagatttgagttgggtactcatccacaagtggatttgtcagtcaaaactcaaaagtcagtcgctttaatccgaagattttgggttgttcacatgtgatggggctgcttaattgtactccatgtagatattttgagtccagaaccacaagctgcaatgcagcaatgtgctaggcattttatttgtcgtactggatatatagtttatatagctagtgtccgaaccttcagcgtgtcgttaaattcagtgacttcataggccaacttggcagttggcactagaaactcacgtgtatatatacctactgtgtgcttaacaccacgcttctggaaatctggataaacatttaaatttctctgactttatattagcaacagttgttaaaatgcagcggaaatctattcaactctgatcttgtttttcttcccggaattttggcccgccaatttattttagttttcacattatggaattgtgaaccctggaagaagtggttgtgcatggccgccttcaattcatctttgttcgttttaaaccctttgggccagctataagctagtaggtattaaggtgttgatcgatgatggataaaattgagtttgtaaaaaaagagatggatataactgagtttatgataattattcgagagcaccaaatgaatgaattaaataatagagcatcaaaatgatgatttaaaaagaagtacatactataagaaatgctagtgattttttttaaaaaaatcatattaattaagtttaagcccacaataattcgtcgtccattagctcagcaattctccttctcgttcgttcttcctttcttcttaagacatctcatgcatgaccttctgttgattggtccatcatattttatggaatgtgccaatgtagtcgacgcatatgcgtctataaatagctggctcgtctattgatttgtgcagtcacccggcccacaggccacagctactagcagcagcagcaagactgcaagagggggggaagaagctaggtagctagtagtacgatgcagcagccgcaggcgagcagcatgacggcggcggcgaggaggcggcagctgcagggatcggtgctcgccgggaagatggtgctcgtgcgcaaggctctcgacaccaacttgaactccggcgacgtcgtgtgccagctggtcagctccacggtcggcgaccccggtgcgtatctggaatcctctttcctctttctcttaactagcatggtggcccgcgtagattgcccggcgagcatcattatattttctctcatataatagtatatatgttttctcaatgtattattcaaatatattaaaataccaacataattttaaaattttgtattacctttacgaaactactaatgtataatatccatattgtattttataaacgtgttagttattagttatttttaatatcaaattttagttatttgtaaattatattccaatatggactctagactcatctttcaatatttatttttttaatttcgaattttcgttatctataaattgtatttctttatagactctaggcacttcttccaatattatttatttttaattctgactttttcttatttctaattgtatttctatgtggactctaaactcatcttacaatattctttaatttttaatttcgaatttcagttacttctaaattgtattcttatattgactttagattcttcttcccatatttttttaattttgaattttagttatttgtaaattgtatttttatacgaactctaaactctacttttaattctattatgtttatttcgaattttagttagttttaaattcttatatggactctatactctacatcgaatattccttatttttaattctgaatttctattatttcttaattgtatttctatacgaactatatactctacttataatattccttatttttaattccgaatttctattatttcttaattgtatttctatatggactctatactctacttctaatattccttatatttaattccaaatttctattgtttcttaattgtatttctatatggactctagtgtcctcttcaaatattccttattttttaattccgaattttctatttttttctcaattgtgtttctatatggactctagtgtcatcttccaatattccttattttttaattccaaatttcaactatttctaaattgtatttctatatggactcagtttttctttttctctaattaatatgagaatttctaggctatgggagcgaacgtggaggctcctttttctattccttaaataagttaatagatttctaaattgtatttctatatgctcagtttttctttttctccaattaatataagaatttctaggctgtgagagcgaacgtggatgctcatttttctattcctttaataagttaatagatttaatttacaagtcgaatcctgcacatttcgcgcaccaaattcacatccatacattgatacatatctgcacacagctagagaaattgaagagctagatcatacatagcgcgaatatatacattttaccaccgtacgcatccatatcgtctatgtcacgcctagaaattcactagtaatttccgaacttatttgtgcattaaatcctcatccagtaatcagccgaggtacacaaactgacaatttaatatacagattcatcaagttaactaaaacgataaatacttacataagaggcacttagtcctcacaacgaagaaaactgcagcgaaaaataaaatctagcgaagctccggctccactcccacaggcagctcaattggggtataagccaaacgtcttctccttcgcaacttttcttcaactgaggtttgattgattattgcaaggtgagcatatgacatactcagcaagccaaacagcaagtatgcaagtgtacaaggataccaaagaatggcataatatagggctcatttgcaaaagcagcatttagcagacatttgagaattgtaaaacagtagagtaattaatcatcaatattaatcaacactgaacagcacacccatgctgcacaggccgaaccatcctgaacaaccatacccggctgtacagatctatctccaaaccaggaatgtaccattccaaaccaggagctaatcaaattattaccagttataatatcatttattatggtgagaagtgtgagactaatcacgaaaggcattgttagacccgcccatgaccgcgggcacggctattcgaatagttttactctggccagaggtgtaccactgtacccacaagacacgattccacacatgttactatgccctaaagtaccaccacggcactgcaaagggggaaatcgtgacagtacccttcgcacaacacaactcaaagtagtgcactgttcctggattataatcacccccttataaaacaaggcatggactccccagcgacccccgtgggcttatctccgccacttctcagtctggtgccccgcaatgaaccatgctatacaaaagataaagccgttgcccatgctggcttatggttggcacgggttaatatttcacagccgaaactcgtgaaccggtccttaattgtcatgagcacgaccatcaaaaccatgtactcacaacccaccattatcaagttttagttggcaattaattaattcacaatcacgattgaccatcgtgagctacaattaaatatccatcattaagtaatagtgaaacattagttatctcaatagtgtgctaatgtttctaagcatgactaagcaattatatctaatacatctagctgaaccaatatataaaactcaactagtcaaattataacccgaggtaatcaagaaatagggtaatcaatgcaaattggccataacaaaggaacaggttcacgccacccggtgacattcgaaaataaatgcacagttgaaataaatagagaatttaaatataggatcaacatgctcaaaggaattgtgtttgggatctatgtgacttgtcttgcaataaagggtcttcaattaatcttcttgaatactcccgacgcactcacggaccttcgaaacgacagaaacgacaagctaacacgcaaaacgagaaaaaagactaagaaactccaaataaacagtacataaaagtaaacaaatatgtagatcatgattttagatgaattatgaaacttgaacggcctcattctgacttcatatgaattagttatgaattttacatgatttaattccaactaaacctattaaagaaaagactatttcaaattaattaaataatttacaaatgatttataactgagataaaagattaaagcaacctccggaaaatattagattatatttggtacatgacatatattagaaagaaataatatgccactgaaaagagagaacggatttatatcaattttggacggctgagattaatcttgaccgagagttgaccaagatcggatggcttagattaatctggcaagcgagcctcacgagatatcaactcaacgagtcaattctacatgacacatgatcacctaaatgatcaaccgaaaccggcgaacggaattggcggctctgaactaaaggacaactcgacacggacgaatgaacgaagcacggggaacacctcgtttgaacgaacgagcgaacgactcaacaacgtctgcggctaaaccggtgagctagacacgattcacggtaaagccccggtacggcaaacgataggttggtaggaatttagggatgcacctacggctagacaacttgactactgagcaacagctaaagcggcggttaggttaaagtggcacacagctgcgacacggcggcactagggcgacttggctcagctaggcggcggcggcgacacacagctacggcagagacacgcggctagggttaaggcgatggcacagcgacgacagatggtggctacggtagcgggacagcagcaacttggcacgcacgagcagcagcagcacggctgtagcagggagcggcacagcgacggctaggcggctagcgcagcgacgatgtacagcggctaaagagcgacgcggcggcaacaaggtgctggcggcagcggcggtgcacagggcagctgccaagtgacgcggcagcggctgcgctagggttagagcaacagcggcggcgacatgaccgagggattgaaacctaacccgaggggacacggatagaagtctcgccgaaccaaatcgatcggagagggagggtcgatgatgacgacgctagacaaacaacggattagattagattggattaaggccctagggaaaaaaatctataccggtgaacgtcataggagcggcggttgccggcgaaccacggcacaataatgcaaacgaatgcaaacgaagggcaccgggagaaagaggaggcaacagcgattcttaccaacacttacgcgacgacggacagctacggaagatggccggcgacgagatcgggacggcggtgagatactgtccacggtggcgacggtgtttcggcgaccttcggcgacaacggaggggtggacggccttcggcttggtgctgcgatgccgacgacggcctcggggtgaaccggcgacgactgcaacagcaaggaggctcggccggagatcaaaccgaggaggcaaactcggccttcacggtgacagcgacttccagcgagacttggcggaggggaaccggtagacggggtagatctcgaccttgcggagccgatggaggtggcggcgcaggagggcgacggcctaggcgacggcgcacggctgctggagtggcggccggaggcggcgaagcttggattcgagtcggcgaggtacttccagaggtcttcggcgtcggggaagtggaggccggtcttcctctccttcctgcgaacccaacggcggcagcggcaaccgaaagcgacgacagacgacgacgaacggcgcggctggagcggcgccggcgcttggagagagaaggagagcgcggggagagcgattccggcggcggcggaagacgggacttgagaggataggtagaggacgactagggggtcctttatatgggcacgggagctcgggtccgggcccaagtcgacgggaaaactcgggaaagtctagggttctcgccggaaaaaggaaagattgaaccgcgaaattggaaaggatttccatagaaacttttggggatttcttggggaaaaggaagaggagattgagaggattccattcccgcaactaatttggaaagaggagcaacggggaggtcggatttggaaggggatcggcgcggcggcacaggctcggctcgggctctgtctggaggttgaagatagagtactgtagcgccagggaagtcaaacagacttctctgcgggctgactaggaaggaagattttattgcttttccaaataaattaaccaatgagatgatctttcaattgttaaaaatacttccaatgcttaaataattctaagaaaaatctttaacatacttggacactcaaagtatttattaaaatttaaaccagctcatttcatgattaatttaatatgtgaataattactgaaatattctttgtattattaaaattaggaattgagctctgaaaaacccgagaaaatttcagagagtataattaatcatggagaacttaatacaaattaaattcatccatactttatatttaggaaattttattttctacatttaacttcacttgtaaattaataaacatttaatataaattctattaataatctattaaataatttataaatcctaaagcggaaattcaggctgtgacagtctatgtcccagggaaacatgagcactcatgtcaaatttaatactttaactcgatccgatcggtggttatgtttgatcagttaatatatatatatatatatatatatatatatatatatatatatatatatatatatatatatatatatatatatatgctcagctcatcactacaatataatcatttcttttataaaaaaacaacattctttcaactcatttttcaactctattttaaacctacaatcccttgtatatatggacgaagagagtataacgcgctagcaatggtacatacattttagacaatggcaacagggggatgttgggccaggaggcatgcgtccatatcaactcggagctacacccaactccctacgaggcctccacattcagcttcgagttcatctgggacatgaagaaacagggtgtccccggagcggtcatcgtcaagaactattgcgacgaggagttcttcgtcaacaccatcaccctcgacattgtaccgggctatggaaccatcgtcttcaccgctgagtcgtgggtttaccccgacgagatatacgaccatctcccccgtgtcttcttcagtaaccaagtaagctcgtcttgaaatattctaccggtcatgttttatgtactttgtgaattttgatcgagaattgtccgtacatcgtcactggtatacccatttttgtgattttgaaatgacaacgtcggatttggcactttaattgtttatatgatcgtgggttaagttgtttacaaacgttatatatgatgaaataatataatataaattaatgatcaaaactctatgtaacagtatacttttacaattcaatactccctccgtcctataatataagggattttgagttttcgtttgaactgtttgatcactcgtcttatttaaaaaaatttagaattattatttatttttttgtgacatactttattatctaaagtactttaagcacaacttttcgttttttatatttgcacaagttttttgaataagacgagtggttaaacagttcaaccaataactcaaaatctcttatattatgggatggagggagtatatttctataccagcagtatatagacgggcaaaattataaattttatagaaaattgaaaagggctttctagtaattttgtggttgagagagttaatcggttcaattgggacttatatataagcgtttaaaaaatatatgcaactttatactcaagttatgtagaggtaacaatatagttagatatagatgtggtgtaattacactatagtttttttctcgaacgcacaaaaggattgcacgtcaatatattaggtaattatactatagttacaatgtaatgtacattatagtgttattacatttgaaagttttttacctaaaaaattcgcgagaactttaagcaatttccaactgacatatacatgtacttgcacagccatacctgccaaaccaaatgccggcgccgctggtgccgtatagggaggaagagctccggaacctgagaggcgacgacaatccgggcccgtacaaggaccatgaccgtgtctaccgctacgacgtctacaacgacctcggcgagccagacagtggcaacccgcgccccgtgctgggtggctccgacgagcacccttaccctcgccgctgccgcaccggccggaggcggaccaacaccgaccccgactccgagagccgcaacgtcggcttccccctaaccaaccatttctacgtgccccgcgacgaggtgttcaacgaccgcaagaaggcctacttcgacaccaacaacctcaagctctatatcatgcaaaagtacgccacctttctcttgcacgccgaccagcagacccccttcgagttcgacagcttcgccgacgtgctaagcctctacgacgagggctccatcaacctgcccggatggctcaacactttcctccaaccattgctcggcataatccccttcaagttgctccagcaagtcctcacccccgatagcgagttcatcctcaagttccccatgccggcggtcatcagggaggacaagacggcatggcaaacagacgaagagtttgcgcgcgagatgctcgccggcaccaacccggtcgtcatccgccggctcggggaaaccgagttcccgcccaagagcaagctagacacaagcaagtatcacaaccagaacagcaggatcacagcggcacacgtcgagaagtgcctcgaggtcgagggcctcaccgtcgagcaggtgctagccgacggccgcctcttcatcctcgaccaccacgaccacttcatgccgtacctgctcgatgccaaccatcaacccgacactttcgtctacgcgacgaggacactgctcttccaccgcaacgatggcactctccagcctgcagcaatcgagctcagcctacctcgctttgaggccggcagcacactcatctcgtccgtcggcgaggtctacacgccggcgtcagacggcgtggagggccacatctggcagcttgccaaggcctacgtcaccgtcaatgactactcgtggcaccagctcgtcagccactggctcaacacgcacgcggtgatggagccgttcgccattgccacgcaccggcagctcagcgtggcgcaccctatccacaagctcctccacccgcactatcgtgacaacttgtttatcaacgccctcggccgccagagtctgatcaacgccggtggtagctccgagaacaccgtcttcctcggcaagtatgggctctccatgacatcggaggtgtacaggaactggaacttcaccgagcaggcgctcccggaggacttcatcaagaggggcgtcgccaagcgccgctccaatggcgagctggagctgctgatcaaggactacccgtacgccgtcgatgggctcgccatctggtcggcaatcgagacttgggtccgcgactattgtgccatctactacgcggacgatgcggcggtccagggcgacgccgagctgcagtcgtggtggaaagatgtgcgcgaggaaggacacggagacctcaaggaccacaaatggtggccggagatgaagacggtggccgagcttgtccagtcatgcgccaccatcatctggatcgcctcggcgctgcacgcggccgtcaacttcggccagtacatgtacgccggctacgtcccgaaccggccgtcggtgagtcggcggccgatgccgaagccgggcaccgacttgtacagggagctggagctccacccggagaaggaattccttctcaccatcactaagcaggacctgtccatagctggcattgccctcgtcgagctcctatctagccattccgatgacgaggtctacctcgggcagcgcgactcgccgaactggacgtccgacctggatgccatgaacgcgttcgaccgcttccgtgaacggctcttggaggtggagaagaacatcgtggccaagaacgacaagggcagtggattcaagaacaggacagggccggtcaacatcccctacaatttgctcttcccttatgcctccggcgacgcggaggccaacaccggggtcaccggcaagggcatccccaacagcgcttccatctgatcaagcactatactatacaacaagggcaagcaaggggacacatactccttaattagcaacatttctcttctcgtgtaatgtgataattcagtatgggtcataagtttgtttatgcaataaattaaaataaaatcggactacctataaaactgtcaaaagaaaatttctctaaaatatttcaaatgtaattatagtgtaactatattataattcaggtgtaaccgaaatgtaacttgtctaatcttatagaaagatcaagtggctagcatgcatggtttgcgggagcgaggtctagcaaatctgaaataaaataattcagtaaatttcggtgaacaccatgcccaccatgaaaggccggaacattaattatttgccacccaccagacccatatgttattgacacgtgaagatccacatgtcattggcacatggatgacaaaataattaaacactaaatctaagagggcaaatagttaaaaaccgtccctaaaacactatcatggaagcttacttctttcacatgaaggtgaacctaggcctgaggcaacctacgggacgaaatgcccattatatatacatttcaagttttcactatactagtataaatttaacctagactagaatatgatggtttgggccttggtttatactcgtatttagataagaaaattgcatcgataccccgctataatattaatgaaaatttcaagaatttctctgtgcagagactcacatgactataaaaagtggaggatcttgaccccacctaatgttatccctctatcttctcccttctcaccctcttcccatgttctcgtggctggtgaggacgtggcaccaacaagctgcgccatcgctggtaacctcgcgagaaaggcatctggtgagcgctggacggggttgaaaaatgcgcagcaaaatgtcacaaggagaattggaccgaaaaaaaaaatcagatgcattgaaattgtacaacagaaatgcgatatctatccacataaggatagccaaatgcataaatcaatcacacaattagaaggaaaacggatcaaacacaaataaaaaacaaaggctcatctactgtaacacgggggcagctagccgttgactctaagtgtttcttttaataatgggaaaattgactctatgcgctgaccgcaagagcgggctaagaaattcaagtgtgtgtattcaaaatgtgaaaggataaaaaagatcctttcgacgaaatttaagagtgtgtattcaaaatgttaaggggtaaaaataattctttcgacagcttaaaaacctaatattgatatgtataatagcacatagtactcatggtataatatatttaatactaactcttggcaatggccggtatggtctcttttttaattttttatacacatatgcattatttcctgtgtattatctaaattatttttatcaaaattcctggtattcatcgaaataccaatgaattaattaagctgggcccgcccataattacgtatctatgaatggctgcatgttgtctcgatagagtttagaatttttcaaaaaatatcagcaaacaactggtctgttttacttacgtcatccacgaaccatcaaatttgaccaagcagtggtgctacttttgttcaggtcgttttgctttcaatactattaagaaagaaaccatcaatattgaccaaacgatcggaccaaagcgaaagatatactccctccgtctcaaaaaaaaaaaagacaaaccctgggtttccgtgtccaactttaactgttcgccttatatgaattttttttataattcgtatttttattgttgttagatgataaacatgattaatattttatgcgtgacttgtctttttaatttttttcataattttttcaaataagacggacggtcaaacattgggcacggaatctagggtttgtctttttttggacggagggagtatgcccttaggctgcatttaagagttgaacaaagagaaggtcacgcgcaagtttctcgaactgctaaacggtttgttttttgaaaaaaaaagtttctatagaaaagttgctttaaaaatcatattaatcccttttcaagtttaaaagtaattaatacttaattaattaccatagcttacatcgttttgtaagctcttcaccatgcattgccatgtcatcgtacctcttacctcattctcatgtggtgtatcataagtgaaaactgaaaaagatagtataaaacagatgtgacgaacaagatgatatacgggataagaattaagaaaaacattctgtcaataaaatattaagtttaagggcaataaaaaggatgacaaaagaaaaaaaaagaacagtttgtgttattacctcgtcctttcccggacatctaccgtggttgatccttctactagcagtctaacacagcctacaatccttcaaggatgataaaccgtagacatcctcttcactgatcaaatcagacaaagacaaccaatccaatcagcttaataaccccaaaattcccctcgcgcgttcggcgttccccctctccaaaaaactcaaaattcaaactcacacctcaatcaccctcttccaaaaatttgaaccgtacatatgtacccaaacaacgacgtctcaataaaaaaaaaaacacatcacatcgcgccccacgcccccccttcgttacccccgtccgtccaatttccaaccaacggttggccccacccaaccccacc

SEQ ID NO: 16661 - DNA, 17415 bp, Oryza sativa
ctcaccagtacaacgacgacgacgacgacgaacaccaccccttcgacgaggactaccctcccataaactgcgacgagcaacctgcctcctccgatgtgggcaccccgcgcacccaccacctgctcaacagaatgcctggccgagcctcggccgccgataagggagtcatctcttcatccagcacaaacttgtttccagatgacagtggcattgccatggatgatgaattccctctcgtcgtggaccgggaggcgtcagaccagaaagatgactgtcaccgggtgtacactgtggatgccgtgcacgttgtgcctgtggctgagcctaaaaatccttgctactttggaacaccaattggtggcgaaatgagccacaggggtacgattggtactcgggctgaggaggaggaaatacagaagctcagtgcaagactgcaggctctggaggcagaccgggagtcgatgcggcatgccatcatgtcgatgggatctgagaagcagcaggttgtactgctcaaggaaatcgcgcagaagctctgcaaggaggcagcaccattgcaagtaattccatttaaggtgcggtcgccaccacaaccagtggttatggcacagaggaaggtggtgaagaggcagagtttctttgcgaaattctttgtcgtcgcggtgattaaggtaactttgtgcaatcttgttcttctagggctgatactgagtttgatttcttgaggaagaatcacagaatcattttttgtttgttttaataattaatactagctttacatagtgagataataatttagacatgcaggagtcagtagtgtatcttattatgcttgaatttggtcacaaatggagtgttcttgcttgataattgctcattgaatgcactactttattgaattatataatatataggtttgtatcattagctcgattgcattttacctgaagcatccttaacaattttgctagcttaacctttttgtcatattatgttaaaacactatctgttaaaactgcgataaactgaattttgcagatcattgcatattttattttcattctgataataattgtgataggtgcccaaatatcatatcggaactctatggtattgttgaatgacattattataatactcattgactgtgactataatgttagttaactatccttctttttgtttttaccttttgttgtctcatctcaggcaataattatcatgcactgaaaggaaaacccttttagctgcgtatgtccgtgtaactttagttaggtgtcaaatggtcatttggtgcatggtatgcttttcagaatccaattgctactaaactaaagggggctacaaaaaaattaatgaacttaatgtcttaagtcattatacgtacttatgtagtcataaggtttctgtctgttctttgaagtagtgcactaaagctgctaaattgtgagttagggcatcatgcaatggtcaacagtggtttttcacgctccttatttcacctgagttttgtgcaagatttatgaaatattgcttcctacttgtttctttcaccaaaggatatttgatgaaatactagtgatataacccaccataaatggctgtctgtcaaaaatgaataactattccttgcaagcaaatttccagtttgatgagatagccggttgttgctgttttgtgacaatgtttctttattctaccttagtaccgaacacctggaagaaagtacagtctgaattgctttgagaacgaggaatcaagttccatcacctgactagacgatgattctttattctttcaatttattctgttgttctgtgtttactatagtttgaggccaagtgtgctaccaaatgtgaaggaaagcatgtgaccttacttaatcaacatgggtctgtcagaactggatcatggctgaaaattaactaataaggataaggtttgaccgacaatatgcgctagagcctgccacgtctatgacagtgcctgacagttgtgcaaatttcagtatgattgtacttcgtaaaaaaataatttagtcaatttatgcccatttttttatacaaagtatcccacctgcctgagattgggaggggtggatgaataagaaaaaggaagggcatatcagttaagttagaacaatcttaaaatttacattttgtttccatctttggaaccatgcattgcttctagaagacattaatattaagatgttactctcacactgtattttctttgctgatttgcttatttgatgtttcatccagtggattgcctctgtgtttagctggcggaggaaatcatatcgcgtcaagtgagttgccctatcttgctcggttggttaatctctcggtagtgttttttttaatacctaaccaccattggcactgggcatcaattgcaggtacccaatcggtttgtgtgggagcaatgttggcctgatgctgctactgaacaggttccccaagcagaggcacagaaggtacctcaaaagaagctagctgctgccttcactggtcgtagacacacaaacaagggaaagattctgcggcgctcctacgattctctcctccaaatgagctattttctggacataaaaggctcatttgcatgtgaatccattctggttgttgcatatgttttgacccctttgtctatgcattctttggttggtttggtatgataatctagctcagaattgaagcctcgttttttcgcccatttttgctgcctgattttctccgtagtagttgattctttttgtacctaccactcacgtgttcaaggacgcactgtacatggtcaataaccagtaaacatgtgtagctctattagaatattatgtgtgatctgatgagatccaacgaattacacaggtgaggctctgttcggtggaagaattcagatttcagagtcaagacatgtgcttgaaatgcagtggtcagaacagacttatttaggcttgtttagattttctgttttgatcataggcttgtttagatttagatatccagtacgccggatccaactaatgctctcgagtatttctgggtcatgtcttgaattttctgtgaactcttgcatctgcagtttgaaaatagaactgtctgcgatagtctattctctgtaatttacttagttgtgggtttttaagaaaatttaattttaagatatgcaataagttttcttcttggatttggagttcatttggtaatctcaatcgatcctaatcaaatgcgattcaaattcgtcatatattcattctaatcctccaatcaaatctaaatgcatctcaaaccaaaaatcaagttgtggtctaaacttatatgctcccggatcaattttgaaatgaaaatcgtgctatcaaatttttgggactaattatttcttttgggctgaattccattcggcccaaaataaaaaagaggtccggctaggctgcaaacaagcctccgatggccttgaaaaggggaagaaagaatagctgggctaagaaaaagataaggccgaacaaaaggacaagaatcggactctgaataaaaaaacaatctgaaattcgaaggcaactccggctgggacgtccgatgtttcggggaaaatcgggcgcacccgatttacgtgcaaaaactactttaaactgatttttctcttaaattacttatccaaatcatgattcgattgcaccattaaattcgttgcaattaaatcttcaaaacaaaaccacacatggatatattccgatgaaatttttttagcttattattgaattatttttaaatgttgcacgatgttccaccaggtatatcggaattgtttcactaaataaaccgaaaatgtttcactcgttaaatctggtgttgtttcaccttatataaaaataatgtttcagcaaatagcgaaagaatgtttcatttcactgcaacaacattataaatacactaggtgaaatattttttggtgaaacgaaaaatgaaacgaattcccttaatagggggtttctaaaatatgtgggttttttttgttgtaatggaatattttagttcaccgcaacattagatttatatatagggaaatattatgagtacactaggtgaaacatttttggtggaacaaaaaataaaccaaattcacttaatagggggtttccaaaatatgtgggtgatttgttgcaaccgtgcattccataatatcaaaatccactgcaacatttgatccgtacatagtgaaacatcgcaagcacactagcagaaatatcgtaaaactactggttgaaacatcaaaagagatcatatgcaatattaaaaaaaatatcaatagaaaagctaaaatatttttttatcgaaatataatcatgtgtggtcttgttgtaaaaatttaattgcaacgaatacaacggtgtgatcggatataaccatgtaagatcttttatataaagatttaattataacgaatctaatggtataattaaatcgtaggtcggataaataattgtagagaaacatgtatttaaattttgaatatttgaatatgcatggacgcatgcacttgacgtgtgctgacgtgtactagctccctgcatgcatgtgaggacttctgttgtctcgggtgaagaggcaccattactaccgtccgatttttgcgtcggcccagatgcccgatgagaagcattctcgctgaaattccatctaaaactcgagaatgctagttctcggtcgatcggcgcgggtgcgttaaatcggacgctcgcccgtgtctcccccatggggcacacccacatgtctcccctgcccccacctgccacttccacacacacaactccattgtaacaaatcacccacatattttagaaaccctatattaggggcatttggtttatttttttccaccaaaaatgttacacctagttactcacaatatttcactatgtgtacatctaacgttgcagtgaacgaaacattccattgcaaccaaaaaaacccgcatattttggaaaccccctattaagggaatttggtttatttttttttccaccgaaaaatgtttcacctaccgtacttataatgtttcactatatataaatcaaatgttacagtgaactgaaacattcttttactatttactgaaacattatttttatataagctaaaacaacacccgatttaaacgagtgaaacattttcggtttatttagtgaaacaattccaatatacctggtggaacatcatgcaacatttaaaaataattcaataataagctaaatttttttttcatcggaatatacccatgtttggtcttgtttagaagatttaattgcaacgaatttaatggtgcaatcggatcatgatttagatacgtaatttaagagaaaaatcattttaagtagttttgcacgtaaatcgggcgctgacgtcatgctgacatcagcgcccaatttttccccagcatcgggcgtcggagtccgacgcgtaggcctcccctctaaaactccgcagaaatgctgaaaatcgggcgcccgatgggagaaaaaaaatcggtcactccccccaccccccacgacgcgtgtcgccctgcacacctgccacgtgtccccaccacatattccgttgcaacaaatcactaatatattttggaaaccctgtactaagggaatccgtttcatttgtttttgttcctctaaaaatatttcacctagtgtacgcacaatgtttcactatgtatgacctaatgttgcagtgaattaaaatattcttttgcaataaatcgcccgtatattatagaaaccctctattaagggaattcgttttattctttgttccaccaaaaaagtttctctaatgcactgaattgaaacattctttgcagcaaatcatgcacatattatggaaaccctctattaagggaattcgttttatttttttccaccaaaaatatttgatctagtgtacttataatatttcactttgtatggatcaaatgttgcagtgacttgaaaatcctttcactatttgctaaaacattgttttcatataaggtgaaacagcgcccgattaaaacgattaaaacattttcgatctacctagtgaaacaattctgatatatttagtgcaacagcgtgcaccatttaaaaataattcaaaaataaactaaatatttttttcatcggaatatatcaatgtgtggtcttgttttgaagatttaattgcaacgaatttaatggtgcaatcgggtcatgatttagataaataatttaagagaaaaaaatagtttaaagtagttttacatgcatgcatgcatgatgacatcatgctgacgtgggcgtccgatcttttgcaatagatcggacgtccaatttatagcagcctccaaaactccgggatagggaaaaacctcttgggttcatcgaaatttctgactttttgaaataaaatgacagattctgcataaatcgaaaaggaggaggatgcttgcgcacgaacccccaccttgttgatgatcgccaccgctggagggacgacggcgagggtcaccggcgagtcacctcgtcacctcagttcgacgtacgtcacgatgatcgccgctcccgagctcttgccgcagtggagacacacgggaggtcaccggagagtagctgcccattcgtgcccatcgcgccgccggggaggtcgcctcggccggccactacagttgcctcaccggcgatgatggcctcgacgagaggagataaattttgctccggatgatgaaaggggatttgaacgaattgaccaaacatttgacccgagttattatcactgacgcattttccgaccaaacgtaaaataataggcctacaaatcaattatttggacttaaaaataacctcagacttaaacttttttctcagacttaaacttttttctttgagcgaaaggcaaagcttgcctattcattgaatatagaagggcaaatttacaagtcaggaaaagaaagtaatatttacaaaaaaaacggtcggggactaaagtaacatctctgctaggcgtttggctcctgccgtagctcaagattttacctcttcctttatcttcgggattaggaccaccgtcgttagctcctgtttcagaagatgcattggttttactccttccaaatgccaacaacagtatcctaaacatcaccaacggtatccttaaattctatcatttaaatattgtttagggggcatgtacaatgatgtgtaataacgatctctcttcgttgtcatgcaagtaaaattagtgatgtaggaaagagagggggagaaaagggaaacatggagttgactcttaacatttattaaaaaaaaattgttgcatggggtggagaaaagaaaagaagggtagtaaaaaagtatattttagtgcattaatggttaagaatttttattgcctcaacttgtaggagtatagtttctaagtgatatatactattaagtaagaggtaatacctggcctaatggaaatcctaagcaacagaatttgagatgtgaaataataatctcttgaagagattggttaaattctacatctaaaaataaaagtggggtcccatacaacaaaactacaactgaaatctgtttccttctccctcttgcgatcgagcttgcccacgcgacctgtgatgatcgcagtgtcgcgcctctccggtctccattcaacgtgatcaaagctcggcaacagcaatcagctctagccattagcaaaataactatcaacaccaaccagcaagcagaacattagtagctctagaaacttgttagcaactcagcagtcagcagcataagcactaccagcagcagatcaggtacacagatttgactggcacctacaaatagagaaccaatacaatgtcaaaaaataaagggtaaactaacatacaaaatttgcatgccaagaaccatctatttattcctggcattcttgttagacaacaatggtgcgattttagcagcagcatcatcagcagcagcaccattaatcattaatttccgctgtaggtttcgtccgaaatgcgctcggcatctgtcaggacgccgccattttttacacagaatggagaactaggaacagcagcaacaacataacggagcactattattttccctcagcacatagcagcggcaacaacaagccaacaacaaaattaaaccaggaagcaatagcaacatatactagccgtgcgttgtcgcatcggcgtaggtcgccacggaagactctctgccgactacgtgagagatgtgtccgacggttgggtagctagagggcttctttacttgtggagagagagaaacctggagatgggaattctgattttgggtcaccattggatcgatttttttttattttacaaaacttcaaattattggatagggatttgttttgggtgctgcaagcaagaaaacatgagaacaatcttaattggacttgactgtgtctgggttggaccgatcatcagatcctatcactagaagggataccatcatctcaatcgagcggtataccccatctcaatcgggcacggcgtctgtcacagactagaagtcacagatgtgaagagttatctcaatcgggcaaacggccgtcacggatgaatctatctaaatcgggccctaattaaagcccgtcaccgatagctttgacccagacgactagtcaaactatagcccgtcacggatgacctatctcaatcgggccacaactagcgcccgtcacagatgacccttatctgtgacgggcattaactatagcctgtcacagatgacagcattaactatggcccgtcacagatgaccctcatctcaatcgggcctaagttaatgcccgtcacagatgagtataatccaaaaataaataaattttattttttggctagttttaggcctctaggccagtctttttttgtcctaacttgaattcaaacttcccgatcagtcacccatcctgaaattgttccaagccgagcacgctagattggcttccggaaaagtagttgtaacttgttggtatgagtattctattaatcttattaagccctaagccaggatgtcaaattgggggttattaaatgatttcaaatggaaaagtcaccaaaaccaaagttgtagaactcatcgaggtgtaaaatttttattttggtcatttctccatatgactctatttaaacaatttgaaattcgaaattcaaagttttaaaagttcaaatagaattttagatcagtgaacggcttcaactgaaaaagtcataaacaagaaagttgtataactcatcaagatctataacttttattttggtcatttttctatataacattttttgaaccatttgaatttgaatttgaaaatatgacaacttcaaacaatattgtcaaatactaaatgatatcaactgaaaaagtcatcaacaacaaagttgaataactcatcaagatctaaaacttttattttggtcatttcttcatacgacaaagtgatagtaacattattcataaaattgacatatctcttatctggttttataaactataacacatatatgtaaaatttatgaataatattactaacatttcgttggatgaagaaataacaaaaataaaagttttagatcttgatgaattattcaactttgttgttgatgactttttcaattgaaatcatttagtatttgaaaatgttgcttgaatttgttatattttcaaattcaaattcaaactgttaaaaaaatgttatatagaaaaatgaccaaactaaaagttgtaaatctggataagttatacaactttgctgatgacattttttccatttgaaatcatttactacccccaaaattattttgactcataaaatgaattattatacttcacttaattattttgctatagttcaacttacaaatataaacatttcatatgaaaaatgaaaaaatagtcatcggtgacaggctttagttaatgcccgatagagattaagtatatagcccgtcactgatgagtcatctgtgacgggcctagttgctatctcaaacgggcctcaagttggtgcacgtcacggatgatggtcatctgtgatgggccacaacttgaggcccgtttaagatatggaatgttatctcaatcgggcctaaagttggcgcccgtcacagatgatggtcatctgtgacgggccacatctttaggcccgtttgagatatggaatgttatctcaatcgggcctaaactacggcccgtcactgataggtgtcatctgtgacgggcttaagttttatgcccatttaatatgtctgtgcgaccataactcaatcgggcactttttggcccgattgagatgacttccttgtgacggcatgctatttctaggcatattagagcccgtcacagatagaaggatctgtactagtgtatatcggttcggtcccatgccgccagtcggtctagccctgtgcaaaaggcttgggtcttttccaaatctgacctggacttgcgataaatatatcccagtgctaaatttggttgccaacatatataattcacgtaccgcggttaacagtgaaaacgggaaaaatacatataaattttctagaagtttcttaaaaaatactacttaaccgctttatcaatcaatgcacaccagcttagtaaaataaaacagagcggttatcgccacaattttaacagtccttaccatggtatatgtgtccgttgataaaacataccttctatacatggtttaatgtaatacgacaataccatatatctaatagtatacgagaaggtatcctataattaaaggaaataaggcaaataaagatagaaattatcttcccggactggaatgtgtaagagtctagtcgggggagataaggtttgtctctccaagttctacttggataagaagatgaccaacgtattaaatagaagcccccctctcatccagcaagaagcatcgaattataagccatagccaaagccacatccagaagtaatccggaggaagccagcgccttattcgccgaatagatcttgttaggtcgttctcgtcagcttctagtcgacggattcatcaagtcgtcctgttccccattatactttgtgtggtattcccatccataatacatataaactgaagtatggttattactcatcttgaggacatgaaccaatataaatcattatcctttgtctgtttgatctgatcttgagtataccttggttcaaacgatccccataccctgcaaatattgtctttgggtatagttcgtcgacaatatgttaaacacatttttctcacacctctaaataaacgaccatttctatggtactttcacactataagcatatatataggtcttgtttggcatagtccaaatattacatccatgttggatttgaaatttgtttgttaaattatagtaatttaaattttatatttcacttaaaataggagaaaaaatgattcatcgaaatgctttcaatgtaatcgcggatccagatttataaatatgtgcagttagaaatacctagctctaaaaaatcttggatagagatgtgccaaacaagaccatatgcaacaagcatctcctagaacatatggtcttgttgcatatggtcttgtttgaatattgcaactagagatcacaaaaattctcaacactatatacttctaacttgtaagtccaatgagcatctaaactcatcccatcactatttgcatgtcaggctggctacatagaagggtggcagaatctccataggggccacggacctcccgaatacccaccctatgggcccatgggcaagtgcaatttccaacttgctagtccattgaggtggggcccaatcaaatgcgtaacagttttcacccataggttaactacagtccctaggatataaggcccatcaacaattgcttatgaaagcccatttctacaggccaaaccctaggtgttctagttataaatagaagggtgtgaaccctagatcaaatccttcccaacctcctagccgccagcgccgtcaggccattagcacttgcgcaacccactggcctcgcagtcaccccctctctgaccggccgccaccgcccctctccatcttcctttctcatcgacgctccaagtccctctcctctactgctaccatgccggcgccccaatcttgtccaacttggatccgacccgccccgttgtcaacccaagatatatactgtcctaagagcaaaaaagaaaaggggtagctcgaagttgcggcggctgcaaaagaaaaggatgaagacttttttacctctagggttttgttcccctttatctccttgcatgtttggagcagatgctggagtgagctcggccatggcgacatcaataagtaatacttgttcatctctaaatcttgttgcccccgtttttcgcttatggaatttgttgagttcatttggatctgatgcttttcttttcaatccagtcttgtttgatatgattattggtacggctaggggtttcacattaggaatcaacttggtctaaagatcatccactggagaagttatgaaaaaaaaaggtgagtacttcggatccttttgtttatcttcttcttccactactttttttatgtgccttttcaagtttcttcgtgttatctagattagtgggtggtacataaaggtctaatctttttagatctactcttatttatactgatcaggaggtcatttttttgttaaaaacaacagatctagccatatgtgtttgctacatatggttagtgaggaaaataattcagaactttgtgtttaccttccttgtgtgttttatacattttattatatgttgaaattgatagttatagagattactatttatgtaccttaccttttctaggattaatctactagtgttgcatgggctattgtttagattacaaacatttaaaatttaataatatactgaatagattggttattttataaattatagttgcttagatttaaaaatgtctatataaattacaacttactaataatttcaaaatcaaaatgatacaatatatttatctaatgcccaaattttggaattattttttttcagaaagatatccatatttgttttattggtgttattttagctaattctggtcaacgcctctaaaaatatgttttctcaaaaaacattattccactacattgcttgaccatttttataagatatttctaaagttcctttctcaaatatttaatttatccctataataaaatagataattcgtaacaataatctggacaatagtctatgtcaaatgcaaaaattaatataataaactgaagagcccatagaatttacaacaatatgttttattcaagatgatttctcaatatgatataaaattttgataataccatcacaatcacctaatcaagaaatagtttgttttctagataaaggttaaggatttacctcaaataaatgatctatgactatggatataatctaccagctcgcacatcaatcaggttgtacatctattctgttagggcatgtactttaataataaactcactgtgttatcatacaaataaatttggtaacatagaatagaagagagaaatgagaggaaagagaaacattattactacacttgacaacaaagtgactcttagcattttttaacgaaaatttgttgcatgtgggtggagaagataaaaaatggtaaataaaaaaaatgttttggtgcattaatgatgagacctcttattatctcaactattataagatggtagtctctacctctacctttgtatgtttccaatttcagtataccgtataggattctactaccgattagcgattaatatacgtgactggataagaaaaacaagcacagttagagaaaatttccagtccggtcagtaaaccgtataagattctattgattgcttaaaccgtacatctattcaacagagataatttcccattcactaaaaccgtaccagatttaaccatttcttcatgtacgtaactggataggaaaaatagaaactaaataattttgaatgcatcgatacaatctacggttgtgatattacgatcattctaatcaactgctagatttttctagttgatatatgagctcctaaaaaatatctaattagtataattagtatagatagatagatagatagatagatagatagatagatagatagatagatagatagatatttgcttaacctttgtccatcagtgaagaggaaacggccatatatgaccatatggagtactatacattaattagtgcccattaggcattctcgcgaaaattgcactcacggcttggcctagctggtactacatgaattttacttttcacgaatatatgggtatatccggccagagaggcatatggttggcccagcttaattaaaatgattccccgcgccttactacagaaattactaagtaacttttaatattttttaataatcgagctaaaaaaattaaattagttattaacaacaaataaaactagtttgtcaaactatgttcaaagagaaataaatttagtagacatactctatatgagattgtagatgaaatatgatatcccacactttgattatatggatgaatatatgttgaatattataaaaatgatggatatatatatatatatgtttaaaatattatgaagaataatgtgaagaaagatgattgggtgttgatttgtagaattcaatgaattatagataatgttgcatgcatgcataagttttttatatagttattgctagtggatgatgatgtgacatgtttgtatgttgagttttaaaattcgtgggttataactttacagtaagataggattagcatggtttcttgtttttttttaaaaaaaaacccaattagggaactcatgaaatttagaactaattagtaactgaaaataatcttttccgaaattaaaacaacaacaattttatttcgaacatggtaaaataaacaaatgtcagccgagtttaggcctaactaattaattaagctaggttggtcaaataaatttggctcagcattgaacgggagtctaactttttctagacgatcaaagctcagaaaggcagaaacatgtataaatcttgtatttcataatgtgttaatctcggaacctaatgttggcccaattactttgtggttaaacagatgaggcagtactgcatgcacttagttcctgatgcagtaaagacattaactaatggttcaattgttggcgccacactaattcgatggattaattgtttatggttacatggcctctgctggtaaattggaatatgatctcacgttgcctgcatgactgcatatcaggtaggtgcttctaactagttgattttcctcttgggcaaaccccagctagacttccgcatgtatgtgttccatttaatgtttcgattatcatgttaaaaagtaaaccaaatatgtgatgtggctgtgcactgagatgaagacgctgggtgagtgtgctaggggtggcaaaatctctatccagaacccgcccttacagattaattaagaatagatccaatttttgacccgcggaacctttgagaaaatgtgagggtaacagtggggaagtggggcgggaccctgtacaggaataaggcccatcaagagtagctttccaattatcagaagttgattactactcgaccgacccaactattggattagatatagctgaaaataaaaggatgtagctataaaaacgagaaaactcaaatcatccttaagaggatatcctctcatttttacatatcacttaaaaagtcataaaaaaattgaaaaaacttaacaggatagatcaatatgtgatatgtcacttcacaaatatgcaaattcaaattcagcttatacaagtagaaacaaaaataataaatttgactatgaagtgaatgtgtaattcacggtcaaatttgttattttttgtttcgaattgtatatgtcaaattttaactcacatgtttgtgaaaagatatatcatagattgatctatcttgacaattttttaaaaaaattttgataactttttgaacgacatgtataaaacgagagtatgtccccttgatagacaaaaatccactttcataaaaacgctacatcaggttttcccgacctaggccatggatggttaacttggtttcccctttttttttttgggacagctcaccaagatagatacaaatatgatttcagtaatttatttcaatagtatattaaaaaattacgttactattttcccactacttaaatgatgagttgtttacatattgagtgtgtcagtactgactttatgcatttttgttttttgttgagaattggacaaaagtgtattgaatcacttaattaaacagtaagcatataaaataaatacagctaatatgatgtctatatgcaccttcttataattttgcatgcaaaattgaatcaaattatagggagtatgggtccatttgtcaatccttaccattgttctcatgcattacgcctgataagtatatataccgattgaaaaaatatatattaaaacaattatcttgagaatataaaactaaaatagaaagcatatcaaactaactatatcatccatggatgtatatccatgtctagatgatgtaaccattttttcttccaaaaaaaggtcatacatagaacacacatacttatcttcatggaccaatctgtaatcagctcatcatttaagtagtagagaaatactaacgtaaaattaaatatgctagtgaaatgaatttgcttaaatcaagtttgtatcttccttggtgagttgtcaaaaaaaaaaacggtaaatcaaagttgaccctccatgtccctggccccaccacgcagcgtctcacaaacctgtacgtgctgcaccatccctcgtgtggatttgttgtgtccgttgttgctgaaacggacggctcagatcgagtagaaacggacacaaaaaaaaaagaattcctagtcagtgattgcaatgccggttcgaaattttagaccccaccggcaagccattatctcgtccgaaattttcgaattttctcaattttttgtgaatacggtcaaaatttatccaaattcagtcgaaatttgttaaaaaatttatataatttcggcccaaaagtaccgaaaatttccaaattgcggtatagcactgaaattttgaccgaaagcgaaattgtaaaccctgttcctagtacatttaaaacctcccgcttcagcgtcgcctctcgttttgggaaagccttgatggcggcgtgagataatctcaagtgctcgtccagttccatcgattattcctttccttggattggtggagagatcgtctcgatcccctcccaagatttggtcgagcgatttcgg

SEQ ID NO: 16662 - DNA, 932 bp, Oryza sativa
gtgttcgtcgggctcgggaagggcgactgccgcgcggaggacgtcgtggagaagcgcggcgatctgtgggggaggttcggcggccacctgtggaaggtctacgacggcggcgagcgggactggagggaggcggttggcgcgctgtcccgtgctgatccggccgtggaggtggacgccgcgagccagaggcaccgcctgatcgatctcctcgagatcgtcgggtcgaggcttgggcggcgcgcggtgacggacgccgtccggtcatggcgcgcggcggcggcggtgcacccggagcttcccttcgcccgcaacgagcgcttcgtcgggagggagagcgagctgctcgatctcgaggccgtcctgttcgggaagaggccgatgcatctggtcgaggtcgaggtgttctgcggcgagccggcgttcatggacggcgtcgtgtgcatctccggcgcgtcgggcgccgggaagacggagcttgtgctggagtacgcgcaccgccacgccatggagtacaagaaggtgctgtgggtgcgcggcgaggcgaggtacctacgcatgggctacctcaagctcgccgaccagctcggcctcgccgtcggcgacgacctgtccctcatcgccgccggagaccggcgtagcagcggcagcaagaaggccgagaaggagtggatctttcgtggcttggagagcgacgccattgccaagatccgaaaggagctcacgcgcgagatcccctacctcctcgtcatcgacaatctcgagagcgagacggactggtgggacagccgcgacgtgcaggacctcctgcccggcgccgtcgccggcgccggcgtgcgcagccatgtcatcatcacgacgacgcggctgcgccggctgcagagggtcaggacgttctcgctggcgccgagcatggagtcgccggaggccatgct

SEQ ID NO: 16663 - DNA, 6154 bp, Oryza sativa
gagcccaagaggccgctgtggaagcagatgaagctcgcgctgcgcctctcctgctcatcatcccggcgagcgctggacaaagactcctcctcccgccgccgcgccgccgccgccgccgccgagccggaggcgctggtggcgctgctgcggctcgggatcgcgcggcggtgcacgacgcagccggcgccgtgcgtctccgtgcaccgggtgttcaggctcttcggccgaaaggccgtcggctccggcgaggcggcggcgcgttccaccgtccgcgccatcaccgccgcggaggtgcacgacgaacacgcgtgggcggcgtgcatgtcggtgttcaagatcgcgccggccatcgccgccaacctgccgacgaaggagctgccccagttcgtcacgcacgtcgccgtgccgctcgccgcgcgaggcgtggttgcgcactcggcgtacgccgccgtcaccgacctgctcgtggagtccagcaacgtcgtccgcggcgaggagagcaggtacgtcgcgagcggcggcctcgatgagaacccagctctgtaccatgagcttgcacattctagggcacagctgctgaagctccgcgccaagctgatgctccgaggaggcgagttcacgctcgccgaggaccacagcttggcggtgatccacatcctggaggtggtcgccggcgacgatgacccggagacggaggaggcgagggcggccttggaccgcgttctgcaggttcagccagagtgattttttgcgggtttagggtctaggactttaggcgcggaatcttgcatggctctcatagaaactcgtacaaaactagactataacccacacattgttgcgggtttgattgcgctgttattttcatgtatcttgtctttaataaaatgtatcttttgatactttggtatttattttggaactagcacttacgttattacttattacttattttggattctacggattaaatatttatcggtcttaccgcaccacctatttttaagtacatggtagacacgcccgttagttttgaccattgacttgctacaaaagccataaataaattatttcccattttaccatgtccctccctccccattttctggcctcctctcactgctcctgcttgagctctgagccccaaccgctcatgctcgtgctcaaggagcgttggagtagccaagagatggagtgtgagacatcttatgaagtgggaaaatagttttctgtgctcatataatgtggtatgtcaacgggtaaagctaatgtgccattgctaccgtggagtaaaactatgtggaatggacaaaagtgggtcaaacgagtgatacgaaaaattcaaggtgaaaaaaaattagggctttaggcacgggattttgcatggctctcgtagaaactcatacaaaactaaactacatcccgcacgttacgggtttgattgtgctgttattttcatgtttcttgtcgttaataaaatgcatcttttggtactttggtatttattttggaactagcacttacattattacttattacttattttggattctacggattaaatatttgtcgatcttaccacaccacctattttttaagtacatggtagacatgcccgttagttttgaccgttgacttgctacaaaagccacaaataaatcatttcccattttaccatgtccctccctccccatttcttggcctcctctcgctgctcctgcttgtgctctgagccccaactgctcatgctcgtgctcaaggaggagcactggagtagccaagagatggagtgcgagacatcttatgaagtgggaaaatagtttcttgtgctcacataatgtggtatgtcaacgggtaaagctaaagtgccattgctaccatggagtaaagctatgtggaatgggcaaaagtgggttaaacgagtgatacgaaaaactcagggttataaagaatttaaaatttaaggctttaggcgcaggattttgcatggctctcgtagaaactcctttaaaagtagagtacatcccgcacgcacgctgttgcgggtttgattatcctgttcttgtcatgtaatcttatcgtttaaaaaatttatagtatcttttagtactttggtatttattttggaactaatagttacattattgcttattttctattctagagattaaatatttgttggtcttaccagaccacctattttaggtacacggtgacaatgcttgttagttttaaccgtcgagttgctaaaaaaacaaataattttttcccattttaccatatcgctcccaacccatttcatggctcctcttgttgctcctccttgtgctctgagccccttctgctcgtgctcaataaggaccgctcaagtagctaagagatggagtacgaggcatcttgtggactaggaaaatattttttttgtcacgtcatgtgatacgtcaacgggtaaagctaaatgtgccattgccaccgtggagtaaagctacgtcgaatgggtgaaagtaggttaaactagtgatatgaaaaactcggggtggaaaataataggatttagggctttaggcgcgggattacgcatggctttcatagaaactcctattgcgcacacacgttggtgcagttttgattgtgttgatattgtcctgtaatcttatcatttaaagaattgtatatttttgtactttggtatttattttggaactaatgtaacatttttacttattttaggttctagagattaaatattagttggtcttaccataccacctagtcttagtacacggtggcaatgtgtgttagttttgaccgttgacttgctgcagaaaacacaaatgaattcttccccattttatcatattcctccctccccatttcttggcacctctcgctgctcctgcttgtgctatgagccccttctgctcctactcatgctcaagaaggagcgctagagtagccaagagatggagtgtgaggcatcttatggactaggaaaatatttatttgtgctcacgttatgtggtacgttcacgggtaaagctaaatgtaccatcgccactgtggagtaaacctatgtggaatgagcagaagtgggttaaatgagtgatataaaaaacacagggtaaaaaataatcaaatttagggctttgggcatgggattttgcaccgctctcgtagaaactcctataaaactagagtgcatcgcgcacgcacgttggtgcggttttgattgtgttgctattgtcatgtaatataatcgtttaaaaaatgtatcttttagtgctttgatatttattttaaaatttatgttacattattacttattttgggttctagatattaaatatttgttggtcttaccataccacctatttttagtacacagtggcaatgcatgttagttttgaccgttatttgctacagacaacacaaattaattcttcccccattttaccatatccctccctcctcatttattggctcctctcgctgctcctgcttgcactctgagccccgttttctcatgctcatgctcaagaaggagcgctcgagtagccaagagatggaatgcgaggcatcttatagactaggaaaatatttttttgtgctcatgtcatgtggtacgccaatgcataaaactaatgtgccattgctaccgtggagtaaagctatgtggaatatacagaagcaggttaaatgagtgatatggaaaactcagggtgaaaaataattagatttagggctttgggcgtgagattttgcacggctctcgtagaaactcctataaaactagaaaacatcgcgcacgcacgttggtgtgggtttgattgtcctgtcattgtcatttaatattatcgtttaaaaatatgtaccttttttactttggtatttattttggaactaatgtaacattattacttattttgggttctagagaataaatattggtcggtcttaccgtaccacctatatttagtgcaaagttgtcaatgcgtgttagtttagaaaacacaaatgaattcttccccattttaccatattcctccctccccatttcttggcacctctcgctgctcctgcttgtgctatgagccccttctgctcctacttatgctcaagaaggggcgatcgagttgccaagagatggagtgtgaggaatcttatggcctgggaaaatatattcttgtgctcacatcatgtggtaagtcgacgggcaaagctaaatgtgccatcgccaccgtggaatttttgtccaatttatctgatctggaatttttgttcatggtgtataaattaaaggacttggtacgtaagtttgcaagattcaatggtgaagtacctgattcccaaaaaaacaaaccaaagttgtgacacagatgaacatggtatggtggttttaaatgtcaatcattttgttctatactcaaacagtgacagtagacactgaagcaaaaggcgtttaccttcatgttcctagagagattggtgttctgggttaacagaaatatcttcagcacaacattgtctacaggacggaaataacaggtagagattatcacttctgtgtctttaagaagattgcaagaactgaaaaaaaatgcagatgaaataagtcctatagcatcgatacaatcacagtggttatagagaagaactatagaagtggtatttgaagtggcaaatagttaaatttccctgataaattactcgcttcattagtgcagtgtgtttctgtgcatggtattagggaggaacgaaaataaagaaattgggggtgcactgatccaagtcctgtcataaacaatatgtgataaaagaaaaattgcatcagacaagctgcctttgttagatcgagttccaacatatatctgcatcttacaggtaattgcaaacagtcgttatgatctaattcgggactagtgcaaatatcttaaattaccagtaaagcggtgaaccacactgtaaatctcgtatcgatcaggccgaggatatatagcatttccattaccttaaaagaacgtatcatatctcgaaaaaactacaacgaaatctatatctatatctatatatacctaataaaaaaatacgtaaggttttcgaaagttttttttcgtccgtcatccacttgcgtacgcaaaatcgattttaatctgcttagatgtatcaaacacttttcaatctactccaaaaccacggttcagatagaatatgtattttccatgtaacaaccaagcaaaaacagcagtttgcctacttggctaaggaaggagctcttcattcccacattcatctcctttttacacatattattacttgcactagtgtgatttaaagcgtcaatgggccactcctaagccaaatctggcctactttatcaaaaccattttacacctattattacttagaataactctactttgaatccctcattccaaatcatattttttggtaaaaagaaaatgatcgcaggggctcctaaattaaaactctgaccccttttgacctcggcaaatctctaccattacaaaaattaaagatatttttatcgatattttagtaagtcatctgtgtatgagtcagtttttaagttcgttcgctattggaaatatagatctgtattttagtcgagttttaagttcattcgcttttacaaatacagaaggagttgtataagaaatctctttaaaataaactcgcatgttaacttgacatgattttctagaaaaatatatatatccaagcgaattcttacaatgaatttcacaatgatcaataataagattaatatagtctttacccgttgcaacgcacgggtattttttctagttagctaaaatttcctgtccatccgtcttgatttggatgagtttgtaccaattttatcgaaatgttttaaagttaattgagatcagcatatacctataccagttgcccttccaccgccaccacctccaatcctcccatcaacctatccaatggagctcctcacaaccagaagaaattggtcatgcatatgctttgttcttatactagatatatgcatgtagagtttttaattagctctgagtatggttgatttgcacttgtgcaccagcactaaaggaggcctgggggtgtggcgcgatccgtaggaaagcagctctcttactgacag

SEQ ID NO: 16664 - DNA, 1124 bp, Oryza sativa
catattttgacccccagcccgatgcagtagtcgtagaaatcggcgcagatgaactgggagccgttgtcggttatgatgcggtgcggtagtccgtatctgcaaaatatccctttgatgaatttgatggcgttgtcggccttgatttcccccgtgggtactgcttcgatccatttggtgaacttgtcaattgccacgaataggaacctgtagccgccctgtcctcgtgggaacagcccaagtatatctagcccccaacacgagaacggccaagtcagagggatagtctagagcgcttgcgcgggtagctttgtgtgtttactgtggaattgatagacttcacatcgctggaccatgtcgcatgcatctttaagggcggttggccagaaaaaaccttgtcgaaaaactttcccgaccaatgtccgaccggcggcgtgtgacccacatatgccttcatgtatatcgaggacgaggtgtctgccgtcgtgggacgagacgcatttgagaagtaccccgtttggcgctttcttgtatagatcgttgccgaccatacagtagatctttgctttacgggttattttctcggcttctgtatcgtcctcgggcaactcctcgctgttgatgaatttgattagtgggatgcgccagtcgtctgtggtctcgatatcggcaacggcgcgttctgccttggtgacctccgagctaatgtcgggggtgtccgggctaacttcgccgctgacctctttcactgatggcttcgtcaggatgtcgagaaaagtgccgggctcgagcggttctcgtctggacgcacgtcgtgctaggtcgtctggctcaatgctgtccttgcggtagacgtgtcggacctcgatcccatcaaaccttttctccagcttcctgacttctgcgagatacttggataactcggggttagagcatttataatctttgtgcacctggttcgcgactagctcggagtcccctttgacgattagtcgcttgaccccaaatgcagctgcagctcttatcccaacgagtagtccttcgtattctgctgtgttattggttgccctgaagttgaggtggattgcgtgcttgaattgatctccggagggagacgtcaagataaa

SEQ ID NO: 16665 - DNA, 921 bp, Oryza sativa
ggttgcatgatactcccccagcatgagaaaaagaagatgacgaagaaaagataagcatgagaaaaaaaaagataaagtaaaagagaaaaaagaggaagaactaaggtgtcgataaaaatgcaaccgcgtctgcgaggaagagaaaagatgaagcatgagaaaaagaagatgaagcaaaagagaagaaagcggaagaagcatcgtcattacgaatcagacgaaccggggacttgctcccaaagttctccaggaagcattgcctgcaggtcgactctgattcttccccatttggcgtttgcttccttgaaagacatttgcttgatcttgaggctgtctttacacatgacttctcttcgggacacccaagaagatcgaaaagaaggatgcgacagcacaaggtcgtggtcgtcgaggcggcgctgctaccgcatatccacggggaagtcgccattgctgtgcttggtccgcagcggcttcttgatcccctccttcccggagggctacttgatggcctcctcgtcatgggccttggtggaggttgacgcagaggcgccacctccccaccacgagctgagccgccgccgccgccggtgaagcagatcgcgtctgtgggtggcgtggggttccccatcaacggatcgaggtgcagacgcagctgctcatggcgaacggcgcggcggcgccgggttcgcggccgacgccttttcgtccggggacgagatcgacgaggatgccgtggtggagctcggcgaggcggatcccgtcagcaggaagcggcgcaaggagaaggagaagaagaagcggcgcaaggagaagaggaagcaacggaagtgggcgccgcccgacaaggacgaggtacgcgtgggcctttctacttatcactcgggctctacttatctctttatttagttcaccttccca

SEQ ID NO: 16666 - DNA, 1060 bp, Oryza sativa
gcaatataaacttgaatagaaatttttctttgtgcataatcttcaattggaaagtatatttctttttggaaaaagtacgaattaccccctgaactatcacggtcgtccaaattccccccctaaacccgaaaaccatacattattcaccctaaactttcaataccggacgaattacccccctcgactcaatccagagcagttttgtcctatgtggcgtatgcgtggcaacccagtcagcattttctttttttaaatatggtgggcccacctgtcattctctcccatctcctccttttcctcttcccctcttcctctctctctctctcgacgttaggcgcggtcggcacgcgagggccgcgatgggcggcagcggtttgtcaggcgtggccgcacgggcggtcggcacgcgagggcaacggtgggcggcagcgcgtcgtcaggcgtggccgtgcgggcgatcagcgcgcacggcggcacgcgagggcgggcggtgggccgagaagatcgatcccgatcccctccagcggccccatctttttcgttcttggtcatcaggagagatcgatctccttggttttgtcgctgtcaagcagcagcaacagcaccttgcttgctaggtcatcgtcgacggaatctgctccgccccctgtgcatcgcccatcttcgccgcgaccgcggtcgaccttggggcctccagccccgacctcctcttctcctgtcgtcgcgttctcctggaccacgccgtcaaccggctctccctcgctggcgttcgttggtccgccaccgccgtcgaccggcctgagccacagtgtcctttgcgatgagccggcaccggcgcctggctagggtgctcatcgctgccgtcaggacttggccgcttcctccatcggctctgcctcttggattttcaaccagagccgcccgccgcgctcgcgtcgtgtacctagtcgcgctcgctgtctggagcccattgccgcgcatgcctgttgattttgcaaattggccgggggagacaatgagattccgaatgtctcgccatctcgatcacgcccatgttaca

SEQ ID NO: 16667 - DNA, 2844 bp, Oryza sativa
ctttgttctcaagtgtgcatttttttttattttgacaaaatttgctcaaattttgtcaaaaatcaaaattagtttcgtagttcaacagtttgatcgcagaggtttgaagagctcgcggttggaaagatgtaagtaatattcaaatttgtgtattatttgtattgtgtttgtgaattcaataaatattcgaaaatttgtttatgtcggtttaaattttcagaatggatccgaactttccataccagtcgccgtcgttcaccttgggtgatttcgaccccaactacatgtcggggtttgacggtacctccggatcggctccaactccaccatctgtggaggaggtaccggttcatacggctgtcgttgaggaggtaccggttcaggcggagacagcttcggaaggattttccggaaccgcgagcggaagtgtttcgacacacaccggctcgaagagatcgagaacctccggtgtgtggcaaagcttcgacgagataaaggaaacatgccccgacggaagggaggtatcgaaagcccgttgtagaatatgtaggcaaattttatctgctcgttcttctggtggtacaggtcacctcaagcgccatgcggagtcgtgtgccaagaagcaaggaatacaactccggcagcagcaacttatggtaaacccagacggtacggtacacagttgggagtacgatcccatggttgctcgggaatctcttgtccggttaatcgccaggcaagatttacccctgaactttggggagtcccctgcttttgaacattacattcagcaatctcataaccctaggtttaaagctgtgagtaggcaaacatcaactagagatttagagaatgtttatcacaaggaagcaactgcacttaaggaactgtttagtacatgtactttctctgttagtgttacttcagatatatggagtagtagagctagagaggattatcttagcgtagttgttcattttgttgatgatgattggcaattacaaaagagagttttagggcttaggttaatagatgtctcacatacaggagaaaacatagctgaaagaattagggaagtaattaatgaatttaatcttgctgataaaatatttgctgtcaccctagataatgcatctgctaattctagggctattgaaatattgcaacctttattttgtgtgtatgctcaatcttttctactccatcagcgttgtgcatgtcatataattaatttgattgttaagactggcatgaagagggtaggtgaccacatcgatgctgttcgtcaagcaatcgcgtggttaactgcttctaacccgcggattgctgcatggaagaggttttgcaatgcggccggtgtgaaagctcgtaagtttgccaccgatgcagagcatcggtggaatgcaacgtatttaatgttaaaagttgttttaccttatagtagtttactttctgattttgttcagtcacgtggtggcccaagaaacagtgacgggtcttcagtactgaacgagcatgtttgggcaattgtccaaaaattttaccaatttctagaaactttttatgattgtactctaactttgtcacaagtttattatccaactgctaatataattttgcacaaccttcttgaaattgctactttatttaaagaatacgaaaatgatgacgttctaactgaacctgtctttcacatgaaacaaaaatatttgaaatattggaaaaatatacctatgttgtatgctcttgcttttgttttagatcctaggtgtaaattaaggggattgtctgctattttatcacttgttggagatactataggtgtagattatagttctttttatactgaggttagacgtaaattatatgaggtttttggaagatatgaagtaaagtttcaggaagttcgccagcagagaccccctcctatccccactacaggtaagaagaagatacagtggggtaggatttggggtggatcgtcttcaagttcaatccaaggtggtggcagttcgtcggctacaagtggagacgcctcttcgcatgttgtggccgaagagttgtccggttatttggacagcgacgccatccaccacgaagcacaagatttcaacgtcctcgggtggtggaatgaccacaagataacatatcctgtgctttcaaaactagcacgggatgtgttgacggtgcccgtgtcgacggtgtcctccgaatcggagaccggaggacgactctgcgcagcgaccacgtcgaaatgctacaatgcgttaaagactgggagcttgctcaacaacatgcccaatacactgcggacaaccaagaattggccgcccagttcgagcaactctacctggatccagaccaaccccagtagaattttgttagaagtagttctgacctttgagctgtactcttttctttgtcatggttttctcattttcccctatgagtttttacatgacaaagtttttaacgaggcagcatgtatcattgtatcctgtaatgatataaacatcaataaaggtcattactatttttaacaaattcttttgcaatattttcgcaagtgtggatttatctttaaattatttcaaaataatgaatcacaatctatatttttaaatttttcaacacaacaaaaaaataccattttttcttttttttaacattagcaaatcattacttttttaaaaaacttttatttccattttttaaataccattttttcattttttaacattagtaaatcattacttttttttaaacattttatttccatttttaatttttttttccttatacatttactttgctttttttttaaaaaaaaacactgtgcactgc

SEQ ID NO: 16668 - DNA, 2757 bp, Oryza sativa
gtgcttgggcctgcggctcggcacgtgggccggcacggcacggcccgtttcatcaaccatacctaacggaccgtaccaaaatgggccatagccaaaccatacccatgccagtccggccggaccacccatttaaacacctatatccaccatcccccttctcctcctcatgagtccaccatcttcaccaaacaacaccaccgtcctgctgcttccgccgcatcctcgccggtgagtacccagcacgaacatcttctcttgtagatccaaaagctcccctcttttcccttcaatcgtagtactaacagcagcgtgcgtttgtttgtttcaacgaattttggggggtgggtttcagctgccctacgctgtgtcctgcgaggatggatatggctctctttaggcatgggacaacggattccggtgatgcttatcttgttcttggattggggtttccaattcctgcatctaatcgaactcggagttttatggcgcgtcctcgtttggttctctgtataagtcgttccaggaggagcctgcccgatcccgacctccaagattgtgcagctttcgcggtgttcctgcacgagcagttcatcttccaaagaggttgcacctctgccagtgttcctgcacaagcgattgatctgttaagagacgctctgctccagatggagatgtgcagcagagaggagattatggatttgtgcccccaaaacatgtgctgtgtaattccccaagttttgcctaagcagctatgccttcctccctgttcaacaaaggaggaacttcggacgatactgaccgaaactacggctcgcgaattttcagacctgccacatgatatcctgatggatatcattgccatgttggagatccctgatgccctgcgtgcggcttcagtctgctcctcgtggcgctccgtgcatatcaaactgcacaaccttggaaagtacaaacgacctcagacgccgtgtttcctctacacttctcaatctattggtgaaaacatcgcttgcctctacagccttgcagagaagaggacctacaagttaactctgcccgagccacccatcagtaggaggtatctgcttgggtcttcagatggctggctggttaccgctgatgagaggtctgagatgcacattcttaatacgatcaccggtgaacagatcgctcttccgtcagtgataaccatcaaccaggtgacgcccattttcaaccgcaaaggcgagctctgcaaatatcgttactcacggcacacagcggagggtgttactgagtcacccatgacgcttcctcttgacaaactacggtacttcttccattgcaaggcctttgtattctacgataaattcgtacgaagctatattgtggtgctcattcatgatccacataaacagatctcatttgctagattagaacatgacaagtggacatggctgccaccacacttgggaattcatgactgcgcctacaaggatggcctactgtatgcagtgacgtcatttggggaaatcttctcgtttgatctcgacgccactgtgatcacagcaaaggtaattatgggcaggacaaaggagtatgcgtgtgagagaatttatattgttcatgctccatgtggtgatctgctgcaagtttggaaaccacaggaggggaatggtaattgggttgatgaaatcactggctttccagctcttgtgagcaacactcagaacacaagaatatttagagttgacactgtggctaaaaagctggtgcaaatatttagcttggatgaccatgtgttgtttattgggaataaccagtcatcttgtcttggtgtttgtgagtacccacagctgaaggcaaatcatgtgtattttacagatgatttcgagtgcttgtcctccaagagcatgtggggtctccgccttgatattggagtccttaacctggaagataagagcatcgatgaaattgtagcacctcggcttttcctcaagtgtcgagctcctgtgtttctcgtaccgaatcctagcatgatgaattcaactctccacggttagacaaaaggtcccaatatgtttgtgtgtgtttagtagagtgcccgtgcgttgcaacgggaaatgtaaagacaagaaaattaaggaaaagttaaaaaaaattacattatgtaattaattaattaaaatacaaattttcttaaaaatttggatatttttttaagttggtaggtgtataattaaattataattacactctttggaattttattgaagttttcagagcttaattgcaaattttaataatacaaagatagtttcagcatttattcttcagcccgcgaattaaaatttctcgttcattctcttctgggtaaccgaaggtgaagtgctatttgatgcggactctgtatgatttgttgtgtgttggacccgggatgttgcggacaaaaataggtgagaacggatgaaaatttcaccggaagattaggtataggtatatagaatgttagattagattagattagattagaggtagataacatataaacgatgaaatcggatagaaatcagacttttttctttttacatacaatcggacctttttcgctctttttttattttagacggacgatggaaacattttcaaatttttgaagtataagtagagatagagattagccattttcgttttcttagagagtattatcacggaaaacatggtagtttattaatctataattaattaagtattagtaaaaaatagattaatatgttt

SEQ ID NO: 16669 - DNA, 5148 bp, Oryza sativa
tgttgtcaacgaggctgaatgtcatagtagtaaaaccttaagtaccaagtccccctactggcgcgccactgtcgacgggtgatacccgtagaccggatatagagggtattggggtacgttggtacaaggatctacgtagtacgacatcaagcaaacaaaagacgagaattatactggttcaggcccctagataggtaatagtcctaatccagttgatgtgggattatatggtggaaaacacaggttacaaagggaacaatggaacttgtcggatccggcgagatcgtagtcgagttggttcaactagatctcgatggcttggctccttgcaggctccggcttcgtagcctgtgtgggttgtgttggctctgagattcgatgccttaggtcctccccggggggtcccttttatattgcagacctggaggtctccaagtagaactcggagatatcaggccctgtacgatacattaacgacccaatcttgtccgagtaggattcttcccatccatagattctgtgaaggatttccttagagtacgcaggaagtatccgtatgcgcgtggatataccataccgatatgtaacgtatattaaagggtaaagggtatgcctaacccgtagccctgatgcatgtagcccccgacttctgcttaaaatgaactcgtgtaaccattcgcgacttcgggtgtcgagactgttgtcgttcctagtgcgaggaccgcggagacaggccgtagtcgagcacgccatttgaagcccaacggtcacgagcgaattttaaactaagtccaaaaaaccgccgcgcgtaacggacccagaaatttccggcaggcatctctctctgttccttggaattcgcaccgttggtagtgcgcctatttaaaggaatgttggggatccattttgaagtccgcccaccgtgcagaaaatattccacctgtaagcgctcttcgccttcttcaccgccacaagaaaccctagttcatcaacctaggccctttctccggcgatcttcgattagcgatggacctcaggaaatcatcttccaccagtgcgtcgctgaagaagcttcaggaagacggcgcccttcccggtcgtggaaccatggagagggaagcaggaggtactaatccccagcccgtcttaggtcgcatggttgcgatcgaagactatattctctgcggttttctccctccgccttccgaattccttctcctagttttgaacttctatggtctttctcttcttcatttgaaccccaattctatcgcttttcttagcatctttgctcatctttgcgaggcctacattggtgtagagccttttcttgatctctttcgcttctactacgagctgcgttggatggagtccaacagggtatctggttgcgtcgggttctgacttcgggatggcctgaagtcgcgttatatccccttccagtgcccttcttctcacagcaaatggcggaataggtggctctatcttgagatcaaagattcagaccctgtcttcgttgttcccaaagaacaacctgacaagatttcgtcttggaccgcaaagccccccttgaccccctctcttcagtcgtttatcgacatcatcgacgacttccgagtacggggcttgtcggggtatgaagtcattgcagacttcgttggtaggcggatccagccgttccaagctcgggcccatccagcctttaactattccggaccggaggacgcgacccgggtttctcctcggggtatctttctcgcatttttcttgacatgtgtacgttcgcgttcctcttgatttatcgaagtttggttctcgattcacaggtttgaacagcgaaaccatggagcgccgcgtcgaccaggtgatgatcagtggtctgacaacggcgagtgacatccccgtgcccctttgtgagaagggggcagccgaacgcaatgacgctatcaacgtaagtgtactcgataggcatcccgcattttcctttcgagatcaccttaagacttgattaagcgtaggctcttcctctgactgacatcatcgggccgctcgcggaccatcaggtggcggcgtctctgaaagagaaggcgccaaggaggcgtctgatgctgctgctgccacaactagcggtcgcaatgttccgacaaaggggaggaagttctcctctgtaagcggacatcgtcgcaaggcgtcgaccccctgggtaatttatcctgtcgtcagatcgtgcagccagaaggattttgccttactttgcattgattgtctttcaggcctcggacgcgtctcccccgcctccacgacgacaacgtattgtgacgattggcgagaagtaagtagatgaacttttagatttccgtgattctattcaagcgttgtctgacccgtggtcgtcccgtagggaggcgcgggcaaaggctgtgcaagccaagttcggagggacttccagcgcgtcgcctgccgtggcctcgacggatgtcgcgctcacagccgggagccgggaggcgacgcctagcggcccagtcagcgatcccgcggcaggtcgtggtccgccaattgccggcctcaccttggaggagctccaagtcgaaatgaggcgcctcctcgaagctggtgctcgcggcatcgaccgcgagattgcagaggcaaggtcggaagcagcgctggcgaatgcgcgtgctgaccggttggtgcgtgagttggctgaagcccgtgaagacctcacgaagatgagggaattggtgtccggcaacgagcgacaacggaaggggctcgaggaccgcctgtcggaactcgggaacaacctgtcggaaatccggggttcgttgtgggtcacctacactggcctgcaccagctctccggggagtgcggcatcaagtctaccatcccggtgaatcccgacgagttctcgctgacctcctcccttgcggaactggcaacgacgatgggggagatcccccccaagcatgcagccaggattgcggaggagacgtcgagcgggatctacaccggggagtgtcatgtcctcgcgtgtgtaaagcagtcgcgtcctgaactcgatctgcgcgagatcttggatcagggggcggccagcgacacgcgtgaggaggtgatggaagaagtcggtgatctgggagagtctattctccccctatttgaagagtaggacttcttgtacttccaagacacgctgtgtaaaacttgaattctgaccgccttcgtgcgtgcaattatcattctagtttacttttgtatgttgacctcggaaacttttgtcctttgtagagatgctgatgatgaggatatccagcagtgcggccagcccgagtcactggcgataatttcggtactcgagtttgagccacacgtgtcgcccgacaatgtggaccagacccttgatacggagacagggatgacgacgacttcctcaggttagtagtccattcatcccttgatgccctcccgactaggtcaaccgtgttctcgaaagaggtgtgcagcttgacttagtggttatcacattaagaagatctcgagggtgcccttgctggccaagatcatcgtatccaatactggaagatgaagtttgaagtggcggaactcgagagaaccatgctggcagtgaagaaagagcaggctgtggaaacgctccaaggtcgcgaggtgtggtttaactcgtacttgaagagttgctgcacatctatggccagggtctgtagagaacttcgagtggtccgcggagatcccgaggagtcggcggccggatacatctcatggctgaacggggcctgtgcccaactcaatggcatcggcaagcgtatcgacgaggccttgaagcaggagtgtcgtcgatcgagccggtatgccggagggcacgtgttggcttgcccgcgagatcatcgtccgcgcttggacctcgactttctccatgagggttttgctcgttctcagaggactccggcggagatagaccatctggcgaggtcgatgtcgccgttggccgagaagatcttccagtctatggactggcgttggccttcttggtagtattcgtaccctgtgacagatatcttggaaaaaaagtgtaatttagcaaaagatttgtgtaaaaactgtaagaagtattttgtgaaatagaaaagaaatctatctttaacaaatgtttcttactctggatgtcgtgtgtaagagtgtgttctcagtacacgactttagtcagccgtttaagtcgtacactctccctggctcccagccttgtcgtcggaggaattttctcggaggataaggctcttggacttttgacctgccttggttgaataagctctgatcctagcccccagccgtgaagttggaaagttaatttccgatttcatggcttggttaatacgcacggcgagaactcttacacgaccagatcttacatggtcttttgtctctacaggatctgacaaggccttatcggctttgggtgtccccagccgacgatcccttaggttcctcggaggccttgtcaagacagcgtaaagggacataaggacaggtttcaacgctaggtgtcatcagggtaagggatcatcgggtgaaaaacactttgattgtaatatgggcctaaaaataggctttattgatactgtaaggtgtcttacaggtatggatggtattgactcatacatagaatttacgtagttggtcaatgttccaagaatttgctaactcgcgaccgtcgccgtctgcgattttgaatgcgcctggccgcaagacttgtgtgatcgtgtaaggtccttcccattttggtgagagtttgtttcgccctgcttggctttgaacccgtcggaggacatagtcgccgatcgaaagtatgcgtgctcggatgcgcttctcgtggtaacgtcggagggcctgttgatagctggctgctcgaacggcaactcgttcacgatgctcctcgagaagatttacatcgatgtctcactgttcctcctggtcctcgtcggagcgcttctgtactcgtgtattctgatgtcatagctcaccggggagcatagcctcagagccgtacacgaggaagaagggtgtttccttgttagacgttgtcggtgtggtgcgtacgacccatagtactgatgggagttcttcaacccattttt

SEQ ID NO: 16670 - DNA, 12666 bp, Oryza sativa
tgtcatgatgaccgcgtaaagcagcttttggatctgtgggtatcttgtctttgcgtcgtggagagcttcgctaacgtagtagactggtcgttgtactttctctctctcgacaacaatgacggtgctaacggaatatagtgtggcggcaatatagaggaataattcttcattaggttggggagcaacgagtacaggggggtttgataggtagcgcttgagtgcaacgaatgcctcttcggcttcctgtgtccatacaaatttgtcttgtttcttcagcagagcgaagaaaggttatcctcgttctcccatcctagcgacgaacctactcagtgctgccatgcatccggttagcttttgtacctccttaagtcttatgggcgacttcatgttctcgattgccttgatcttctcgggatttgcttctattcctctgccaaagacaaggaatccgagcagcttgcccgacggtactccgaacgtgcacttctctggattgagcatgaggcgatatcgtcggaggctgtcgagcgtttcccacagatcgtcaatcaatgagtcgcatgtcttggttttgacaacgatatcgtcgacgtatgcctcgacattgttgccgagctggtcactaagtgcgccctggaccgtgcgctggaaggtattccctgcggttatcagtccgaacgggtatcttaacatagcaaaataccctgaacggcgtgatgaatgctatcttctcttcgtcctcttttgccatgctgatttggtggtagccagagtaagcgtcgaggaagctcaacagcttgcaaccggctgttgaatccaccagttgatctattcgagggagagggaagtgatccttagggcacgccttattgaggtcggtgaagtcgacgcacattctccattttccgttggccttccgcaccatgactggattggctagccactctggatgaagtacttctctgatgaagccggctttgagaagtttgtcgagctcttctcgtatagcttgttttcggtctggtgcaaatctccgcagtctttgctttactggcttggcatcgggtcgcaccatgagtttatgctcaatcacctccctagggacccccggcatgtcggacggctgccaagcgaacacgtcagcattatcacggaggaaggtgatgagcgcgagttcctatttctcgtttagtgtcgccccaatcttgacggtcttgtcggggttggcactggagagtggaacgatcttgatggtgccgtccggtttcggcgtcttgtttgtcttgctcactttcttgggtggctcagtcgtggcgggtgggctgggcgtttgctcgaccatgtcgaggctccgcttgtcgcactgcaccgccagctttgcgttcccttgaatagtgattgttcccttcagtcccgacatcttgagcacttgatacgcgtagtgagatgcggccatgaacttcgcaagtgcagttctcccgataatggcgttgtaagctgtatcgaattcagcgacatcaaaggtgatctgctctgttcggaagttgttggcttggccgaaagtcacgggcaacgtaatcttgcccaatggtctggacgatgattggggaataattccgtggaagggttgattggttggtgtcaactcgctttgcggaattcccatcgcgtccaaagtgctggcgaaaagaagattgattgagctgccaccgtcgatgaggactcgcgctaccttgatgttccgaatagtgggttcgaccacgatcggatatcgtcctgggatgacggcggtcttggggtggtcttcttccgagaactctatcttctgctcagaccacttcatcttgggtgcagccccctgccatgtcgaacagacttcacattccactttcttgtattctcgctttgaggagtatggtgtggaaccgccgaagatgtgtgaaacgtggaggtcgaagtctggatacgctgaatccgattcgtgaggaaccgcctcctcgttcttctcgaccacgcgtactcgcttgcctttttcaaatgcgatgtgcttctcgagcgattttttgaaaacaaggcaatcttccagagaatgtctgtccgtcttgtgtatggggcaccatactttctttgtgtcgctactttgtgggtatgggcgcttgggagggttcgcgtattctgctgcgaggacttctgcttgagctttccttttcccatttttgcgatttttcttcttgcttgactcagatgcgtccgtggctggtttcttctctcccccggtcttcggcttatcgttcttgcgtcttagcgcatcatctgcgtgggcgcatcgctcaacaatctcgaacaatctccgagtggttgtgatgcgtcttgtcgccaactcctaggtagtgtagcgatctctgacaccggatttgaaggcgcgaattacagaagcgtcgatgatttcggggattgtatttctgcactcgttgaagcgccgaacatattccctcaatgattcaccagagttctgtgtcaacgcatgtaggtcgtcttcgatcgcgtggtgcttgtatgtttcttggaaattggcgacgaactgttgccacaggtctgcccacgaagagattgagtagggaggaagatgcatcagccatgaacgtgcagaacctttcaacgcagttggtaaataatttgccaacgcgttgtcgtctgctccggcagtgtagagtactgtggagtagacttgaaggaactcctctgggtcggtgctcccatcatacttttctattactccaggtcggaatctcttaggccatcggacatcacgcagggaacgaccgaaagccctacacccagcgttgggggcggtgggttgtcggcggtcgtgtgtccttcgtggatgtctgtctgacgatgaggaggacgatgatgatgacgatgacgatgggttgcttggttccggcatacgattacgaggatgtcggcctggatctcgggaatcctgtcgtcgtctcccgctgttgtctcggcgccgatctccgtcatcgtcgttgttatggtgacggcctctaccagtattgtctggcacccatcgttcgcgatcgttgtgatcgtggtggttgtcctggtctcggtcctcgtttgagcggtttcctcgatttccgttatcatggcgccgtgaagagacatgatgccgagaacgattcacattgtctcgtgtgcgtcgtgcctctcggtggccgttgatgtgatctcggagatcgccagtgccgcgaggtggaggggtagctcgttgaggtgattccctcctttccgggtcttcaccattggcatcgccagttggtggctgctccgggtgcgctgcggtagcgacttcttcgaacgcgttgctgaggttggtcactgattcccgtagtcgttctgtccaacgctcgaggtcatcgttcagaacgggatcgtagggagtttccctcagtatagcttgaacggccctaatgtgctgggctggagaagtcaattgactccccggttctgcgttggcgtgcgcttatcgatgacccatagtcttcgagaaggtgtaagaccgatggttcgtgaggattgatatcgaataccccaacgaatcgatctgaagttggagtcgctccatgttccttgtcgttatccctgatggggacgtatgacttaggagacagagctttcatggcgctgagaaagaccttgcagcttgagaggtcgtgattctttgtcttctgaataggacaatagacatcacgagttggagaaatacgctgaattccacgctctttgcaggcgcgaattttggcgcagacgttgaggaaaacccaacaggcttgcaaagtgtgtttcctggttttgtggataggacaccagaaccttgtggcttcggaagtcatctttgtcggctcgcggttcatgtcggaaggacaaggtttggccgcatcagaatccttcttgagctcggatgtcgtcgatgctccgttctccgtctcagcgggaggatttttcgacatggagtcgccttggtttgtagccactgcgttctcgtttccggtcattggaggaccagttgagatcggcgtagtggtgtaaaccgggaagacgatttcgccgacttgagtccacaccagcatcgttgaagcagggagtacttggctgaggttggtgttgacgctgttgtcgacgaggctggatgtcatagtagtaaaaccttgagtaccaagtccccctacctggcgcgccactgtcgacgggtgatacccgtagaccggatatagagggtattggggtacgttggtacaaggatctacgtagtacgacatcaagcaaacaaaagacgagaattatactggttcaggccccttgataggtaatagccctaatccagttgatgtggggttatatggtggaaaacacaggttacaaagagaacaatggaacttgtcgaatccggcgagatcgtagtcgagttggttcgactagatctcgatggcttggctccttgcaggctccggcttcgtaggctgtgtgggttgtgttggctctgagattcgatgccttaggtcctccccggggggtcccttttatattgcagacctggaggtctccaagtagaactcggagatatcaggccctgtacgatacactaacgacccaatcttgtccgagtaggattcttcccatccatagattctgtgaaggatttccttagagtacgcaggaagtatccgtatacgcgtgggtataccataccgatatgtaacgtatatcgaagggtaaaggatatgcctaacccgtaaccctgacaactttgcagatgtagattgcatcatcgtatacatttataatgtttgaagaaagtttactgcattgtatagttatattctttacacatctatatgtacatttgttgatggttgttattgatcagtttcgaccgtcaatattaccaaaataaaggagaactagtgatgcttacaatgcatatacttgttagaataataatattcctctagtatttggttcactaaccttttgcagagaataaccataaagtggaggagaatcggcatcaactcaaacgataaatcaatcggcatcaactcaaacgataaatcaatcggacgatgtcgagaatcagacttatgcgtgaatgggccaagaactcagaattgacacgatgaattgggccaaaattcacaagtctgcgtaaatgagcaatagaggaggccgccagccaaagatgggccgggatggcccagcctatggttcggccgaacccatcctggcgccgttggatgcagggttcggcgtggacgtccaagattgcatcccaatgacggttggagggcacttcagacaattccccttccacaactataacagccctccctccagaaccgcgtagcccagcacaactgacgagcgggcccacttatacacaccaccccacttacacttttgtcctcgcttcgtgtaaaagggttaaccctggagtgatgtggttggagggaagaggccttataagtcggttccactcgtgctaaactagcaaggtggtactaaacatatgcacacagctcacatgggccacacaggcctaatccttattgggccgggatgtcacatccacccccctcaaaggacccgatgtccccgtcgatccaactttcccagccacacaggcatacaagcaaatgtccaggaacacaccccctcttagcgcacgtccgtacgtccagtgtcgatgccatatgccatgccttgtgcctcacacagagcccacatgcgccatgcgccatatgcccgaccccgtacgtctagtgtcgatgccatatgccatgccttgtgcctcacacagagcccacatgcgccatgcgccatatgcccgaccccgtacgtccagtgtcgatgccatatgccatgccttgtgcattgtgcctcacacaaagcccacatgcgccatgcgccatatgcccgacccgacgtccccgtcggtccaacttacccaggcacacaggcatacaggcaaatgtccaggaacacaccccctcttagcgcacgtccgtacgtccagtgtcgatgccatatgccatgccttgtgcctcacacagagcccacatgcgccatgcgccatatgaccgcacactgacccgtacgtgcaaccgcgagggtcggctctgataccatttgtaacagccctccctccagaaccgcgtagcccagcccaaccgacgagcgggcccacttacacacaccaccccacttacactttcgtcctcgcttcgtttaaaagggttaacctaggagtgatgtggttggagggaagaggccttataagtcggttccactcgtgctaaactagcaaggtggtattaaacatgcgcacacagctcacatgggccacacaggcctaatccttattgggccaggatgtcacaacaaccgtcataactacctctatataaggacttcaccttctcacttcactcacacacctcaagcaagagctctctcatattctcttaagtttagtttagtagtatcaagctagtggaatagtaatagagtagaaatcaagagtccggaagtcttcggaagagttcgggtatggctctagtagatttcctttcctcttttgtaagctttgtactttatttagaatactcttttttatacatttatggtattgaaatactttccgagtatatgaatgcctactttacattatgttcatgttatactgattatactgctagcttatctagcttatctgagagatactttggtgcgggtataatgtttgcatatgcaattactctatgtcatgacgatgatattagagtagtatctggtagtttaaacgtggtgtctagattacgggatatcattatttggggttatatgctacggatgagaggtgggccgctgatggtgacagctcagtacgggtatttctccgcgcgtgtatatagtcctaagttaattccctagggagggtactcgtccgtatttagccccggttgtatggtcatgatgggctgtcgtaaggaactcagcagtcaggggtggcttctcgaagtaccaggagagtatcggatagagagtattagctagtatatcagttaactaggatgtatgtgtactatgtatattagaagtataggaatagattatctttctcttttctttccacttagcttagataatatattatgagattgagtagctgatgcttgtgtgtcactctacccttggtttatcttaacccctacttagaatatgattatcacaagtaatatataaattattagtcaagttctctctacatgatcttcccacgggataaaataaatatgatacccttggaatactctcgggtgaaatgctacaatggtatatttgtgcgcttgcggataaactctgtaaccataatataccagaagtatttctacgccattgctgggaattatatttctagtaatatcgttaagaaataccaactattatatactgaaaatccattaaatgtctactatatactaaaagttcattgaattcccaaaaatgctctcaaactgtgtcacgtggctttctacaaacgttattaagacgtcatatgacgatctaataaattagaaaaaatccttaaaaaattgataaaaaggaaaaaaaatctaaccattgatattcttttagataggtggaccccactaattttaactgttagatcgccaaaaacaaaattccagtacacccaaccccaccgtatttgggcacacatgtacgtacatactccctcaatcctccaactctccctcgggatcccactctcctctcccattttcgagctaacttttcctattttctagctaacacaaaatataataataataataataataataataaagttaaaatgatcatgactctcaagttacatgcacttttctcaatttatttgcaaattttcatttcccgtgtttttctgcactacactgaaacatccgttcttttcaacactctattttacacatgtattcctatcatatgtatgtaccttttctattctttttttttcaatcctgtgttataaaggaactttaattattattaaatcataattcaagattcatattacctttatttactatataaaatttagataatgtagctgttttgaatacaaatatttgagcaaaatttgtactatgaaaagattaatgaattcaaatgtgtgagtctaaagtccagattcaatcaccaccaaggatcttaataccatgatgcatactctgggcctacaagatattattaggttgtgttcattagatgggtttgggagctaatctcccacgcacgtaaaatgaatcgactcattacattagagtatgattaattaagtattagttatttttttttataaaatggattaatatgcttttttaaaagtaatttttctatagaaaacgtttagaaaaagcaccatttagtagtttggaaagcgtgcgcatagaaaacaaaggagctaagttaggaaaggaggggaaagaacacaaccttagcgaagtagacaccgacagaagcaccaagccgccagaatcgactttccatgacttcttgagcctaatagcacactaggtaacgaggtgaacgacaaaggattgagaggagggtagagggagacttttgcgtcttccacaaggactagaaaatagcttcatctctatcgtcgagccctaccacatcatatccaatgcatcaggagaggcccactgatatggaggtcgataagatactccgcgaggccgatggtgacatgtagatcaattatgaggtgttcgtaactaaattcagaaaaaaaaaacaagcaatttgattaaaatacacattcaaaaacaaaaaaaactaaaacaataaaaaatatataaatagattccacgtagaatataaaatatcaacagaccaaataaaattacgttgacttgaaaaatcgacacgcatcggcctgggagatctgcttaactctagtgcatgtccaggaaatttgccttcgggttctgagcgtgccagatgttttgatcctacaaccaacaagacaggaaacaacaaagagttaaatccatcaacaatagccgatcagcaagattgccgatgacatatcattgagggccacgctgatgcaacagaagtcggaatctgctgttaccttttgagctaagtgggccaaactatcaaattcttgggccgcaaacttctcacttataggtgccaatagaccctgaaaggcgagatcggcaagctgcgaatccatcaaagccaagctaaaacacctgttcctcatgtcccggaacctctgtatgtaatcttggaccgattcgtcgtgtttctgcttgattgacgtcagatcggacaacttcatctcatgaatcccgctgtagaaatacttgtggaattgcttctccagatcggcccaggtgtgcacagagttatgtggcaatgctgaaaaccatgtgaaggccgatcccgatagagatagaggatagcctgactctcaaagcgtcggtagctgatgcctctccgcactgggccaggaatcggcttacatgctcgtaggttgatacattgtcttgtcctaagaacgtcgaaaaatcagggaccttgtatcggtttggtaatggcactctctcaaaatgctccgggtagggatgtcgatacaagtttccactgtctttaggcttgagcccaaattgttccctcatcacatcggctatcatgtttgcccacgacctttgctgaggtgctccttggatctgcttttgtatttgatccagctgattgtattgtggcaggtactgaggttgagacaatcctcctggccgatactgtatttgaggtgagtggggctggtattggaagttgaagttgccccccatatgaggttaagggctctgacggactatgttctattcagggatctattcggggatgagctggctgccgatagttggctgtggctgtgggacaggtgaatgctgccccatggtcagttgtggaactggctcaattatcggctctcttggcccaaacatggctgcaacttgatctggggagacttgagggatattgtgtccagcatgttgcagttgaggtctgaccagaacacgaggattgatggttggctgtctaggtgccgatgccgttggaccctgccccctagggggcactgccctcctccgaccagatctgggaaggaggggggaggggagccaccgccgccgccccgcgctgtcgttgccgccctcgcccccgccggcctcctacctccctcctctggccagatctgcgagggagggagggaggggagccgccgcgccccgccgctatctgtgccaccgcagtcatcgtcctcgccgcgccgccacagtcgttgtccccgccgcgtccccgtagtcctcgtccccgccgtgtccgcctgagtgttgagggagactgagtgttgaggggagactgagtgttgagggagagagagagagttgagaggaaatgagtggtgggaggagaagataatggtagacttaagtttattttttgggtaggtacgtccgcctgcgaaaatcattttcgcatgcgccgtttaagtggtccgtctgcgaaaatagtgaacttcacctcaatttatatttttataggcggttatttagctccaagggttatgtccgcatgcaaaaaaagatccacacgtcgggaaaactgctttttctagtaatgtccgcccagcacatgaatacacaatcgctgcatcatcctggacaagattgtggtggtttcgcggcatgggaccaactgaaactgatcaaagtagtaaaagctaatgtagcccgtttaagttctggccgagtcatcttcgagacaaatcatctctgatcgacatatatatacgcacaagcgaggagagcatatcgatcacaggcgaacatatggctgttctttgattagctgaggaaattatctgaatagtatataatattcttagtgataaactgaaaaaaatatccgtgtgttgcaacaggtaaaaccatttttggattgctgtatattttactctttgattttggaccaaaagttcgatccttcctcactattcagtctcagccgagcccgctacttcgctctatttggcctgcctcttgacccaacccacaagcctgcctcttgcctcttgacctaactcacaagtggagctgtatgtccaactcgcatagttgactaccgtcttcaacctccggaagacaatctagtgtctgtctcgtcaaatccggttgaagaaaaaagtggatgaaaaaacctggaaaaaaggcgacgaaaaaagtaaaaaagaaaagcggacggaaaaagaagcgaaaaaagacggaaaaaaacagcgaaaagattgatggacgacaaacagaaaaaggaagaaaaaaaaaaggaagaaaaaaggacggaaagaaagaaaaaataatagaaagataaaaaaacgaatagaaagaaaggaaaaaacgaacggagaaaagaaaaagaaaaatggaaaaaaaggaaaaacggcgaaaaaacagaggaaatttttttacggaagccttaaaaaacttttcttttctacaaacttttctatttttttaattacaggtatatatagtgcttctaaataatggaatttcaattaaatagagaaaatagaaaagtgcactgtacagagacccacctgtcagtattttttttttatctctcgttctctgctccttcctccttccgttcttctttcttatttcagagagaggagggagaggggagggtgagcaaggcgacggcgctcctgtagccgggaggcggtgatgtcagaggcaaaacgtgtttccactctctgcgtatccgaggaaggtggcagcaaacaatcaaattgagggagaagttggaaacatggtcggcaaaagctcagtcccgaggagagagaggaggcttcggtgtggttcaaggtggcggcagacggagggggaaagtagagaaatgagttcttctcagcgagatagagctggtggtcagagggaataggaagggaagctccggttgaggagatcggctagtgatggtatattggccggcagcctgacggcaacgcgtacgtgtgcacgtgacatcgggaaagccagacaaaaacaacagaatcggactggaactacgtacgaaaagtaggcaaaaacatattaaacttttataatagataaagatatgtcagtgcagcgccttacaaaagtgtatgtacaatatcttgaatcttgaggattgtataacaaattaaaatgtgtataactaattaaaattgatctttacatatatatctctatctcttctctacattctatgttataataaaaattgaagatgtttttgccggtactttggtatgtcattcgtgtatgagtcgatttgtaagttcgttcgcttttgaaaatacatatccgtatttgagtaagttttaaattcgtttgtttttagaaataaaaaaatgaatcatctaataaaactatcttaaaaaaagtcacatgctaacttaagacaatcggactcctaactacagctcatgattttctaaatatgtatatattcaagtgaattccatag

SEQ ID NO: 16671 - DNA, 14705 bp, Oryza sativa
attaaaatagtcttcacccgttgcaacgcacgggtattttgttagtatatgaataaattaaaaagagagttgacagggtggtaaaaaaattattgccaataaaagtttatcgagatttattgaaaaaagagatacaatgaacacccaattaaaaatagaaaacaccttactctaatttcagtttattttgttagaactattttctaaacctagttccatctaaactctggatccgaataggactctgaatcaaacggaatacgattccatcttgtgaatacgaccacgggtcgcgttcgtcgcctccgccgtcggcggcggtggcggaggcttccagcggccaaattttgagaaaacctcttggggcatcgaaatttctgaaatacattgactgattctgcaaaaatcgagggagaatgtagcatgccgacgagcctcgatgaactattaaaagctaaatcctactgaagctagcagactacgatgagctattccttgtctggcaacccaagagacgcatgtcagcaacagcaagtcccttcctgtcaaagagaggacacaacaacttcacagtgcttgatcaaaatctcctcgccattttccttcttgtcatcttccccttcaaccacatactgtgtatgttatactctctccgtttcaaaatatttgataccgttgactttttagtatatgtttgaccgttcgtcttatttaaaaaatttgtaaaatatgtaaaattatatgtgtacatgaaagtatatttaacaatgaatcaaatgatataaaaagaataaataattacttaaattttttgaataagacgaatagtcaaacacgtacttaaaaagtcaacggtatcaaacattttgaaacagagggagtgttacctcggttccgttttgtttgacgtttcggacagcttcgacaaattaaaaagaacagaagattacatcgtcattctgaatctctatcggatgaacgatgaaccgggacttgctcccaaagttttccaggaatcattagaggcagatggtgtaatttttcttgcacttggcgtttgctgtcttaaaggacaggtgcttgatcttgacgctgtcttcacacggatccacgcgacttctcatccgaacacccaaaaaaatcgaatagaaggatgcgacaacacaaggttatcgtcgttgtggtctgtcgcatttccaaggccttgcggcgattcacgcaaaggcgccacctcctcaccacgagcttagccggagcgcgccgaggcgagccactcataggcgcggcgtttgacccaggccagccagaagctaaggaaggtggcggaatctggttgggttgtccggtccgagcccaccagtaatgtgggggccattcttgtcatgtggtgcacgtctccgcctccgccacctcatccaggccggcgacggcagcagcaacctcagacgagatgacacggcgtcggcgtggcatagcttggcatggcgtggcgctcgcgtctcctcgccgttccgccgccgcctctgaagagggcgatcgagcagcatgccgtcgcgccgcgcaggtgcagcgagtgcctcatcgccctggctggctgccacggtccgtagccggtcgtgacgcacggcgcacggcgcaccacgtcgttcggcatcgacgtcggaaacgtgtccagctagttcgtcgtcgaggccgagctcgtctgcagcgccagtgccgtgtacggcttcgttgcgtcgccgccggccaccgcgtcgaacgacgacatgacgatcacctccgatcaacctgcggagccaaaacacaacgacacctccacgttcttcttgattgcaagcgaagcgagatagatagagaggcattaactgatcgatggagcatggccatgggcgcggtgacctcgttctggagatccttcatctccgacagcgagagctcgggggcagaattgctctcctgctcctgtgggttcgagccggccttgtcggcgtcgtcgcctgcgtgccgaggctaagcgacaccccgcgttgccgcgtactgcaccacacggcatggcgtggcgttgcgcttgggtgtcctcgccgccatgcccgcgcacgcgttccaccgccgccgccgttgaagagatctcggtgcaggatggccggcgatcgagcagcatcttcgatgacgcgacagccgtggactcgcccggcgccgcggcgcacatgcatgttctgtacatgagaccatcgccatcgggcacgatcagccatcagccacctcggcaaactccccctcgcgtgcatgagtcgatttgtatgttcgttcgttttagaaatacatatccatatttgggttagttttaaattcgttcgtttttaaaaataaaaaaaaatcatctaagaaatctatataaaaaaatcacatgctaacttaagataatcggactcgtaattatagcttatgatattctaaatatataaatatatccaaggaattcccaaagtaaatttcgccttaactaaaccatttaaaataataagattaaaatagccttcacccgttgcaacgcacgggcattttctctagtatatgaataaattaaaaagaggggttgacggggtggtaaaaaaattatctatctgtctattatctatcttctattatatacaaaagtctcctacaaacgctcctaagtcgccatatggcgttctaataaattaaagaaattactagaaattctaagaaaaaaaagaaaaacatctgtccatccggtttcacttaaattggtggacccccgttagatcaacttagaaaaaatctttccacatccacctccctcctcccacacgtaaacctctctcccctttgtacgtaccctgtcacgtaccgtgtcaaaaaagtaccgtgtcaaaaaaaatcttcagatacgtacgtgcagcccacatatatctcctccttactggcctattttttagccagcaattcaacataaacatggtgagttaaatggtcacaatttaatttagactagaaaaaatacccgtgcgttgtaacaggtgaaggctattttaatcttattattattatattgatttaagatgaaattcaccgtgttaaactcgcttggatatacacgtagtattttattagaaaatcatgagctgcaattaggtgtccgatcgtctcaattaggtgttcaacaatatgacttggtgtacggcatcgggttgagttgatatgcttcaagatgattgccacgcatggatagagtcctgataaggcaattgtatctattaattaggatattttatgtaatttctttagatatatgtttgggcaaaagtctatcgtaaagacttatggtatcttagagtttgttagagataagagtcgtgtccgatatggacatagtttgtaattttcggatataaatagaccccaaaccacatgtaatcaatcaacacacgttcaatacaatttcggcgcatcgccacccttttttagttttgtttcgacgagttcttgcttttgggttgagctgcatcggtttcaatcttcaacaagaggtaaaacttgttatggcggcttgcgttctcgggattagtgcttccatatttatgatactctgatctcgttttttgtaattcgtcgagttatcatatatcttacataatctctggcaatatcgctatctaatctacaatcggctaacatctgttggtagagggcagccgattaggttagatatcgatgttgacttagattttataaggtatccaccactctatgaaacttccaacggcttgattgtctagatattgtccttcttttcatacttatagttgcatcagttgagtttgatcttatgagtcatgattagaatctcaatctctagcctgctacttggttgccgattagggtagtatcggagtttcagtcgatcttatctgatttaactatatttactttatatgctttattgacatgttaaatctgcccttcatgttgagatcttgttgcatttaagtatattaggcttttatttggtatattctacttgctttaatatcttaatatagagtggtatcggagtattagccgatacatgctagatctatctgatcgactatgctatcaacatatatagtctcattattaatatatatttcgatccaagtgatttatattgactcggcatggcgatcgatctatctcaatcacttgatttaagtatatatctatataaggagtatatattggtaatatctacagccgatcgagtagatttagttccttcatatttatttatgaccgccgatcaacacatatatgacatcggcgcaaagataaatgatatgtcatcggcacctaactgatcggctatcgtttatggatttaaccacggtttctttgtctttatttcttgctgattgcatgatcaaatcaaccggcacgctagcatactcgaaggcgagttttagacctgcactggagttaagcagatctcccaggcctcgtgtttttcatcaacactttcttggttgacatcggagattgactcagacaaacccgcatgaggctgataaggaaagtctaacgttatctctgaactcaccgagaacggtcacgtgagctcgataacagttactccaaggtccgcggttgagaatgtgaagcattgaagtcgggggctaccgtcaaggtccgcggttgagaatgtgaatttcttcatttgcattgaagtcgggggctactgtcagggttatggataccacatacctaatagtagttgactaaatctcgacaggacccaccacataccatgtcttatacgggaactgacttcggatatggagagagtttcggataaggaaagacaaccagagttctacatggaaacgacaaggactactcggattatatccatattagtctccctagttctacttggacaaggggacacctatgagtataaatacaaggccccctaggaggagaggggacacgaaacaacatacaaaccaacatacgccaaggcaagacgccggatatcgacttcagagataggcatggctagtcccctacggtgactatggctaccgtcaggagagatatagcgctgtctctgatctcgccggatgcggattcgaggaggaaggctaccctgttgtcgactacgagtcagtactacagaccgccaagtcgacaacagttagataggctaccccaaatattgtattggtatgattatggtgaataagagcaataccggcttcggccaacaggatgtagggttattacctaataattcaggggcccgaacctatataaaaattctcgtccccatctcttttacctcaatctcgcatatatcctggtaccaacgatccccatactacgcaaataccggaatcgcgacatcaaacgtcgacaaaaatccaacgtttaaagctcatacatgtgggacacataaatagttaaattggtagtgattatgtgcaaggcggattcggacactacgacttaccaagccaccggcaaaaatatcttcaattatttataatagtagagatagggagtaactgataacttaagatcaataaaatccaaaatattctgaaaaaataaaagctaaacattgaaccattgatttacaggtgaagtattattttcaatcattagattagatcgtactaaagtaattaatttctctctcctaatctcatgcgtatttgctagagagaaaaataaatatatactattctcccagagaaaatatacgtatgtatatatgcatgtacaggagactattatttgcaaaacaaaaaaacaacatgcatatgtacgtacataaaaaaatatattaaccatgtcctcctaacccttaaattagaaagtttatacatgatcagtctaccctatgctgtggctcctttcgatctctccagtttatttcctagggtcgttgttgactaggctatttcttatatctgtgatagttaatttataattaggagccgacgtatccgagatcgttgatatgcttagctagtccaaaataaaaatattggttaaatggtagtctaaaataaaacattcataataaaatatggcccaaagtaaaatttgtgacatacatatagcaattctgattaaaaagttatcacatggaacaatattctagccaatttttatatctttcttatacaaataatctcaacaattactccataatttttaataactgatagtggatattatattcatttacaacccattttttctatagaaaatttataactatgttaactatcttttgaataaaaaatattacacggaaccacattctatcacttttcatattattatacatagcattaacaattagcacaaataaacttgatagtatatattgttccatcatatattaccccatgaacatgcatagatgaattagatcaataatacaaagaaacaaaaatatcaaaattcatattacctcatatgttcgtgaacgattactactcgagcaaatatttttccacgtgtttctcaccactgaagctattagattatttgaagtagtatcgaatgttcaactctgcatattttcagaagagaaaattatatctgtaccactaaaatttagtagaccaattaacaccataaacaagtgtcaactctattccataaatggactcaaaacttttaaatttttatttatcactttcatcttatctatgtgtcattccctgaagggcgccaagcatggataacatagtttgctatgctactatacttatggcgggggcatgcatatgactaagttgaggtgaccctaatgagaggctactattcgcaataaaattcaactggcttacttagcgatgtgattctttagctgatagtgaattagatgttaaaattgtgctccacgaggagaacggctatgccgatacgggacacatgtttcaaggcataagggaagaaagccttggtggctacagtcagcttcggggcatttagatctaatttaatggttttatcccatgaattggtaggaataatatttcaaaatatttatgcatatatttaaacacaagtgagacatgaacaatttgatatgaagtagagatgatcttttcgttgtattaatgacataataagtttattttcttggtatggatgtaattccatttaataaaaaggtacctaacttataagacaatgatagtaaatagtagtaacatgcgagtttacatatatccgggacaaagttatttctgtttgaatatgaaagatactattgtcatttggtatatcaaaatttatggtcgacatttatttttatataattatatataaggtgatctatggtccttataattaattaatatggtgagataggatttcttcagcattatttttataaataataaataattggttcttataattaatatcgtgaagtatgacttcttttagcaatcttttataaataaattgcccgcgcatttgcgcgggcttccttcctaatatacaaaaagtcaattaaacttcctacaaacgctctcacgccaccacatggcgctttaataaattagagaaaatcctagaaattctaagaaaaaagcaaaacatctacccttaattttcacttaaattgatgggtccaatattatacaccgttagataaaattaatcctaaaacaaaccaaatactatggggtcccacctctcctccttctcccacacatatactttcctccttctcccgcacatatgtaggcaaacgtgtatggtacgtatgcttccttcccttttttttccttttttcttcttttttaatatataatggatatatttcttttaaataatcataatttcacaaacaaagagtctaccatcatagaactcgcagctaactaaattagctctacaatttttgaaaataaaatttacacattatatgttacccatttaactaataatgtaaaataatttccacttaaatcggtgtttgtactattattttcaaattatgcactattttaaaataaagtttacacaaagtaatttaaattaattattttaaatttaagatctatattaactaatttatatatttacttaaactgatagatccattatttaaatcatcggatctattttttatcacagtggattattattctcaaataatgcactgtttcaaaataatatctataccattatattgtgtacccattaaattaacaatttaaaatctatattaactaattaacacttacactaggaccggtggacccattatttaaattattagatctattgtttgctaataaataaaacgtccaaagttttctttttggcctgctgcacaatgcccgtctgcaccttttcctttcgcacgtatgacaaagtgtcgtgtctgaggcttctaaggtgatcacgatcgctgcagcgctacagctttgccacatatcaaatcatatatgattaattttgctaataacataaaaagaaaattaaaggtgtgatgcagcgagacaagaattaggcaccatggattcggttttttttcaacacttagctctgtttaagttgaaactgagagttgattatagagtaattataatgtattttgttatttcgtatttggattttgaacaatttgttcgtacaagtgaaataaatcattatgttataaatgtgagcacaatattaactaatatcaatataactcttactaagacaagggtgttataatggagtttaatgccctcttttttttcccgattccatagtttggattttcgtttgcacgctttccaagtttctaaatggtgtcctttttaaacaacattttaactttttagaagtcaattcatttgtttatacctcaaatagctatcgcataaatctgataattcatcaatttcacctgtcctaaaccctaagtagtatatattttttttcatgtgagtcatggtgatcattaaattggggatcaacggataatcaaagtcataagatgaatatgtaagagctactatgaacaactgtaaatatgcgtcaaacttatttgctattaattatacatctaatagcttgctagccacataattaatttctctctacatgtatataaccatggacgaagctggaacaaatattaccttatgccccatacatacatattacgcggttaatattctaattacatgtgttaagtcctttaaaatttcttaaaatgctctcaatctgccacatggtgctctaataaattagggcaaatattagaagttctaagaaaaaaaaagcaaagtatctacatattataatctgtacgtccaatattataatctgttagattaaattgatcttagaacaaattaaatactatgaggtcccacctctcctcctgcggcacaggtacgcacctacgtacgtgggtacatacgcttcccctccttttttttcatttttccctttcttcttttttctccatgcatatgcttccctccctttcttactatatcatgcgtcttcatgagacgatttactcacaagaattttgagtatcttactctcgcattttttatttatggccatactacaaggtatgatatagatggaccgtataataattaactagcaatagtttctcctttcttatttactcaagagagaaaaacacatgattcaaaagtcataagtacttaatctatcccctattcaaaagtttgtgaatggttttttaagatatcttaagaaaaatagaaaccttaaattattataaaataatattatccgaaatttagtttgtccttaatttatgagacaaaatttatgaacaaacaataatcttacctttcaataatataaatgcccgcgcatgtgcacgggccaccttcccaattgccaataaaagtgtatcgagatctattattatatactaaaagtccattaaacttcctagaaacgctcctaagtcgccatgtggcactcctacaaacgctcctaaaccgccacatggcgttatctaatcccaccgtcgattttcacttaaattggtggacctattattttacaccattggattagatctattatttaaaaaattataattttctcctctttatacgatacaagcgctactactatcatgtacgatgcgatccatacagacgctactaagttcttctcccctacgtacttacgtacaccaatgaaaacaaaagaatagcttacctgttgtttgcccgaaagaaaaggaaaaactatacgcacgtacatatataaaaaggacagcagaaaaatacatcagtaaaaattgatgaattttaaaatatgattttctaaaatatattgcttcacaaaaataaatatatatagttaaactaagctatataataataatataaaatatccaatcattgttctgtataccttcttctaaattatttttttaaattagatatccaattagttattccattgtatttcgtttagttaaattacaaaagttatattgtagtcctaaatacatcacaacacatagggctaacatataatggttagttgtttgatttttttttaaagttcacaacatattttagggtgtgaaatatcacttcataaatatagaacactaatttaaatctatatataaaaaaataaaaacaacacaatttagttgtgttttttcaaatagatctaattaaattataattggtttgagattaagattctcagagtttttttttgacatttttagaattatttgattggtatttgagtagtgaccagcatacatagtgcatatatagatatgaaaaaaaataaaaaatatctccagccaatgatctttgctataattcaatccttcatccatcatgagatttatggtcattcttctttgccaaatagttttgacacaaatgaacaatgaaacaatatacgcaataaactactcatgatatactttcttatacttaaggaacttcaatatgtcagacacaattgatggatatatgtcataatcttcacagacgtgactataagtgtactacagtggattatttattgtaaataagttttaaaaaaataaatacattctttaaattagtaaaaatgcctcatgtgatcatgaacaataggtgttgaaaacaaacttggcgctaaactatagatatttgtcaaaatattaaaaaaattatatggtgctctggatattatcatggtagtatgtatgtttagctatattttttaaaaataatgtcgaatgattaacctcactcattttcataagagagtattctatctatatcataaaaatttaagtagtaatgatcaacaccataaacaaactatgtctaaaaagactattttgatcacttccatcttctctttatccgtccctaaagggcaccaaacatggaacatatgcctaagttaagttgacctcagtggaggccgtcatcactaatagttgtcatcatatgaattaacatgtaggatctgttctattctattcggaccatatggggattattcagactaaatagggataacataaagtagcactcctatttaccaccatatataagttttatgatttggagactatattaagtaataattaagtaaaagaatagtggaagtacgcttattgtccttcctctttgatttctattaaatatcatgatatgtgagtatttcatactaagtttggttaattaaggaacacaaatcatactaaacttatatattagaattaatgcaataaaaatgtactttataatagtaattgacctaataaaagtgtactttagtctatagcatttatacatttataaattatttgtacgtactaattatatttatataattgcgctcttgtatcaatttaaattcagttttcaagaaagcatatgaaaatgaaggagggagtagaagtaaatagaagtctttctataattagaagaaataatcctatagaaaatatcttccattaatatatcctaaaatccataaagacatctataatatagaagaaaaaataatccttaaatgaatttttatcattatctattatatactaaaagtccattaaacttcctacaaacactcttaagctggcacattatgctctaataaattagagaaattgaagaaatataagaaaaaacaaaacatctaaccctcgattttcgcttatatggtggacttttacaccattagatctatctttttaagaaaatcccaaaacccatccaaatatcatctcatgggcacccttcctcctgggcaccctcttctcatggtatatacatcgtccctccctctttccttccttccttccttatttctctaatataactatttaaatttaattgatggatccattaatgataaacattacatcttcatctaacaagaaaatctggtaaccccaccctcaccgccatacgcgcacacgtacgtaggtacgtactcactccaccctcctgactctccccccccccctcttctatttctttagctatttctagctaacactcaatctatcaaaaaatcaataatcggatttctaagtttatattcaagttacttttttttcttaattatttttgaattattgtgttatttataattaaatacatgatactagatccatatacatatatatagctcaaacttctaatataaatgtttaagagaaaatttttaagagccatcttaaacaaatattaaatatagatatataaacaccataagtcactaagtgacaatcgtacaaatgcttctaaaccgccacgtggcactctaataaattgtaaaaaatcacagaaattataagaaaaaagaaaaacatctaactattgactttttctttaaatttgtagggccaatcattagatctaatcttaatcttatcctacttaaaaacttcaagatgatttggtgctatgtcgcttgatgacgtcatccatgagtcagctgcacgtacttcatgtatatgttccgttcgctagagagagagagagagattttgactcggctcactaaagaaaagcgaggcgttgtacatcagataaaaacttccggcctaatttcattgtagacaaaattaagatttgaaacatcaaggaataagcataaacaaagtttcacatgacctaaacgaacagaacaaggaaatttgatcgtatcatgcatagaggaactatggcttaacatagtacgagatataatcgagagagttaggtcacaactaacctaattagataaaaccctgtataaggaaacgttactgcagaagtatattgtatgataatgatagaaacatagtacaaaataaatttatttcgttgctaaacagcataatcttctatgttactatgtactttgtatagtttgcatctttagttaatcatccaaaaaaactataaacacaattaagatgatgtgctttgaaaatttagatcaaatatagattcaacatcaaaagcaaaaactaaggtgatatggctttgtaagagaagaaacaaaagagatatacctttcgaccagattaatcatcgaggtgctagaaattgagagactagaaaaataacattaactatacatagtgagggttaaggagcgatcaatcgctgccagcgatcgtttttttcttttttttttcttttcctcttttagtaagtttatacatataaagtttacacatctaaagtttatccacctaaagtttgtaaagcgaatgtttacaagtcaaaagtatatatacccgattcaaattcaaattcgaattcaaaaattatatatttttcctcttttagtaagtttatacacgtaaagtttgtagagcgaatgcttatatgtgaaaagtttatatacccgattcaaattcaaattcggattcaaatatttttatatatataatatttctataaataaagtttatgcgtgcaaagtttatggtataaagtctatgcacatgaatgagagtattagattttttttctaatttttttactaactttgtgtttttttttttgaattttgtgatgaaaggaaagaagggagaggagtataggggggaggggcgggttgatcgctcccagcgatcacccgcacggtagcctcacccatgattgtagtacacataataaattaccacgaacataaaaatgcctaattatgtaacacaaagaagcaaaaagatggtaggcactaattcatgcccactgcaagctagctgaaaaaaattgaaaaaatgatcagtttggagagtaaataaactataacagctaactgtaattttatagaaaatatttaatctatgatatcaatgaaaaatccacattgtaaaaacaataacacgtgagaggttatgtttagattttatgtcccaacaatattctttttatttactttatttatatttgctttggcacatacaaaaagacaaaagacaatgataaatatgtgatatcttaaattccaatccttcgcagtagcgtcatggttttttactcttgcaggtatataagctgctaatagcattgcataattgatggactttcatgtttaaaagttatatttttcctaataaatttacatttgatgactcatgttgattgtctttttagaaaaatatcatatgggtgcaacatatcatagacagatgttgtctaagatatgtatatttt

SEQ ID NO: 16672 - DNA, 4365 bp, Oryza sativa
agcgtcatggttttttactcttgcaggtatataagctgctaatagcattgcataattgatggactttcatgtttaaaagttatatttttcctaataaatttacatttgatgactcatgttgattgtctttttagaaaaatatcatatgggtgcaacatatcatagacagatgttgtctaagatatgtatattttcttcgtttttattgatttacatgcaaatatgcaacaaattatatgaatatgaattacagggaatgatagcttgatacacacaaaatatattcatcaataaattcttaatatttcataagaaaagagcgagccgatgaacattaaattaaaaagaatgaaaaaaaatcttacttttagtttgaaattaatttgtcaagccagtttttagcaaagtaatacacatgcatgcccgcgcattgcgcgggctatcttcctagtttattgtaaaaagagatacaatgaacacccaattaaaaatagaatacaccttactctaatttcagtttattttgttagaacgatttccaaaacctagttccatctaaactctggatcggaataggactctgaatcaaacggaatacgattccatcttgtgaagacagaagacggaagcgtggtcgcgattcgtcgccgccgccatcggcggaggtggcggaggctagcttcgagcggccaaattttgagaaagcctcttggggcatcgaaatttcagaaatacatgacagattctggaaaattcaagggagaatgtagcatgccgacgagcctcgatgaactattgaagctaaatcctactgaagctagcagactacgatgaattattcctgtcttgcaacccaagagacgcatgtcagcaacagcaagtcccttccctctcaaagagaggacaacaacttcacagtgcttgatcaaaatctcctcgccattttccttgttgtcatcttccccttcaaccacatactgtgtgtgttatattacctcggtttcattttgtttgacgttttaaaagaagaaaaagaagatccgttttgtttgatgtttctgacagcttcgacaaatttaatagaaaaaaaaagaaaaagaagattacatcgtcattctgaatctctatcggacgaaccggggacttgctcccaaagttttccaggaatcattggaggcagatggtgtaatttttcttgcacttggcgtttgctgccttaaaggacaagtgcttgatcttgacgctgtcttcacacggatccacgcgacttctcttccggacaccgaaagaaatcgaaaagaaggatgcgacatcatcgtcgtggtagcgcagctgtcgcatatccaaaggccttgccttggcggcggttgacgcagaggcgccacctcctcaccacgagctgagccggagcgccgccgaggcgagccactcgtaggcgccgcgtttgacactttgacccaggccagccaggagctgagggaggtgagcgcgctggctgcagctccctcgccgggacgaacaggtggtggcggtggcgtcgccatgagcagatcgatgtcgcgccgcgtgttcttgattcttgagagggttcttggcctcttgcggtcttgccttgcctccctgccctcccggagcgcgcgtccgtgttgtcggcggctggactctgcacgtcgcagcagagcgccgccctcttgccggcggcggcgggggtggggttggagtgagctccggtcgccggagggattgaggttggggctcaggcgagggaaggcgagaatgaagcaaagagcagagggtataaaatataaataaccgtcggcttctagaagagatggaagcggaggtggcagaatctggttgggttgtccggtccgggcccaccagtaatgtggggaccagtcttgtcttatggtgcacgtctccgcctccgctgcctcatccaggccggcgacggcagcagcaacctctgacgagacgacacggcgtaatggcatggcgtggcgctcgcgtatcctcgccgttcccccgccgcctctgaagacgtctcggtgcaggatggccgcccggcgatcgagcagcatgcctttgcgccgcgcaggtgcagcgagtgcctcatcgccctggctggctgccacggtccgtagccagtcgtggcgcacggtgcaccacgtcgttcggcctcgatgtcggaaacgtgtccagctagttcatcgtcgaggctgagctcgtctgcagcgccagcgccgtgtacggtttcgccgcggtgccgccggccaccgcgtcgaacgacgacatgacgatcacctccgatcaaacctgcggcgccaaaacgcaacaacctccacgttcttcttaatcgcaagcgaagcgagacggatagagaggcattacctgatcgatggagcatggccatgagcgctgtgaccttgttccggagatccttcatctccgacggcgagagctcgggggcagaattgctctcctgctcttgcgggttcgagctggccttgtcggcggggtcgcctgcgtgccgaggctaagcgacaccccgcgccgccgcgtactgcaccacacgggggtggcgtggcgtggcgtggcgttgcgctcgggtgtcctcgacgtgcgcgtgctccatgcccacgcacgcgctcccccgccgccgccgttgaagaggtctcagtgcaggatggccggcgatcgagcagcaccttcgacgacgcgccagccgtggactcgcctggcgccgcggcgcgcatgcatgttatatgtcatgagaccatcgccatcgggcacgatcacaaactacgccatcagccaccatattcatcggccacctccttcatcagccaccatataatacttccttcatctcataatataaggattttatcccttctaattatcccataatataagaactttttttagaaacaatataagagatttttgtgtagtacttatcaattttctacctattttaaccccaactacccactccccataaccaaatctcttttaatagggatattttattgttgctatcattaattttttaaaaaattatcccttatattatgggtgcgttattttagagaagtagaaatcagaggtagtctatcgctcgtgctctatctctgcatttagttcaccatcccacgccagaattaagttggattctttttattttgacattagttttgagttggattgtgagctgtgcttgaactgactattaggccttgtttagtcatatcccacccaaaagtttttaccctgtcacgtcgaacgtttgaacacctccataaagtattaaatataggttaaaaaataagtaactgcacatattgcgtctaatttgcgagacgaatctttttagcctaattgcaccatgatttgacaatgtggtgctacagtaaacatttgctaatgacggattaattaggcttaataaatttttctcatggtttactaacggatactgtaattagtttttttattagtgcccaaacaccacatacaataccctatataatacccgatgtgacacgccaaaaacttaacacccctggatctaaacactcccttagttcctaaatttttttcccaaaaacgtcacatcaaatctttagacacatgcatagagccttaaatatggataaaaagaaaaactaattgtacggtttacatggaaatcgcgagacgaatcttttgagcataattagtccatgattagctctaagtgctacagtaacccatatgtgctaatgacggattaatttggtttaataaattcatctcgtagtttccagacgagttatgaaattagtttttttatttgtatccgaaaaccccttccgacatccagtcactacgggagaaaccatttttgctaggttggccaaaaactacactagtcccattcaaaagaccagggatacttttttttttatctttagtcccggttggtttttaatcccgattcaaaacatggcaggcgatgtcagacccttcactactaaagatctatttgtaatctcgggtgttaaacaattgggaataaaattcggccccgagcgcacaacccggccgcctcttcctctacaatctctttctccttctttcctctccctcaccactcacccccatctcctcctacctctcctgcgcctccggcccctgcggcggcggatcgaaccagccgcgcggcggtggccttccctcccgctgattccgctcctccctctcctgcacctgcagcccccaggcagtggaacgagctggtctgtcggtaagcggctgggcggccgaggcctctcgtggcggtggcccacgcgagggcggcagtggcctcccctccgcctgatt

SEQ ID NO: 16673 - DNA, 6632 bp, Oryza sativa
tgttatagtgcacaacccggcacaccaaccgtgggccacacaggtcacattgggcctactccaccaccagcccaatcggagccataactttaggtcctgagcctatacaacccaaaagactagtctgatgggtgaggaccgcccccaccttttatgtcgtgttcccccatcatcgatcaattaccgatgtgggactaaacccaacaattaccctatcacacatcgggcccaacaatctcccccatcatatcaactcatattaccccgaagacgtgttacctgggcctcaggcctaacaatctctcccatcacatcaacccatctgaccccgaatgtcacatcaacccatattaccccgaagacttgttacctgggcctttggcctaacaatctcccccgtcacatcaacccatgtgaccccgaagtcttgttacctgacctccccaccacgtgacccacattgaaattccatcacatcaacccatgtgaccccgaaagtcacatcaacccatattaccccgaagacttgttacctgggccttgggcctaacaatctcccccgtcacatcaacccatgtgaccccgaagtcttgttacctgacatccccaccacgtgacccatggaaattgttctaggttccaaaccttgggctctgataccacttgttaaagtgcgcagcccggtccaccaaccgtgggccacccaggtcacattgggcctgctccacactagcccaaccggagccacaactttaggtccagcgcctacacaacccaaaagactagtctgataggggtgaggaccgccgccatcttttaagtcgtgctccccatcatcaattaccgatgtgggactaaacccaacaatgggcgcgagggcagtggcggcctcccctccgccggaaccgggaggggaggcagccgggcggcggctcgatccggagcgagccggccgggctgcagccggcgacgactctaggttgattcggctgtggagttgatttgtatattttttttctgtgaattgatttgtaatgaatgatttgtcaatttttttttgtcgatttgaagatgattttgtgattgatttgtggattttcgatgggcatgtattgtggatgattgtgtatgtagatgatgtttgtatatgatttgtgtatgtggatgattttgtatgatttgtggggatatttgtgtgtgactgagattgtggttgagtgcaaacagaataaaaacaatggaaataaaaagaaaaaaaatgttctttagtcccggttggggtaaagatcttcagtcccggattgataatcccggtttgttatccgggataaaagggggttacaaatagggactaaaacccctttctagcagtgggtcaaacgttcgatgtgacacccaaaaagttctttttacgaactaaacagggcctaactattctgttcgatcttggagttcatatctaccacctctctgccaatgcagtcgtagtgattgttagtaaggggagcaaatgcgtatactgattgatatcggtttatgtaaaatgtctaagactttatttattgaaagtgtctttcgattctgtagacttcaagtgaaaataatgttttatgttgcttcctcttagaaagtatacgcgtattgaatgagtatttgtgaatgtattaatggtatggaaaccttgcatatagagaactgattgtatgtttgtgagtgagcaatgtattggatgtttctttgttgggaatgaattactaacgttaatatgtttcagagttactaatgtgcggatttgttatttccgtctcaagttgctaggacccaggaggcgcaaactggcacagcagaatcagtgctcactgaagatgggcctgatgtccctttatctgacagtattgttttacggaagcttcttttaagtactaagtgaatttccttgtatatgcacatgtggcacaagacaatactccctctatcccaaaacagaagacataaccactcataatacaaagaccaagaaaacatttattcactttcttgattggatcaccttaatgcatgcaagcaatgtgattgggaggtttgatgatagaagatttaaaacaaatcaatcttataggaccaagaaatgctaattaatgtatctattcatgcataccttatattatgatatatgagaaaaaagctgttgagtcttatattttgggatggagggagtaaacttatgttgcttttcctcatgatctagcgcataccaagatactttgatcctggtgaaactttattggaaacatgctttaattgtggtgaggagggtcatgtagctgtgaactgtccaatggaaaagcggaagaggccttgttttgtttgtgggttgtttggacacaattcaaagcggaagaggccttgttttgtttgtgggtagctccaaggcattattgcttggtgacttgggtatgcatgctcatgcccttgacaagatcatcttatttagttctccattaattacatgatgttgctgcatttgttatttcaactcataagttaacatgcttgccttgtttagataggttctagaattccagttcattaatcacacatatttacttcacaaattttgacaatttgaccctttgcaaaaaactattttttacaaatgaaccgccgccaaaacttatttcaaaactgacccttttgcttaacaccaaatcgtgtggcgctgaacatagacatctcactgccaaatagcatagcactgaatgtacgttggcatgctgacttagcctcccatccgccgtggcacgacattcagcgccagctgaagtggagctgaggtgtttaaattcagcgccacatgatttggcgttgaaaaaaaaggttatttttgaaataagttttgggggcggttcatttgtaaaattagtttttttcaaagggtcaaattgtcaaaatttgtgtatttacttgcccctgccaatttcaggaatcaaacatttgttaatcatttttgtagggtcaagactgtttcatctgcaaaaaaggaggtcatattgcgaaagactgccctgaaaagcacaataggaatgctatcaacagtctacattttatgtacgatgtggagaatcagggtcctgatatgtttggatatgccaatgattatccacgcgatgatgttaaggtcagtattgttttctcatggagggatacttgcctaaggaaaaaaaaatctaactcaacatatctttaaaaccatctctcacttttaatatgcagtggttacaatctaaatcctactgctaatgcaaactgtgctgcttcagaatatacctatgaatgaattgtggttttgtcattttcgttgatccagctttatgttctattcacaagcttggttagattttgtgagctaaggttaattttacattaagcccttccttatacttctgtgttagtcgaatccctgaatccacatgttttgtccacttaattaacatgcaatataacgcaaatcattctcttatgtaacacaaaagtcctgtagcagcgagattgcattaattgaagtcatagtattatccaaacttattttccccctcaacatctactttgttggtctgtgcaggaagaaaattgctatgcgtccgactgatatgtacaacttacatccgacaagggcggagctagagtatttgggggagggggggaggacggctaggaacccgttcaagaaaaaattgtacctatacctgaatataaatttaggcactggtattagcttaaacttgatataaagcagagtaaattaaataagtggcacccccctccatctcgctctagcttcgccccattcccactagtgtatatataggcatagatgctgcttgtttgggtccacatgataagaaacaagctcagtgattagtagatatgacatagtcagacacgagtcggatggctcggtcatacgtatagcaggtttcgtgcaggaaataaaatgctatgtgtgtacgtaatcagaaaggtcatctttgttgcgccgacttctctgatatctgtccaaaagaagttgttataattctgcccaacctggccatactggtttggtaagtttagtggttattaacttattatggcttccttgtttctatatgttacttctcacagcagctgatcaatgtcttctgatacagggatgtgccaagcaacgtacgtagggaagctagtaccgcggcaactccaactttgtgttacaaatgtggcgaggaaggctacttcgcacgtggatgcacaaagaacaccaaggttgttagaagcatcttattaatatattgtctactgatagtgataagagctgcttgggttatttatcctgtgcacatcctggttcctttttaatttgcagtctgatcgtatgaacggtgaatcatccgcacataggcagtgtttagttccaaagtttttttccaaacttccaactttctatcacatcaaatctttcatacacacacaacttttcagtcacatcgtctccaatttcaactaaatttcaaactttaggccaatctaaacacagccatagtcggaaaaaaggcaaaggcaagaaagattttggcactagggctgtgtttagctcatgtcaaaattggaagtttggttgaaattgaaacgatgtgatggaaaagttagaagtttgaagaaaaactttggatctaaacagtcagctccttatgatgctcacaagacaagtaaaaggaaaatccccttatttgaggaaagaaggaactcatctcattttaaatccaaagctaggggtggttggattgcagacgatgcagatgaccaaccataaagaagtacaaacccaatgtgtgggcttctccatctacccctaaaaagcaatacagtaaccatcagttttcctatggcggtgactactctactcctcagtcatcaagtaagcggaaacgtcgagcgcaacttaagatgaagataaagatcaagtgtttcacgcaaaacgaggtgacatatgattaattatgttttaattattataaatttaaaaaatcgattaatctgatattttagagcaactttcatatagaaagttttcgcacgaaacgtaccgtttagcaatttgaaaaacgtgtcatgagtatccaaaatttcattttttgttggagaaacgaacgcagccactcaccaaacgcaaggaagcatagcttttcgtcgtcgagatttgccagcaacactcgtgtccggtttggaagaagctagctggatgctagtttttgatttttttttttgttgccgttctgtttacaaacacaattgatcatctcttgtgcctgcaagggctgtttctgtatcttagattacacatgttgtgttactcctgctcagttccaacttcctttacttccccctttccagctccgagcacgctttcccggtgaaatctcgtggctgtggcgagcagatttatgaacctgtctatttgttataattgtgcagccactgtactgcacatttttagtcccaccttgcttaccgatgacgatgaggcccgtggggcgcagccttcaaattcgtcctgccgctaccacgatgccaccgacggcagaaccgttgcattttgaaatcgttgtttgaattttctaatcgcttcaacgatttgccccatcgttctttctcccgaaaagctactgcgcgcgtgcgcgctggcaactcgcctttcaggagcagttaaatctaaccgactaaattagttttagataatggcgctaactaagataagatttttcctttttttagatttcttttaatagactgaaaactttcaagttaggtttaaaaaacttaagatttaaactttgaagtcaaatagtgaaatctttctactcaaactttgaaaattttcaactcgaaatttaaatttgcaagagaaattttgaaaactttcaactcagatttgaaaaatttttaactcagatttgaaaactgttaacttgagatttgaaaactttcaactcagatttaaaaatattcaactcgagatttaaaaactttctactcatatttgaaaactttcaagtctagatttaaaaaaattttaagttaagattttaaaatttaagatttaaaaactttcaatacaaaacatttaaaaacacgtgtgctacatattaaaaaaaataaaaaatagaaaagaaaaaagaaataaaaaaattgtgaaaaaaacgaaaattaaaatcgcctcgtggggggaggggttgccagctggcacgtgccagcaacgttgctactgcgcgcgcgcaaattaaccgcccccttctttctctgtcgatcaaaacccttctcttgtttcttcctcagcgagtgggaaccagttcatcgaggctgcatacggtgatggggtgggcgtgcggtttgggtgcggggtagaggtttgtggtggggagattcctgatagtgaagtcgtggcgataggagttcacggtcggcggccagataaggtgtgcagtttaagcgcgaggacacatgcattgtgtgaagtggcgtacgccgtcgtagggagttgccctgcggtgaactagatcgccagctccatcctttgttatattgaaggaaaaaag

SEQ ID NO: 16674 - DNA, 6472 bp, Oryza sativa
atataagacaaccgcacgggataaaaggattatcccgtgcggttgtcttaagcggaccgcacgggataatagattatcccgtgcggcccacagcctggcgccgagatcgcctggttccaggcggagccacttacggcccgcttggaacctaaaggggtcggcgtccaagaaaatcacatgtctagtagtgttgatggcctccggtggagcaaggccaacttacttgctgctttctggcacggcaagcacgatgcggtgatccgttgacgtgtgcccaacatcttcagcatgttcatcgcctacatgtccattattggtgtatggaactattccgacgcacgtggatgagctcggcctctgatgatgagctagctggacacattcctgatgtcgaggttgaacgatgtagtgtgcatgcgggggtgacaatttccccgttggaggtagggcctcagtggatcactacccctataggactaggggtaggtccaaatatccaccagcagggcttacgggatgaggccctgatttagtgcagggtcgagactatagtgcgacctcgccacccataggacctcgaagtataagacatgcagcccactggccatcaaatgaggcagcccatgcatataccagctagccaccagaaccccatcagaggaggcaacaccatatggctgtgttctttccaccaaactgccaacctcacctctcttgtttttcgtgcgcacgctttctaaactgcaaaatgatactttttttactaaaagtttcaatagaaaaattgctttaaaagacatattttctattttaaaattttttaagctaatacttaatcaatcatgcgttaatctatcgctctattttgcgtgcggatgggaagggttcccaactcctctaaaggaacatagcctattacgttctagacatcaaaagcccataaagaaagtagcagcccactttgaaggggatataaatagaataacaaaggccaaagcaaaccctaatccatctcagtacgatgctcccggtggcggcagcacaatctggcgatcgaagacgaccgcgtcggcttctttccactcaccacccgccggtgccctagggcgtctcccccatcgtgctagccaactacgcaagcccacgtcatttccctccctctccggtcgacttcccacgatgtctttttctctcccttagttgctccctctggctgtagttgcccctcagtgttcttctctctttccaggaggggctgggtgtcctagttgcccctctggctgtagatatgtagggacctagccgtagtgcggggtcctagagaggctgggggtggggactaatttcaacccattctcccctctggctggggccatgtgaatccacaagcaagcggggatggggatgttcctgtccaacccaacctcacccaacattaatggtgggcctagacaacgtacccaaccgcattgcgccgccttctcttctcttatggcgattatttatatccttgcagcgtgtgtcatctttttctccattaagcttcatgcctcgcctcacctcgcctgagtcccagccatcaattgcaccgacgcccggttcccactagatcaacagggccgcgctacgggagggaggcaagagcaccgtctcaagaagccaatcaagaaactagacacatggacatgccatcgccactaccaccagctgttcgacacggtgaggcagctatagcttgggtgctcacaagggcggaactacatagagccatgggggttcctaggcacccggttgaaaattttttgtaagctgtaagtatccatctttaccatgtcggcaccccgtcgacctaactttgtgtaccccaagcagccaatcaggccgagcaagggcaataaaccaatagagacacatagtgatgagtattcttgtgggcatagcaagtttagtttggctgttaagtataacactagtcgataatttgacaaattgtcatgcttagagcccaacagaaccagcctcgtcaaccttatctttcgtcaaccttatcttaattggtacttcctcgtttttaatagaggatgctgttgccttttgaacacatgtatggttatttgtcttattgaaaaattttatgcaaaatgtgtaagatataaatcatgcttaaaatactttaagcgataaaacaactcacaacaatatcacatatatccacacatgtaatacatttttatccattatagtttatataaatatcaacagctcctttcatcaaactttaatcacttgtaggaaaagattgacactctatcaaacttctcatatcacaaatatatatcacactagaatgtcaatccttaagggttaaaatattgaaggtaggaggtgatcatcatcagcaagagcacttatctttgtttaagcaaaagaataagagagatattggtcttcacattttattgttatggtcagagttaactctagcatgatagttgccgagatgtgttttgattttttcttgtccgtctcctctttatacgatattcagcggctgtaatttaagttgacttgataactatcctattgataacattcttatttgtttatatctaatgttcaaaagaatcttctaataatttttatttctgttgtgatagagaaaacaactctccataaactatatatgatgctatgtttttctatacataatacttatattagtataaataatacatgtcactaaatcgtatatagcagctatcatattttgttatcaaacaatatcacatatatccacgcatgtaatatacaagaataagagtattagtgcatttttatcagtttataaaaatatttttcctccaacataaatataaaaaataataacaactgttaataatttattcacacattataacaacgtagatacctatctatatatctaaaagttgacaaggttactgcgagttgatggtcctatatttactaacacgtgaagcagagctaaaggagagtatacttatacaaattgtgcattaaggttcttagaacacccaattatattgtttattttgtatgactgatttttttttcttccgttctaacaatcctttacatccaaattgtgcacccaacggtttatagatgatgtggctcattttgatgtcattttaagattttcttttaatattcaatactattatactattaaacaattcgatactaaaaaatccataaatattttatcccttactattctatataaaaaaccaaaacaaaagactatataaattagtatatatgagctataaaataatctgtgcactaagagacatgcctaattcataattataaaaaaatataagagtaagatctttagggcaaatatagataagtccatcttctccatctgactttgatcacttataggaaaagatggacaagcctaacttataacagctataaaaagctggacacaacattaaacttctcatatcataattatatatcacactagtaaaggatgtcacactagaggatgtgtaagcttaagggttaagggttacagtattgaaggtatgaggtgatcattaggaagagacccatttaatattattcctccaacctaaatacagacaataataacaatggttaacaatttgttcacactttacaacaacgtagatatctatttatatatctaaaagttggcaaggatactgcgagttgatgatcctatatttactgacacgtggagcaaatctaaaggagagcataattatccaaattgtgttcatgaaggtggatgaaggttcagaacacccaattattgtttgtttttttataactgatttttttctcttccgatctaacagtcctcttcatccaaattgtgcatccaactgttcatagattatgtgcctcattttatccaaattgtgtatctaacggttcatagatgatgtggctcattttggttgcattttgggatttcattttaacattcaattatattaaaccattcgatactaaaaaaatttctaaatattttttaccttattattctaagtacaaatgcaaaacaaaagaatatataaattagtatatatgaactataaaataatcagtgcaccaagatgcgcacctaattcaaagttacaaaatatataaatggattggaggatctacaagaaaatactgtcaaccaaaatatataaatggatgggaggatctaaaaatgaattaaagagttcaattgacaagagcaatgtcataggataagatttatctttgcagaggactttgattgctttggtgttgtatgggtcaggtattaagatgctgaaattggtgcagagagttttctaaagagtgatgtacaagcttcggtatggcgtcatgcttatggctatacttgtaaagtgaccaccaccctcctcgccatgcttatggctatactttgtaaagtgaccaccaccctcctcttcttttgtagttaaccatctactatcgaagaagaagaagagaatatttatattaactagagaaaatgcctgtgcgttgcgacaggtggatgctattttaatcttattattgttatacaatttaattaaggtgaaatttactgtggaaattcgcttaaatcatgagctgtaattagagtctgatcgtctcaagctagtatgtgagttttttaaaagagatttcctatatgactcttctgcatttccaaaagcaaatgaacttaataaacgactcaaatacggatatatatttccaaaagtgaatgaacttgaaaaccaactcatacacatatgacataccaaagcactggtaaaaacatcttcaaagaaaaaatgccagtgcgttgcgatgggtggatgctattttaatcttattattgttacacgtttaattaaggtttaatttactgtggaaatttgcttaaaatcatgagctgtaattagagtccgatcgtctcaagttagcatgtgagtttttgaaaagagatttcttatatgattcttctctacttccgaaagcaaattaacttaataaacgactcaaatacggatatgtattttgaaaagtgaacaaacttgaaaaccgactcatacacatatgacgtaccaaagcaccggaaaaaaatatttttaatttttataatagtagagattaattaagaagggaaagatagatcttttttagacaattttctgatctgaatatttaggcagcacatttgtaattaagaatgtaaatatcaatattcaagcaaaggatctgtaattaaccatgtaaatatcaatccgtgtcacacaattgaacattcgagtaagcagaagatagatatatatgtccgacaatttcatagtttctaaatattcagtcatagcattcctaattaaaaatggaatgattgatccatgttagaaaaatcttctgatttctgaatattcaattagagcaattttaattaagctggtagaggtgtatccatgtgtgataattttccgaattctgaaaagccaaacaatgcatttgtagttaagcatgtaaaggtctatccaatcataacaatcttctgagttctgaacatcgacattcaatcaagcaaagcatttctcattgaacacagaaagatcgatccatagatggagcacctggatcgccatcctcttccggacctcaagcaccaaaagtgctcgtcaacggatcgccacggaattccatcatccaccaccgtggcgtccggcaaggtgatccaatctcaccgatgcttttcatcctaacgatggatgccctctctgctctattcgccctctccacttcttcccctgttggggatcccttattgggtgtctctctacatcgacgatgtgatggtcttcttacacccctcagaagacggaatccttgcaaccaaagaaatactgggtatcattggagatgctcctgggcttcacacgaactacggcaaatgtgtgacgcttgcaatcagatgcactaacgcgaaagtggacgcgtcttccaaggcttgcttccttgcccggtcactaccttcccttggggcttgcctctttgaatccagaagcctcgccgagaaaacctgcaccctatggttgataaggtcgcgcggcagctgcccctatggaagtcgtatttgctgcaaccggtggggtgggcatcgtcgtctgcgaggtcgccttccaagtcaagattctgcgctggacggaaggaggcggccggggacgcgtcggcaaggttttcttggatgagaagattcttggcgccgcagcagcaggaggaggccgggggcccgggcgcgggcctgtcaccctcggtgaggttttcttggaggagaaggttcttggcgcagcagtagcaggaggaggggccgggggcgcgggcacttcgccgtcgatgaggtcatcttcaaacagagcattcatggaggactcaagggtcaagg

SEQ ID NO: 16675 - DNA, 787 bp, Oryza sativa
cccccaagagccagggttttactgtacaaactctgaactctgaagatttgccaacttttgcaagtccgattctgatccagagtttacacggaaatctgcccatgttctcatttaaccactgaagttggtgagatttcctcgtcctgctcgggttggggagctataaattcagagcgatcaggtcacattggagtcttttcttcagaaatcattccaggatagcaagacatccaagagccaggttctttttaacaggcaatatgggctgtacaatctccaaagttttcccaagttttgcagagaaattcttgaaagaagccaaggcaggaaattcaccggagctgccgcaggatgtgctgatggagatctttgccctcctggaggtccctgacctcgttcgtgctggctcggtgtgctcctcatggcgcgcttcgtatatcagtctatgcaaacttggaggctacaggcaggctcagacgccatgcctgctctacacctctgaatctgctggtgagaatgtggcatgcctctacagcctcgcggagaagagggcatacaagttaaccatgccagatccacctatccgtagcaggtatataatcgggtcctctcatggttggatcatcacggcagacgagagatctgagctgcatctcgttaaccccatcacaggtgactagatcaacttgcctacggtcaccaccattaagccggtaaagcctgtctacgatgacgccggcgttgttcacaagtacgagtacccatgtcatgttggcggtcagcacaa

SEQ ID NO: 16676 - DNA, 14527 bp, Oryza sativa
ccataagaattggattgacgattatgtggatcagacggatggagatgttctacaatttgagttagacaagtacgaggatgatttggaacatgcatcagaacatgagaattggagggctggagatggtttgaagcctgagtcagatgaggatgaggatgaggatgatttggagcccgagccaaacactgattcacttgtggtaaataccaacatgattaaagtatttaaagtggatttttctgcaaaaatgcttgtggacataaacagcttaggtaacagtgtgttgtttcttgggtataatcaaactctttgtctaaatgctgatgtatatccacagttgaagccaaatcatatctactttacagaagatgatagcttatatctatttaggtgtaagaagaaccgccgcgatactggagtcctcgacttggaaaatgataccatcgagccgatagtatctccggagctttggtccaactggccagtccctatatggcttataccgaaccccaggaagatgatttcagcatcacacaattagggagaagatgttttccttcatccaacctcttatctgtggctctgattgttagttatgagaaagatatttagtagtaatgtgtaataaaaggatatatgggaaaaataatatttatgtatgtcttatgcgctactaatgataacattctaaactgaagttttttttagcaaattaccactaaactgaagtgtcatgtaacaaatacacatttctagattgttctatgctaaatgctaggaattcatgatgtaccatagcaagtttaaattgacattttttaattcctatatggaattaacttatatattgctaaggccacaacatggttatttcactgttaggattccttggtgtagccaatatgtgcttagtatgatcaatatgatattcgattggtcacgcgacttcatatatcacatatataatttagatgttatgatcatcttaagattatttatttatctcttaaaatatcatttattgataaaagatcaatatcaaattgtataggtaaatagctcttatatacatgcttagagaaaaataattaagtagatggaaagtcattagatgtttaacggaatataagtactgggcctaccagttttatgaaaatttaaggtgggatattttgaattttagtgagaaattttagaattttcttttatttagtggagtccttaatatggatgtgggtccagaatgtaaatttttgttagcaaaatatagtcaatatgtattaaattattgatctcacataaaaaatatggtaattcaaacaaatcataaggggcatagggatagctggctagacctaatatgtggaggttcaattgtgctcttttcttcaaggtaaaaaaaaatcatggccttttctttgtccataaagataattttaattttaattgttatagagatagaaaaagtagagaaaagtaatgccgcacaccgcacaggaatagggatggagggaaagttgggatgtcttttttaaaaaaattgatctatctaatgatctgaaataatgtgttgatgtttaagttaaaactaatggtaggatgttttattttttttccgatttattaggattttctgttatttaagcgagattagtcgcagcttagtaaagtatttatgtactttaatgtcctaattgtttgggatttttttaaaaaaataaatctaataacaaacgtaaaataatgtatccatcgatttaagtagaaacaatggttgaatgttttaagttaattttaagtttaattgtgattaggatgaaaaaaaaagagaaaggaacagaggtagcgtacaatacgtgtgtgctgcacggaggtgcggacgtttataggttttggtttttttaaagatacatctaacattctaaaataatcggttcaccgatttaaagaaaaatcgatgaccagatttctcaattttattagaataccacgtggcggcttgggagtatttttaggcggccacatgacggcttgggagcgtttgtaggaggtttaatggacttttagtatataatagaaatatataaagataaaattagggtgtgtagaaaacaattaggacatgattatttgattttaattattacaaacttgaaaaatgatggatctattcaactttttaaaacaacaggcaccttatataaattgttaaaatttttgtggcgttaggattgtgaatattttgaatctgtccattgatgaaaaatatgaattttaattgtaaatccaaattttatcattgagctacgtaggatatataatttactaacagcgtcttgtatgtaggagatataatttgctagtcccgtaggagtaactaatctagcttgcttttgctaagagatagatttgatatcttatacgaaagtatcaaactaatctacgtgagatggatgcatcgtgctgggctgaacatgtgggtcctcgctttctatacacacaaatacaccatgcatcgtacggggctgcaaatgtgggtcctgatttatcttgttgtgccatgtggcggcttgagaacgttttgaggatgccacatgtcagcttgagagcgtttatatgaagtttaatggacttttagtatataatagaagatagataatagatagatagatagatagatagatagatagatagatagatgtgtaataaaaggatatatgggaaaaataatatttatgtatgtcttatgcgctactaatgataacattcttgtttgtttgcatctaatgtgcaaagacatcttctaatattttatatttatgttatgacagagagcattgtggcagctccctatgaattttattcttctttgtggaagatgatttcgtttactacttgtgatgccatattttgtacatgatgttggcaattatattctccagtcccccacatgcaatatataagagttatagtttgtagggatatcaacaactccgtccatctggctttgatcacttacagaaaaagatggacaattcaaacttatcacaactattgaaagctggacactccatcaaactttttacatcacaatgatggaggacataatctttgtatgatcacactagagaatgttaagctttgcaaggggtaaaagattaagttaggaggtgatataacagttaaatagacaataacagttgttaacaattttttcacacattattacagcaaaataggagtaagatctttacctgtccccagatcatgaccatagccgttcgtgtttaccgatctcacctttggttctccccctcaccatgcatcctttttcttgatatttgatacttcttgacaatgtttttgaacctaaatcagtgggacgcgactcccgctcgggcgcccgatgggaggaggttaaaatcgggcgctacatgcaaaaactactttaaactgatttgtctcttaaattacttatccaaatcatgatccgattgtaccattaaattcgttgcaattaaatattcaaaacaagaccacacatggatatattccaatgaaaaaaattagcttattattgaattattattaaatgttgcgcgatgttccaccaggtatatcggaattgtttcactaagtagattaaaaatgtttcactcgtttaaatcgggtgttgtttcaccttatataaaaaccatgtttcagcaaatagcgaaaaaatatttcagttcactgcaacattagatttatacatagtgaaacattgtgagtacactaggtgaaacatttttcggtggaacaaaaaataaaccaaatttccttaatagggggtttccaaaatatgtggtttttttttgcaatggaatgtttcgttcactgcaacattagatctatacatagtgaaacattgtgagtacactaggtgaaacatttttggtgaaataaaaaataaaccaaattcccttaatagagagtttctaaaatatgtgggttttttgttgcaaaagaatattttaattcactgcaacattaaatctataaatagtgaaacattgtaggtacactgggtgaaacatcttttgtgaaaaaaggggagggagaagtgggttggcccaaacaggtgcgcacatgggggaggaggagcgaccgattttcccacctcccccggtcgaccgatgctgggcattatccaaataagggtggaaagtcaccctgctaatgaatcaaggaatagcaaatgacaacttcaaaccttggatttcttcatagtaatttttttttgagattacacagcagacacacgcatacaccactacacatgcaacactacactcacaaccctcgaatagtatttggtctccctgactttagaaaacatatcaaattttgttttctgaagcgtcgagtagaatgcagaagcttgggtttagacaccagtggctgtcccctcaaaagttagaatagtttctccctgtagcagcactgacttttaatgtgaccacgggcctcttctaggtaacattgtgctatccatcatggtagttttctctttctttttctttttcttttccagagcctgtttagatccaccccaaaattttacaccctatcacattgaacgtttgaacacctgcataaagtattaaatatagtctaaaaaataactaattgtacagtttgcgactattttgcgagacgaatcttttaagcctaattgctccatgatttgacaatatggtgctacagtaaacattgctaatgacggattaattaggcttaataaattcgtctcgtggtttacttgcgagttctgtaattagttttgtcactagtatccgaacaccccatgccacatcccatgaaacatccgatgtaacacgcaaaaactttacacccctgatctaaacaccccctcatttgcttagaacaggtttgaggcttttcttttgtcaagtacagcacattgctattcagttagtagaacattgtcaggtaactatctgcacaaatgcagtacagggacgtcaggtactaacattcataatttcaaactagctgcgccaatgcattacagggagaaaagggagaacctaaaacacattctgaagatgatggaatcaagtacatgaacatgagcaatttgtttacttaaaagccgtgggaatggctgaggattagggcgccacgtcatcatttttttttcagaaaaacccttgctctttccgctaatagcgtgtacatccccgttaacgtggcccgtcggatcacaagctaaggccgatttgaccgtccacgtgtcccagcatgactacccttccaccatcgtcagatcgttggattggaaacggatggtctggattcttcagccagtacaaaccctagccgcccgtcctctcctccccacgcacgccgccttgcccacctcctccaatcgcgccgcagcctcaccgtcctccttccctcgcgtgcgtcgtcgccgccgcagctccctcctcctccactccctcaacctactcgtcgtgccgccattgcagcctcccttctcctccactccctcaacctactcgccatgccaccattgccgctccctaccaacgagtcgccggatctccccgtgaggaggccggggccgccggatccagtgaccccgttctcctcgccggcggatccggcagcccaaagaaaggaatgagaaccgccggtaccagcggatccgatgccctaaagaggggtgagagccgccgctgcccagacggggtcagcaggccgccgccaccaccctgcgtaggctcggccacgactgcgacgaagacaaccacggctcggcgacgatggttgtctggtcattcttttttcctttgtctcacgttttcccctcccagaaatcctccgacgcctgctcatggtctcatggagcctgtggccagctgccgccttcccctcgagctcgcgaagccggagccgctgccttcctctcaagctcgttgagccagccgttgctgccgccgtgcggagccagtggttaccgtcatcgtcttcccagcgagctagcagcggctgctgccaccttcttgcaagttcgatgtccactgtcgccgccataccgtctctttctccatcccacgcgaacttggttctgcaagatctgtgccgcatcgagcgcctacaagcacgcggtaaccaacaggtgaaactcgacatgggtggcagcagccaaatctcctcctgctgatactactcctcaaattgatttctcagttctctttacagtcctgcatctcatgctttcttcatatcaggcttatatgactggtggaaactgttagactttgctctaggatcacctaggttagatgtagtcgggtggttctatttgggattgatgtttgaactatagagattgaaaacgggagagggtttagatagaccgaccggttgaggtgttggaggatgaagaagtgccggccatcgtcgtcgttggcgctcggttgtcgtggatgcggcgccggtgaggtcgacggcgatgacggctgcagcagcggtggtcgtgggcgatcccggcgaggtcatggcgcggcggtggcgtttcccgtcactggctgcgccccctctcgatcggattagggtttgtagggtggagttggcggcggcggtgaatctcgtcccttgtgccgtgctggcctccacctctcttttatatggcgcagtgtgacgggggcccaccagccattgggctggatgcccccgatcagggcgcggtcaaggtccgttatgccattgggcccgatgggtgggagatctatctaacattctcccccttgatctcactatttcttttagctttttctattccatcacagatttgtgaatagagcatgtttcatcgtcacagtcaatcaccgatggattcgacagccactatacacatctctattcagaaacatatactttacttttgggccctgtagtccaggattcataaggcttcccttaaacccatgccggctacatgttccttgaacacgttgggtggtaggcctttcgtgagtggatccgcgagcatcctttctgttctaatgtgctcgagactgattgtttgatcccggactttgtccttcacaacatagtactttatgtcaatgtgtttggcagcaccacttgactgattgctgtgagcgtacattactgcgggttcgttgtcgcagtataactttagtggtttctcaatactgtcaaccacctttaaactgagtatgaacttctttagccagttcacctgccccgttgcctcatagcatgctataaactcggcatacatagtagaccctgcagtgatagtctgttttgagcttttccatgaaatagctcctcctgccagggtgaacacatatcccgatgttgactttgtattatcttttgtaaaatcagaatctgaataccccataatctgaagcgattctgatcttctataagacagcatgaggccttttgttccttgaaaataatgcaagactttctttaccaatttccagtgctctgggcctagattactctgaaatctgccaagtaacccaataacaaatgccaagttaggtcgtgtgcacacttgcgcgtactctaggcttcctatagctgacgcatatggctttgttttcatttcattgagctcatactgatttctgggacattgcgatgccccatacttttcccctttgactataggagcaggtgtagcactgcatctgtacatattgaatttcttcaacaccttttctatatatgtcttttgagaaagtcccaatgcatactttgttctatctcggtgaatctctatgcccaaaacatatgaagcctcaccgaggtctttcatgtcaaagtttgaggacaaaaatttctttgtttcctgcagtagactgacatcactactagccagtagaatgtcatccacatacagaattaggaaaataaatctcccattcttaaactttgaataaatacagttgtcctcgacattctcttgaaacccaaatttctttattgtcccatcaaacttcaagtaccactgtctcgaagcttgctttaattcataaatggatctctttagacgacatcccatatttccgtttcctttcatgacaaaacctttcggttgcgccatgtatactttttcctccaaatctccatttagaaatgtcgtttttacatccatctgatgtaattccaaatcataatgtgccactagtgccattataatcctgaaggaatctttacaagagactggagaaaatgtctcattgtaatcaatcccttctcgttgcgtgaagccttttgccacaagtcgcgctttaaacttttctatattccctctggagtcatatttggttttgtagacccacttacagcctactgttttgtctcctttaggaatttcttctaaatcccaaacattgtttagtttcattaatttcatttcatctttcatgacttccaaccattcagatgagcgagcgcttctcatggcctcttcatatgaggtgtgatcatcctccatatgcgactcttctatattataaactttatagtcatcacggataaccgatcttttgactctttcagaccttctaggggcctgcacatttggcacatcctgtacctgaggctcttgttgagtctcctgtactagcacattatctatttgaggctgttgcagctcctcctagtgtggcaaccatttctgttgaatcctgtataacaggtttatcattttcattcattgttgccacaggagaggtaacaacaggtgccagtacctcaatgacaggtattgcaggcacaacatcagcaggtagagagaagaaaggttcctgagtcgacggagcgggtacagacacccgcctctcctcaagatcaatttctcgaactaccgagctctccctaatcatttcgtcttccaagaagacggcgtgtctcgtttctacaaactttgtataactgtttggacagtagaaacgatagccttttgatctttcaggatagccaataaaatggcaactgactgttttgggatccaacttcccaatatttggattaaatactttagcctctgcaggactcccccacacacggaggtgagctatcgagggtacgcttcctgtccatagctcatacggtgttttgggcaccgatttgcttggaactctgttgagaatatgaatagcggtttttaacgcctccatccataaacccagtggtagtgtggagtagctcatcatgctgcgcaccatatccataagggtacggttacgcctttcagctaccccattctgttgaggttcgcccggtgctgaatactgggctactattctattctctagcaagaaccttgcaaaaggtccagggacttgcccataaggcgtatgtcaaccatagtactcccccccacggtcagatcttactactttaatctttatatcatgctgattttcaacttcagctttgaatatcttaaatttatccaatgcttctgatcgctctttaattggataaatataaccatagcgggagtaatcatctgtgaatgttatgaacgagtcatagccatccacacttttcacaggaaatggaccacaaatatctgtatgaatgatctctaaaattcctgtgcttcggttttgcaccctttttgatgctctttacaaattttcctttaatgcattgttctaagtctgagaactccaatggaggcagaatttaattcttaactagtctctcaattccccccctcgaaatatggcccaaacgacagtgccatagtttcgatgagacatcgggagttctctttcttttcttgttttcttttgtcaacgaggacacaacattcacattctcaaaaagagataacaaataaagctcgtctcacagcacagcaagaccaatacatgcattattataccatagttcacatttgccacttccaaagcggcaatcatatccatcaaaatccaactttgataaacttattaagtttctttgcaaagaaggaacataaaagacatctcgaagtaaaagtgtgaagccattcgcgagctctagaggaagatctccaacagcttcaacttttttttcaactccattggcaactctaatggagctttctcttctttgcgtagtcctcgtcgaacggaatgcctttaaacaattacaagcatgaataattgctccagaatcaatccaccatgtggatctagagtaaccaacataatgagattcatttacaaatgtaacaatgttctcacctttccttgccatgatcattttcaagaagtcaggacagtctttcttgtaatgtcccgtcttcttgcaatggagacactgatctttctcaacagcgaactgttgttgctgaggcagatgctgagactgtttagcttttgaggtgggagacttgtggttctttttcttgttatctttaacatagttaattgaaccaccatttgactctttaattctctcctcctcttgcacacaattagcaatgagtttttcaaagttccatttctctggacttatgttgtagttgacaataaaattgtcaaactgctttggcaatgaggcccataaccagatggaccagaaaagtcatctgttatgcccaaatccattggcttcaacttggaagccatgttgctcattctaagtatgtggtctctaacaccacctccatggtacctttcggtcacaagctgcttgatcagctgtgtagcataagtctttgaagagccagtaaactgcctctttattctttcaaggtactctgagacagcgtcacactctgggattgagcccaatatggtaggctcaatcgtgttctttaccatagccaaacatttcttgttggctaaggaccatttcttttgttcaatgtcatacgacatgacgagaggagcattgtccctctgtctcttttgccagtcaccatctgactcattttcacctctgataagttcagcaggttctataggacatggggtagtcaacacccagtccacctctcccaagatgaaagcaaggtcgagttttcttttctattctgcgtagttatctccttttagggtcggaatatctttaatgcaacccatcaagaagtagctacctaaaataatcatgtacggtgagaacaacattaacattaaaatattatgcattaagcctatatcaccgttgggcagaattagacataacatatataaccataactataacattgcaattatcaacgttggtcagaaaattacaatatcatagcacataattaatgttccaaaaattaaattctcccgttggttcgaaatttaattttagaaacactaattttcatcaattttatctatttgcagcggaaaaactatataaaaatcatatgaacagtagcaaaactctgtaatttactctctgtaaaaattctcccgttggttcaaatttaaacagaggtaaaacatgcaaaaatctattcaaaattctattgaaatttgcatgaaaaattgacaaaatttaaaaggaaaaatgctactattcctttcctttctttttcggccccccgagggacctaatttaaactttttcccggtggcccacggccttttggcgcgcgcgggaaaaaggttagatctagtcgggtggttctatttgggattgatgtttgaactatagagattgaaaacgggagaggatttagatagaccgaccggttgaggtgttggaggatgaagaagtgccggccatcgtcgtcgttggcactcggttgtcatggatgcggcgccggtgaggtcgacggcgatgacggctgcaacagcggtggtcgtgggcgatcccggcgaggtcgtggcgcggcggtggcatttcccgtcactggctacggcccctctcgatcggattagggtttgtagggtggagttggcggcggcggtgaatctcgtcccttgtgccgtgccggcctccacccctcttttatatggcgcagtgtgacgggggcccatgtcgcgaccgagaaaaatacattttcccgaacgctagtgtattaatccccgtccaaggaaaagccggggtacaccacacaaacatgatataaaagacacatctttattatatcgataatatttacattattacaaaggcacttaaggcctgacaatcaaaaataaacagcagcggactagcgggcctacggctccatcttcacaggcgctcaactggggtataagccaggactccacctaagacttcttctctaaagcttctcttactgaagggggggaaagattgagcaagaatgagtacaaccacagtactcagcaagccacaccggcagatgcatgattaatgcaagggggtacaaggggtaataatataggggttaagttttgcagaaaacagcatttaaaagtcacttagttgcccaaagccattttataaagacgatcctagagttacacagtgttattaatcaaggccgtgaaccctcacgaacctgccttaacccaaggcctacgatgattcagaccgaactggcaacccgaccctgggtcccagctcgtcccaagccaacccaggccaaccattccacattttagttgttaagcaaattttaagaattaaaacactaacttgggtacattgctaggcttgcccataaccgagggcgcggctattcgaataggttatactctgatcagaggtgtacatctttacccacaagacacatcttcctcacgtgtaaccacgtgccacataccaccacggtatacggacggaagacgtgacatagttcccaacccatcctagccataaacaagagtaccgacccaaccccacctacggccggaacctccgggacaggcaggcaggattgagcccctagcagcaggacaccagccctgtgccatgacatctcgactaccgggccgcagctcgtgtagccttcatttgtcctagagatgtccatcgacccccgacttcgtccatctccatccgtgtacttttgtttataaccagactgagccacaaactaagccttacccactagacatgtggaagtacggtagtgctttgcaacagaggcccgagcttaatccttatagtacccgaggtacgactaacaaaacccaaccacgcacctcgagcccagcctaaaaccattttgggggttttgaatagagggggaggtgtgtgtccaattccaacataagccaaccattccatagtatccaaatgatatgagaattcccaaagtctaaagttataaaaccacctaatgttgcctaattaatcagcgaagcatctacctaaattcatactagtggaaccatgaatagagtacccactagttggggttttgtttatcctagggtgaacaaggtaataataacaatagcaataataataaggtcataacaaaggtaaataggcatggctaaataaaacagtgataacgcaggaatttaaataaagcgataatgcattaatttaaatcaaaataattttataaactgggattcaatatgcttaaggatgatgtgacttgccttgctcagagataacggccttccgaaccttcggcgacgaccgcaaaccacgcttcgggaacctccggaacgacgaagactacgcgaagcacacaagcaaagctacaagcctataaagaagcaataacaatacataaaaagaaagcacagggttctttaggttataacaaacattaggagacttgaacggatcgattcagagctcgtatgaccaagatatgatcatccgaagtttaatgctgttacatggagatttgcggattattataattaggttttgcaactataaaacatgtgtaagcgctagcctggaaaagacaggaaggctgcgccgttgacatgcggaccccacatgtcaacctaaaggaccgcggtagaccgagtacacagagacagtccacgggtcgacggaagcagatcccgtgtgtcaaccgaggcgagtggccgacaaacggactccactagacaccacacgggctgcacacgtggaaaccacgcggctaccgagcgggcacactaacacggtcaccacacgcacaagcgaacaactaccgacaccggtacacgggtaccggggtcgacaaccgcacaacgggcacgggcgataccgaaaggacgaggacggggcagcgaaggagagatccttaccaccacgcgacgaggcgagggaacgacaacgatgaacgggcgcggcggagacggccgggaatgacggagacgaaaggcgaggggacgacttcggcggcgatccttggacgaaggcgagacgcggccggcgcaacgcttggcgacgcggaggcgaggacgaagacaacgacggggctgcagcggcacacttgacggacacggacgacggacgagaacggcttgacggagggacgaatgccacgacgaccgggaacgacgagaggacaccgacaggaaccggcgaggaggcgatgagggca

SEQ ID NO: 16677 - DNA, 2706 bp, Oryza sativa
ccactgttttgccggtgaggacgcgtctccagtggtttccccgcgaaacgaagggctgactgggggagaggaggcggctgcgacgtcgacggaggagatggcgacgtcggtcggcgtaccggcgatgaacagcagccggccgaagacggaacagtggcggcaacgccactgttgccggcggggatgcacttccggaggcctccgcgggcaacagagggcaggccggcgcagaggaggcggctgcgacgctggaggaggcgccggcacggccgaccggcgctcgggcaaggcggtaggggcggctggagggtggccggcaccgaggaaagagaaggaggaggcggggagaggtggtgcagccacggggagggcgcgggagggggctaaaacgagagaacggagcgagggggttccgttttatagcggagggaagcgagccgagcacgggaggagcggggaacgacggcggaaaaggcgcccggcggccatggaagacggccatgaatggcgcagccgttccggtcaaaatagtgcacgattaaaggggagattatggggaaaagggagaggaaggaaaggggattaattctccccaattaattttggaatccaacgcttaaatcgcgcggattcgagggaggaacgaactagggttttcacgggagagagaggaggccgtgcgggaggaggaagacgaccggcgcgtgggccccacgcggtcagcgcgcgcagtcagcgcacgcgcggcgcgcgtgcacgcggctggctcggctcgacctggcttgggccgggctgctgggccgaggcaggccgggaggaaggaggaggagggagtgggctgccgggaggaaagagagaaaaccaaagggaggggagagggacttggactgcgggccgagggggagagagggagactttgggccagacttggcccaaagggaggagggggattatttttagctttttctttttaataaactttgttaattgttgttgttgtttaataaatattttcggtgctctgaaaattcaagtaaaatttgagggctccttttagaccaaggagaatttaacaaaaattctccggaccacattcgaatctttctggcacgtattttagtgtttgtcaatttctttttgaattttaactaattctattattccttttaggggatgatttttatttcgggatgaatttatcaggacgtgacagcccaccagccattgggctggacgcccccgattagggcgcggtcaaggtccgttgtgccgttgggccgtacgggtgggagatctatctaacagaaacctctacttgatttttctgtggtgcatggtcaataagtctgaagatatgaggttataaatgctttgcctgcattatgcttctgaaatttcactgttagaaggccatatttcgttgattcaaaactcctttttatgtgcaggcctgcatctatttttcgaagcacagatttcattgttagaaggccatattccgttgattcaaaactttttttatgtgcaggcctgcatttatttttggaagcataaacgaaaggatcacatatgtaagtctgtttgctaattaataccttttcctgcaaatacacatacaccacttggatgtagatacccattctgctttgctttacatgttaattaacttgattgggtaaatgtttactgcattgatcggccggtatctcaaagtacaatcagtaagtgactgaaggtaattcattagtcttttatgtctaatatgatcataaaaatgtcagtagggtgcatcagacaagcaaaaaagtatatagcaagtgatggcacatttcttagggaagggatttatgagttcaatgtcaaaatcctctctatcagtcgcctcgcatttttaacttacctaggttgctttcctatttttagctacataagaactatatgtatgtcaccacatcagagttatttatattcccttgaagtattctaaatccatatattgttaagatgtgttctttaattgatctcttcatctctatgcaaagtatcctatcataacgttaacaatgttagatcatacttttagtgggtgttgcatgcagttattattatcaaagctatcgaaggtattttacattgttacatctccttcaccctttataggtttctatattacagatgctcctgttattgttttaattctttttcgaccagtacaacctgattagctattcttactaattctttttatacaaaaaattatttagacatggatatttacaccatcaagtgtaaaatgttacttacactgcttgcatatgtaagggaaaaatattgccagctccgttcaagttccccagagccatatagactatattgctattttgcttgatctttaatcttatgataatgattctatgattaaggttaattatgtatatcgtcgtcatgcatcttgcatttcatctgctgaataatacacaaattgttgtataacaacataactacataattgagcttaatttttgtaaagaccatccagtacaacttctgagttacattggtaacataacaaccggcgttattatactgctctcatatgctctgatgaaatttcttccatatatacattgtactttgatagccttcgtgtctctactatttgatctcaccaattcgtttttaaagcttgagtattctatagtgtca

SEQ ID NO: 16678 - DNA, 537 bp, Oryza sativa
tctgcacgttcatggctgatgcatcttcctccatactcaatctcttcgtgggcagacctgtggcaacagttcgtcgccaatttccaagaaacatacaagcaccacgcgatcgaagacgacctacatgcgttgacacagaactctggtgaatcattgagggaatatgttcggcgcttcaacgagtgcagaaatacaatccccgaaatcatcgacgcttctgtaattcgcgccttcaaatccggtgtcagagatcgctacactacctaggagttggcgacaagacgcatcacaaccactcggagattgttcgagattgttgagcgatgcgcccacgcagatgatgcgctaagacgcaagaacgataagccgaagaccgggggagagaagaaaccagccacggacgcatctgagtcaagcaagaagaaaaatcgcaaaaatgggaaaaggaaagctcaagcagaagtcctcgcagcagaatacgcgaaccctcccaagcgcccatacccacaaagtagcgacacaaagaaagtatggtgc

SEQ ID NO: 16679 - DNA, 25520 bp, Oryza sativa
cctgttgcaacgtggggtagcgttggacagtgtttggttaacattgattaattactacaactgttttactgccttcaactactgtttttaaatgctagctttatgcaaaagaacctctagcctcctttggttatatcctgcatcatacctcctcttccggtatgacttgctgagtacagtgggtagtactcagtcttgctctcttttcccccacaccagagctgaagatcttcctagttggagctgttttgtcaaagttggtttcgtcgctgccgtcaaggattgcctgtggagtggagtcgcccgctgctgaagtcaagcttcccggtttagctcgcttttatcttttccgctgcatttgtaatcttttctatttttgtaagacgtggatctgtatgtcaacaattgtcgtttgtgtaccctggctggtcctggacagggatttaatgcacattcagcttagaaattctggttcgagaatttctgggcgtgacaagttggtatcagagccgaccttgaccgtaggacaagccaactggaaaccctaagagccctctgaacccctttttcatctgcatatgcctttttgcacctggaattgttttgggaaaatttggagttttgcctctttggtttgcgggaaaaatcttggtcgttcattcggatcggatttttttttaaaaaaaaaattagctcagtctagggctttagaaaaattttagttggagtttattcgacagtcagtcgggaatttattgggggttatgcattaggtcgtgtctatattcgatgggggcaatgttatgcgcatcattttccatgcaactagtctatgcattaatttattgtttagttgcattagtgtctttatttgggttcatgaaaaatgttctatgcataaaaatcatcatgttcggttatttatttgagtcatttgttgctttgtttaagttggatttgagcatgaattgattcctatcccttgtctactttagatgtcagtcctatccctcgtttgcaagcgccgccccgagcttcagagtcgccgcccttagctttatcgccttcttagtctgtttgcttgctagttttcgtgtttaggtttgttgcttgtgggttagtcggcggtcgatatcatgtgtcagtggtatgactgcctcaattaggagttgcgtgcctctttttcagtgttttaatcaagattaagataattgcacttaaattcataagaaagattagtttctgagccctctgtttttcttccttttctcatatttctacctatccccttcagatggagacaaggaatggttcacgcgactcgaacaacgccagtggcagcgaaaagccgatcaatggagcacgtgccaacagtgcatctgacaacagtccgtccccaccgcccgagaacccaacaattgctcaggtgttggacaatcagactcagatgatgacaatgatgatgcaacagatgcagcaacagtaccatcaggtgttgcaacaggtgcagcagcaagcacagctgcagcagcagaacctgcagtttggtcctccacctcctcagtccaaactgttagaatttcttcgtgtcaagccgcccaccttctcaagcaccaccaacccaatcgaggcccacgactggcttcatgccattgagaagaagctgaatcttttgcaatgcaacgagcaggagaaggttgcttttgctacacaccagctacaaggtcccgcttctatttggtgggacaactacatggtgacccgtccagctggggcagaggttacttggacagagtttcgtcatagtttcaataaagcgcaggttcccgagggaattgtggcacaaaagaagagagagttccgttccctgcaacaaggaaccagaacagttatagagtatttgcatgagttcaaccgcctcgcgcgctacgcccctgaggacgtgcgtaccgatgccgagaggcaggagaagtttctgtcgggtcttgatgatgaattgaccaaccagttgatctctagagattatgaggactttgagaagcttgtggacaaggctatccgtcaagaggagcagtgtaacaaaatgaaccgtaagaggaaggcagcccagttcaggactccccaggggaagtgtcagaagcctcgtttcacgatgggacatcagggtggaccttccaccatgattatccggcagcaccgtccctaccacccgggtaatttcaacaagaacaacaacagtggcagtcacagcagcctcaacccgactccaagtccattaatgattccagctcagtcagatcagtcagatcagctagctcagccagctctgccagaacagcccaagaggttgggagaaaagcccgaactctgcttcaattgtaacaaacccggacacacggttggaaagtgcccgaagccaagacgtgctggacccaagtttgttcaggcccgtgtcaatcatgcgtctgcagaggaggcgcagtcagcaccagaggttatattgggcacattccccgtcaactcgacaccggcagtaatattgtttgattctggtgcaacccattccttcatttccaagcgttttgctggtgcacatgggttatccttagtgaagcttaagataccaatgcgagtgcatactcctggaggtggcatgaccacaactcactactgcccatctgtgacagttgaaattcaagggttgatttttccagccaacctcattcttctcgaatccaaggacctagatgtcatacttggaatggattggttaacaaggcacagaggagtgattgattgcgccagccgcaccatcaagttaaccaatgcaaaaggagaggtggtaaccttccagtctctagtgccgcggaagccagggatcagtttaaaccaggttgctggtgaagaacaagaggtagcagtggagaaaaccactaagaagctggaggatattcccatagtcagagagtatccagaggtttttccggacgatctgacaacaatgccaccaaaaagggatatcgagttccggattgacttggtacctggaactgcaccgatccacaagaggccttacagaatgggagccagcgagttggcggaagtcaagaagcaagtcgatgaacagttacagaagggatacatccgcccgagcacgtcgccttggggtgctccggttatctttgtggagaagaaagacaaaaccaagaggatgtgcgttgactaccgcgcactcaatgaggtcaccatcaagaacaagtatcctttgccaaggattgatgacctgtttgatcaattgaaaggagctactgtgttctctaagatagacctgcgatcaggctatcaccagttgaggatccgcgaagaggatattccaaagacagcattcatcactcggtacgggttgttcgaatgcacagttatgtctttcggactcactaatgcacctgccttcttcatgaatttgatgaacaaggtgtttatggaatttctagacaagtttgtcgtggttttcatcgatgacatacttatctactccaagtccgaggaagaacatgagcagcatcttcggctggtacttgaaaagttaaaagagcaccagctatatgccaagttcagcaagtgcgacttctggcttaaggaagttcagtttctcggtcacatcgtgaatgctcaaggagtagctgtggatccagcaaatgtggagtcagttaccaaatggaccccaccaaggacagtcactcaggttcggagtttcttaggacttgcgggctattaccgccggttcattgagaacttctctaaaattgctaagccaatgacacagctattgaagaaggaagaaaagtttatctggtctgctgaatgcaataggagttttgaagaactcaaatgacggttggtgtctgcaccagtcttaatcctgcctgatcagacgaaagatttccaggtctattgtgatgcatctcgccaggggctaggatgtgtgttgatgcaggatggcaaagtggtttcttatgcttcacggcagttgcgtcctcatgaaggcaactacccgacgcatgatctggaattagccgcagttgttcatgctttaaagatttggcggcactatctcatcggtaaccgttgtgaggtatatacagatcacaaaagtctaaagtacatctttactcaacctgatttgaatctcagacagcgaagatggttggagctaatcaaagattatgatatgggaatacactatcatcccggcaaggctaatgtggttgcagatgccttgagcaggaagagctactgcaatgttgcatgggtagagcaactatgttgtgaggttcaacgcgatttggaacatctgaaccttggtatagttgagcacggattcgtggctgccctagaggcacagcccacactggtggagcaggttcgcatagctcaagcaagtgatcctgaaatagcagagctcaaaaagaacatgagggttggaaaagcccgaggttttgttgaggacgaacaagggacaatctggatgggagaaagattgtgtgtacccgaaaacaaggaattaaaagacctgatactaaccgaggctcatcaaactcagtattccattcatcccggtagtactaaaatgtaccaagacctcaaagaaaagttctggtgggtcagcatgagaagggaaatagctgaattcgtagcactatgtgacgtctgtcaacgagtaaaggcagaacaccaaaggccagcaggtttgctacagccacttcagattccagaatggaagtgggaagaaatcggaatggatttcatcaccggtttgcccaggacgtcatcggggcatgattctatttgggtagtcgttgaccgactcaccaaagtggctcacttcattccggtgcacactacctactcagggaagaaattagcagaactctatctatcaagaatcatgtgtttacatggtgtacctaagaagatcgtgtctgatcgaggaagccaattcacttcaaagttctggcagaaattacaagaagaattgggaacccgtctaaacttcagcactgcttaccatccacaaacagatggccagaccgagcgagtcaatcaaatactagaggatatgttgagagcctgtgcgcttgactttggtggagcatgggacaaaagcttgccgtatgctgagttctcttacaacaacagttaccaagctagtctgcagatggcaccgtttgaagcactgtatggacggaggtgtcgtactccgctcttctgggatcagacaggggaacgccagttgtttggtacagaagttttaaatgaggcagaagagaaagtcagagctgttagggaaagattgagaatcgcgcaatctcggcagaaaagctatgcagacaaccgccgaagggagctcgttttccaagtaggggattatgtgtatctccgtgtcactccgctcaggggagtacaccgcttccaaaccaaaggaaagttggcaccacgctttgtgggaccatatcggattttggaacgcaggggtgaagttgcttaccagcttgagcttccctccaacatgcttggcatccataatgtgttccacgtctcccagttgaagaaatgtttgagagttcctgaggaacaggcaagtccggatcaaatcgaaatccaggaagacttgacgtatgtggagaagccaactcgtatcctcgaaaccagcgagagaaagaccagaaacaaagtaataagattctgcaaggttcagtggagtcaccactcagaggaagaggccacttgggaaagagaagatgagttgaaggccacccacccgcacctcttcgccagctcttccgaatctcggggtcgagattccgtttaaggggggtaggtttgtcacaccctgaagtttccccctctccttgctttaaaaattggctaaataaatcgtccgaagaaattatcttatttaacctagagctaattccctaattaataaatgcaattaataattgaattcggcgtggtggaatttttcttgagttccccatgctccaatgcattaacaagatttttagtggaattttcagagccttggaaataattttaaccaattaaaaatcaccaaagtgcaattttaatcccaggaaaatccttcccctctttttcttttcttttccttcctttttctctagatgggccgtcggcccatctctctccccgcgctcggcgcccctttcctggggccggcccgttccttctcccctccccgaagtcctccctccctccctctctccttcgggcgccgacaggtggggcccacctgtcggtcgtcttcctcctctagccggttggagccgagccccaaccgccggcgccccacctccccacgccgcccgccttctccgcccctcttcgcgccccactccgcgcccgcgtcgccgcccaccttccccacatctcccggcccgtgcgcgcgctcgagagggcgggattcgatttcgaatcccacccctctctctctctccccccacctttccacgtcgccggcgcaatagggtgggttcccggccacgtccgcctccccctccgcctataaatcgttccccgcgtccttctctcgttttttcctcttttcaccgcactctcccgtgccgtctaccgccctcgcgccgcgcacccgagctccgccgcccgccgcccatctccggccgcgcgccgccgccgctagagccaccgccgcgccgcgtagtcgccaccgtcacgctcaccgagcccgcttgcacctcggccaccattcggttgccgccaatcgtcgccggagcgccgtttctctcgcacgccggtgagctctccatttccacctaactccggtcggccgctctagccgccgtggtcgctctccctacccctaaccccctctctgttttctcctagcgtgccgccgccgcccgtccgcacctcagcatcgccgggtcaccgccgcctttcatcctccgctttggtcgccgtgctcgccggtgaggctcccctccgctcccttttttttccctctctcccgtgtgcgccgccgtccttcgcgcgtgcgccgtcgccttcagccgctgccgccgcttttcgccccgtcctccgtcgcttcccacgccgccgattgccgtcgccggcgaccgtgcgcgtcgccgccggttgccatggccggccggccggttttgaagccgagccgagccgtgcctagccgccgccgtgccgtccgatcggcccctcggccgatccggaccatcggtcccgtggaccggcggtggaccacccgcgtggtcctggtccacggtagaccggccgctttgagccgctgacccgtgggccccgcctgtcggtgccgccccctcccctcgctgacgtcagccctgggacttattgcgcaataaattgattaaggacttttctttattagtaaaaacacagtttatcttctaaaattcataagtaattcatccgagctccgtttaagtccattcaagtctcagtaaatcaagaaaaatgcaaagaatccattaaaaatggttttgtttcctgtttcagtagtcttatagcatgttttgcttgtgtgccttgtttgtcgcgtaggtttcggccgtttcgtcgatccgaagtttctcgaagacgttgctgaggtcccatcagttcgagagcaaggcaagtcatgcaatacgtttgatcatattgtacccaatttacaagtatcccgcatttctattaaatgttgcattcttttacaatgtaatgtgggatgggtcctattcctcagccacatattgtttaccatatgccgttgataacttgggtatcaaaatgactagatgttggtttaggaaatgcttagccatgcttagttcaactagcacacaaatggggatcaccttattacatagactttgtctattggcatagctttagattggtgccaccgcaatggtgttagttaattaaaatacactgaatggtgggctgtgggtgcatggttttgctggtcgcacccatggcagttaaggaccggttcacgggaaaccctgggagacttaccgtgcttaccacaagcgggagtgggtaactgcttgatctgaagtatagctcgaccctttcctaggcaccggtggcgagggtgggcgtgatggagttgggtcggccggggtgtccggttgtccagctgccggattcaccgcggcgcaagaggggaccgcccactgccttttgaggggtgggggtgaaaccttagcgtggtgtggatggttaggggagggttatgtggagggtcttgtcacgatttccccctttgcagtatcatggtgatacttcggggcatggcgacatgtgtggaatcgtgtcttgtgggtacagttgtacacctctggccagagtaaaactattcgaatagccgtgcccgcggttatgggcgatcaaccagattcaccgtgattagtctcatccctagtttagcttaatgaactggtgtagttcaggtggttggttgggcctgttgcaacgtggggtagcgttggacagtgtttggttaacattgattaattactacaactgttttactgccttcaactactgtttttaaatgctagctttatgcaaaagaacctctagcctcctttggttatatcctgcatcatacctcctcttccggtatgacttgctgagtacagtgggtagtactcagtcttgctctcttttcccccacaccagagctgaagatcttcctagttggagctgttttgtcaaagttggtttcgtcgctgccgtcaaggattgcctgtggagtggagtcgcccgctgctgaagtcaagcttcccggtttagctcgcttttatcttttccgctgcatttgtaatcttttctatttttgtaagacgtggatctgtatgtcaacaattgtcgtttgtgtaccctggctggtcctggacagggatttaatgcacattcagcttagaaattctggttcgagaatttctgggcgtgacacacaccatggtggaaaccaaccagcaaaaggatcgcttcgccagttgagacgctcaaggaatggcgcttccattttcgtgtgttgtgtgctagtgggaaagaagatatgaagaggttgccttcagattgtcaattatatagcgtcaatttcactgcaatatatgtgaactcaatgagatacattattcattagatgtgacaagacgatcacgcgtgggcgtgattcactttatgtcaacaggcagcgccgaaagttgatagtgacaactcgagctgccgcttttcatgtgtgctgttgtggactgtgcgcgctactggatctgacactaccgtgaagcgctgaaagtgtgtagtcatgagcataagttgttctagcaccatatgaatgaaaagaactatgtagacgagacaaacacaagtagtactgcagtagtaatagcaaaagtagtactgctttacaagtttgtaagccaaaagaaacggtcacataaggactgaagaggtagaacactactgacgaggcctcttacccctatccctcctaccatgcgccctaatgtgcccctgggagtacgtgagtcggtccgggggtatggcacggccaacccgtcctgcctgtacaggtgtgacctctggctgctcctgagtgtgcgcctctggagctcctccaagctgagaggagcctagtacgtcgtggtggtgtgcaccgtgcaagtcgtcgtcgtagaactggctagtaggaccagtcctaccggcgtgagacgaagaggccccagtacccaagatcccggctgcaaatcctgctggacaaggaccatcagtttcatacaggtatttaatagtattaataaaaagtaaagtaccgtgtgggcgagggatcgacgctccgtgagaggaagagctggcgaacgcgcccgaagaggtggcgaacgcccctgcggagctcgcggaagcgccggtcttggctgcgaacgcgctcgaaggcaaacgaggtcctgcgatgaggaaacgtgcagttaaaacatggtgacatattcgtgcaaaagctgaaacaaaaatgaactaatctctgggctgaactgtaccgtgcgaaaccggtgctgtaggtcgcactgctccgaagctaggggcgctcgaaggcaaacgaagtcctgcgaggatggaacatcaagttacgacggggtgatgttttcgtacaaaaacagaaacaaaacttaagaaacctcttggctgagcagtaccgtgcgaaacaggtgccgtaggtcgaggtcctgctccgacggtaggcgcgcgaggccgtggttgtaccggaccagctggaggtacgacgtccacggcgctgcgacaggagaagacgcgcatgaccgcacgcatcttctcctgcatccggtcgaaggtcaccctctgctcaacgtcagtcaagtgcaaacctctgttcaacctcacttggactgcggtgatatcggcactgatatcccgtgcggcatcagcctatgcaagatggaaataaaaaattcagtagttgtcctatattatgcaagataaatgaaataattgtaagaactaatacaaattcgacgtacccccacgaagtagtctcggtcacggtgcgtgggatacgcgtccgtgacagcggcaacgtgcggctctggggcgtctggagtgaaggtcacacgcgcacgagtgcgaggaaggtaccagcgaaggtagtcacggtagttctcctccgtgtgtgggaagagctcgttgatcacctcctctgtagctaacacccagtcgtcaacgtactgctgtacacgtggagcccaaagtgcgcctgctagctgtccctgtcgagtcaacctgtgaagagaggtaaattatatggctcgatgaagtaattatcataaaaatttagaaatgaacaatccgaactcacgagtggtcggcagggaggacggtcggctgcacgttgcccggaaacacctgcctaagtccgaactgtctcatcacacgctgcgtgcagtgaggctcaacgaaaatgtcgaacaccatcggcaggatggtgagccagtaagcctggtcgcgtgtgcacaaggacgaaagtcctagcggtgctctcgcagcgacggcctcttctgtgtacggctcccagatgacgtcgctcggctggagacggtcaaactcgaacacgaagtccgggtaacctcgtctcacctggacgtgagcgtaacgacgctgcaataaacatgatcggaattagacatgttatgtgaagaaaaaaagaagacgactgataaacttataacgcagcgaagttgcactaaccccacgtcgacactagtaagtccccatcgtgggaccgtcctctggccactgcgcgctgcgaccaaccccgtagggtgcgctgtccaccactggtcgacctatggcaaacctctcggctgcccaaagctgaagcaacatagggcagccagcgatgatcgctcccgcgtcagtcttcgtgcacgcctcacagagggcacggtacgtggctgctagcacggcagaaccccagctccactgcggcacgtcctgtggctgagcatccgcgatggaccgtgcgtagtggaccagccggaagtccacagcgtgcccgtgggtgctagtgaacatcacccacccgaacaaccacaacaggtatgcctcaagggagcgtcggaccgagtaatcatcagcgtcagggtgcagaaggtccgcctacaattaagagtgaaatgttagtacaaaacactctgttgatcgcaaataagcatgtatgataataacaacttatttacttacagtgaactggagcaaccaagccttgctaggcccgactgtagagtacggaggaagggtgttggccggtcctaggtgtggaaggcgcatcacctgctcgaagcgcgcagtgatatcctccttccacccaaaaacaccgtccacgggactaactggtgctcccgccagcggtagcccgagcaggtacgacaagtcctgcagtgtcggagccatctccccacagggaaggtggaacgtgtgcgtctcaggtctccagcggtctaccagagcggcaaggagtgaccggtctgcatcccaccgcttcgctgggtcacggtcgtccgccgccgcctcaacaagcctacaaagtggtagaaggcctgccgcacgtaacctgtatagagcaaacttcaaacataagtacaacacaaagcaaagttgagttgaaatgtgaacatacgcgtaccaaggaacgtgacgggggtcgacacgcaaccactcgcgcgacgtgcgtggacggaaggtgccgagctgtgcaccctcgactgctgacaagaacgagcggtggttcctgtcaatcccacggttcaacagcgccggtgtgtcgtacgccatacctgcatcaaatagattgatcagaaacatataaataattagttcaacataagtaataaatgttcataagcgaattactaacacatattaaacaagagtacaaacaaacaaaagtgtcaccatacggaatatttctgattacaacaataactgcagttacacgatatgagtacttagtccgaacactcatcacgataacattatgatacaacaccgaatagttcgcaatactactagtacaacaatagtcggaggtactcattacaacaacattcaattgaaattacacgatagaagtatttagtccaaacactcatcacatcacaacagcattttatttcctaaatcgatagcattgttacaccatggaatcgcctgctgcgcgacgacgccttggccttgcgcgcctgcttgttgttccttcaccaggtggtcgcctaccatcacttgaatgtccagatggactagcatctgcgccgcttggaacttctgcattcttcgggcatttcttgtaagtatggccgcacagatcacacttgctgcagcgtaaagtcctcccacctgcttctgactcatccatatcatttctgatgcgtctagtttggcgtcgaccctttttcacccttaacttagatggatctggaacataaaaaacttgggcactcagcgttgtgtaagatcctaagatcccgaacccatatatctcctcactccatgtatgaaagattgcttctttcctgaaataatttgagacgtacacattgggagatatgccacaatcaccggcaacagcaagaatgtgtgagcaaggaaggtgatgaagcttcggcttcatacaactgcaggtacatccaccatccgccttcaagacacattcctgcacggcttgcttgcgatagataccacgcctgctcctatcaacacacattatttcataccgatgcacttgtgtgccttgagcaacaactctatgtctccgtgcctttttgattttatcttccatatactttgtcactacgttgccaaacactatgttgttatcggccatggacggaccaattttcttgtatcgatccctaaagtacgcttgcgtgccgtgaaggatgaattcaacaatagcaaccaatggaagtacccgaactcctcgcattacccagttgtacacctctgccaaattggttgtcattatgccataccgagatccatcggtgtcgaacaatagagaccacttctccttaggctcattctcaatccactgagtgaaatttctgatggacgaccctgacctttttctcattgttggtgggtcatcatgtaatgcaccaagaggtatgggaggctcgtcaccttcaacttgtggtctgcgagattgctcatctgtttgcttcattgtcaactcatccaacttgtcccacaactcattaaatttcttctcttggttctgtgcacagagcctcttaaagagctccataagatgcttgttcttgaattgcttgtagaaatttgcacccatgtgacgcatggaccaccgactccgaacatcaggccatttagctggaagtcccttctcatcccaaccgttctgcaagtagtcaatagcccgcaacatacccgcatgacgatcatgtataaggcaaacgttgggcctcatacgcaccactgcaatgtgcactctctctaggaaccagtaccagctttcagtgttctcactctctacaaatacaaaagccataggtagaacctggttgttcccatcacacccaattgctgtcaatatctgacctcggtatttacttgtcataaaagttccatctatgcatagaacaggtcgacaatgcacaaaagcattgatgcaagcacccaatgagaaaaaggctatttgcagcacactctttgttcgatcatcaaccgatgtaaatgtatgtaggtcatagtaagtattattattcctctgggcaatggtggctaacaaacgaggcaaattatcataagaagcttcaaatgtgccatacctcatctcaataatcttttgtttggctctccaggcctttgcatagcttatggtgtacttgaatttgttctcgatgtgcctaataattgattttggttcaaagccaatgttaccaacaacactgctgtacatctcacttgccacaaaagctgaagtgatgtttcggtgatacttctccaccccttataagtagcacttgtgctcggtcacaatgctaactttccaataatcattccatttacccttatatgcatggacacgccacggacaatcttccttcatgcaccttacttcatacacataatttgttgacttgatcaccctaaactctctctgcaaggaaactgcccaatgcttcaccgcctccttcatctcatccttatgagcataccttgcaccctcaattacctcgttctccttatactcccagggtacatgatcaccctctgatataacaagtccagagaagtcctcatttgcccaatcagtggccattacatcaccttcctcatcggatgatgcgtcgtcgtccgcttcctcattatccgaatcttccctctccatttcatcaacaattataccgactctctccccctcatccgccatgcccatggcctgctcctcccttggttgattttcctcattttgcatcgatggtccaacaacatcccctgcattgataggaccctctacatcttcggtttgcattgaaacatttatatctttctcttgtaccgacacaaatataacaaggggccatgaccgttcaaaagtcatttccacataccgtctccaagcagcagtgctgtccatcggcattagttcccaaaaataaccttctgttgcacgactcactacaactgatactgacattgtgtagacttcttggtctattctaaatcctctcaacaaccaactataaattgactgaaatgttctctccgcaggcctatcgatacccttagatgtcattacaaaatctgacagatcaacaccatctggaccaaatctaatatttccttcaccgtgaactatctgaaatgtgaccttatttgacattgtgcctgatgaaaacaataactgcgttaacctcgcatttctgtactacgccctaagttacattctctacaatattgttctccaaaattctaaaagtaggttacattctccagatcaaactaaactacatcttacaattaacactactgtctatgtctcaattcatactattatattctatgctctggatctacacatatgtgctgtgtgctacagatatgctaaaatatatggaactaaaactaaaacgcaacatatatactcaaacataacatattagtacaaatgcaaaagatgtatgggagcaaacctgtgatgaagtgagcgaaccagcagggcttcgccgctccccttctgctgccctcccctctctctctttcgttttttttggatttttagtgaatataatgaaatttcagagaagggggactgggctttataggggggaggcaaaaatcgccctcccccagggcggcaagggggccgcctgcaaaattccatgccccctcgccgcccatttgcaggcggccccccacacagtacaaaatcgccctagcggagggcggcaagggggccgcctgcaaaattccatgccccctcgccgcccatttgcaggcggccccccgcacagtacaaaatcgccctagcggagggcggcaagggggccgcctgcaaatttcgttgacggccgtcgcccgagagcgaacggccgtctgccacgtcattttcgccgccctctgggatggcgatttttaaaaatcgccctcccagagggcggtaggcgactacttccgtcaattttcaaaatgaaaaattatttttgtaaaacttttaataaaaaaaattaaaaataaaaaaaattcgaggggaagtggggaacgagacgagggggaggcggagcgatgcgatgcggagttcacggcgtaatatgggccggcccatttcggcccaatatgggctgcgatgcggatgtaactgtatgccgtccgatgggatgatttttttttgaaaaagtacctcgtcttgttaccgaattacaaaatcgtctctcaccaaaaaaaaccagatatattagggctgttttcggcacccttttccgacccctcttccttgttttccacgcgcaggcttttcaaactgctaaacagtgtattttttttacaaaaattttcaaagtttctatacgaaagttacttaaaattcaaatataatccatttttttaaataaatagctaatacttaattaatcacacgctaatggaccgctccgttttccacgcgtactgttccggttgggaacatacaatggcgaacacagcctagttcccttaacatacaaaaccggtcatcataggttcttgggcggttttatccctgattttatccgacgtggtagctgagtcagcgtggaacccacgtgggtcccacatgtcagcgactactccctttcgtctctcttggcaaccggcggcggatgaggaacggggctgggctaacgatgggcggggagaggagcggaggtggagatggacgtggcggcggcggcgccaccgacaacggcttctctcttgccctcgtctcgctctccgtcgactccagcgcccgtgcatcctcctctcccgccgcagtgattggctgaggggtgctccaccctccgctgctaccagccctcgcaaggctgcttcagcgaggctatgacaccatcattgtgttggcggcgtggtcgatttggaaagaacacaacaacatagtgttcaaccagaaggtcaggagctggacagctagggaaatggccgaggaaacaatgctttggcgtttggccaaccccgcagtgataggctcccttagagcaacttcaatagaatggtcaaatggctggccaagctaaattttagcaaatatgaggaaaaaatatcctccaatagcctctccatccggttagctaagccatccgaatggccaaattgtacctctcactggtcaaacttagagagtctctctgcctagctattcgtgggccccaccactccccccaccccatctctctctcccggctagagcaagaaggcgtcgatggcgccgctcgtgaacggtgacggcacgaaggagagaggcactggagccagccgcgaccgcagtcgtcgtccgcgccgtccccagccgcgaccaccgtcgccgtccgcaccgtctcctgagccggccgcaacagccgtcgccgtccacaccagtcgctgagccagctgcgaccgccgacgtcgtctgcgccatccctagccgccgccatccgcttccatccccgcgtggatttgaccgggcggcgtggattcgggagaggaggagtgagagaaagaggaagaagaatgggtacagaggctgacgcataggtcccgctgtcatagactcaaagtagagaggatggatggatggagaggctattggagtaaacaacgaatttgatttgacaaatgaaatggagagttggccaaatatatatttggagagtcgaatttagagagagcgttggagatgctattagattgcaggtttcgtggctagattaggctttagctcctttcttccggttctcctatcccctgttgctctttgtttttcgatgtaaagaactgtttttctccggttaataaaaaatacgcatctaccgtattcccccaaaaaagcattacgcaacactgcgatagcgcgacgttgattcggttttacatataaacccctaatttttttacaaattggccctaccttagatggcgatgcgtttcccgtcagccctgtcacgccgccgccggtcgccgaacggcagccgcagctgcgcgggcagcggcggaggcggaggcgaaattttctctactgctcgcttacaatctcagtagtgtcagtagtgtgatagagcaagaggaaatcgacgcaaaaatcagatggaagtgtgatagatcgtcggtggtgtggggaggagaagatggccggagaggaaggtggttggtggtgtgagcttgctgctgcggcggaggccactcgcttcaaggttcgctcctttctctctcatatacaaatttgtgcttgtgtttatttgcgcaagcactaggaggagtgcgatctgttagtgcctaatttaatttcagtccctttcatcagttccatcgttgttgattgctcgtaaaatattctccgttccattcttactaattaaattgaccggacaaaatatggtgttttaggtgactggcataaatttgacctgctaaaattttattgtctgaagattattgtgataattttgactgcatactggagcgtgtaccagctagccccccaagtcaaatcagtctcaagcttcattccactcgtatctggactgctgcccaaaatccattggtgcatctacttttgagttcacatgaaaatccattggtgcatctactttgagttcacatggttcacatggtgattacaagttcatgtctgataatcttatgtgctttctgatgttgactaatcggctttggctctgtagaaagtaatgaaggtagaaacacataaacgtgggaatccttcgtcttactttttgagaagaaaattctggtttagaaagagttacctcatgtagacgtctttctctctgctcatgtaaattcatgtaaatcgctttcaatactagatcagaaaattcatgtaaattgctttcaatacctgcacaaatttcttgtagacgtgtttctctctgcttcgttccttctttatcatctctagaatcctggctcactatgcaaaatcccatcttgaccacttgctcctgagtcctgatagagcttggcttggtatggagattctgatttctgctgtggcaggtgaacttatcagccggttcatctcttcgctacaacaatattacagcaaccacacaagcgaggaagatgatcgtacaaggttgcagcggatcttgctcaggatgcactctgttgttgaggaggcagaaggacgccacatcacaaaccaggggatgctcctacagctaaagggacttatcgagggattctaccatggttaccacattctcgacaaggtcaccttccaacccccagaagaagagagcatcaaagatgaggtgattcacgagataaattcatctgccttgattacttcgaattcggccaagcggtttcgttttgctgatgctctaaggaaacacacaccaatttcctttgctagcaggagcacaacaaacctgaaaggtgttgttgaagatttagaaactaagatcgcggatatgagagagtttgtcatgctcctaggcagctaccctcgcctacctcgccagccttacagtacatatctgttcatggataagtgtatgtttggtcgccgtgttgagaaagagaaagtcatcgacttcttgctttgcagtgatcttcctgatacatatgtcagcattcttccaattattggtccacacagaattggaaagaaaactcttgtgcagcatgcttgccaggatgacagggtgaagagctgcttctcccatatatttttctttaaagaagatgatctgaagatgggagagctgttgcttaactccaaggcttctccagggaagtatttgtttgttattgagttcatttgtgatgtgaatgaggcagcatggaccaaattccaatcatatttgcagaatatgcccagtactgaaattaaggttgtaatcattggtagaacagatgatgttactaagtttgggacaacccaacccatcaggatgaagaggctgtctgaagaagagtactggtactacttcaaggcactttcttttggaagcatgaatcctgatgagcatccaaagctagcatctctgggcatgcagttagctactgagatgaatggatcatttcttggtgcaaatatactaggtgaactcttaagagctaatcctaacactcaattctggcagagtatcttattaagcttaagagggtttgtacaaaagaacttgtgttggtttggtgtacaccctgaagatcttcttgaaagaaatacccctgttgatttcaccaggatggcctttcttggtgctcaagttcatggttgcctggtttatgatcttagggtcgctggccctgcacaaaatcagctaccaaaactaacgtcaagagaagtgttattgggaggtaatattcccgtcgaacagaagtttgatgtgctggtatggaaatctggcattccaccatactgtgattacatagctacttttgagaaacagaaaccacggcgtgtggttgggaagaggaataccatctaccactgagaaaacacaagctcaaatcttaatttgggggagaactctacaaattaagaaattatatcgtcggtaatgtaatttaaaaggcttgctctgactactattggaataatttgtacagttcagatcaatgtagcacttgtgtctctactgtaggttaaaatgtgtatatttttattaagaaaaactctgttgtatctgttcctattagtttggatatgtgaaattcagtcagttacagttgttaccctgacttgtatttgcatgtatgacggaaaccttttgtaaagaaactacttcatgtttctgactatgtgacctatgtatgaacaatttaatttacacaatatctgtttgggcatagttagtttcagtccctttcatcaattccatcatggtcagagcctgccttgcttgactttctaaattccaattaccctaatggtgcatttctttatagacctctgtttagataatttcttcctgattttctcttgcaaatcacaaaggatatgttcatctctgcagttgcaagtgatctttcagccatttcatctccttttggatccagaaatttgagaagcggcacacaacagtggaggggaaggaatcttgataggctgaacagcatccttctaaagatccacaccatcgttgaggtctcatggcagatcacaacctgaggaatgatcctccagttttggcgcctatggtaggtacgttatttgattagtatttttttggcacgtcaagttgcagactgttggtgaggaggtagtacttgaagatcattctcaaaacgcctctgtttatggtcagaacaataagctatgaagaaaaaaaattttgttttaggtgtaaaaaaagatagggaagcaaattagtgctgatagctttcctaggttatataggctgtatgtacctttcaccaattatccacctttactgtagttattcagacagttcagggcatagaggcatgagtagctactgtagctaacagatgtttctttttttaaaaaaaaagaagaagagaaaataatgatgtatatgctcttactagtctgaacatgtaaatgcagtcagtcactattgctattagtactatgaacattacgtataccttttgaaaagaaactactccctccgtttcacaatgtaagactttctagcattacccacattcatttagatgttaatgaatctagacatgtatgtgtttagattcattaacatatatatatatatatgtatgtgagcaatgctacaaagtcttacatcgtgaaaaagaggaagtactttatgcttctgactgttgtgtcctcatatgaccaattcaatgcaccaatatatctgttatatattttgccgggttggccgaaagattcggtcaaccaatttcatgaagaaaggaagggtacattacaattaaagagcttacaacgactgttaaatagtgcctaactaatttcaatcactttcatcgtagtcccagcagctgccttgcttgactttccaacttcctaacaccttaatagtagtatttcgtaacaaacttctgcttacacaatttcctccagggttaggctcacaatggacatgctcatctctgcagttgcaagtgatcttgtgagccggttcatctcctacctggtccataaatctgagaagcagcacacgacaacagagcaggacctggagaggctgaagagtgttctcctaaggatctacaccatagttgaggaggcggaggcacgacaaatcaggaacagaggaatgatccttcaactcaagggtctcatggaaggtatgtttcttgggtattatgttcttgactccttccagttccagtgtgttgaagaggagggtgtagatgaagatcaccaggtcagttgcaagcgccttcggttcagtacctgcacaaggagcacttcattgttatcactcggtacagagaacacacctgtgcttaagaatgttattgaaagtttggagaccaaaatttgtgatgtgagggagcttgttgtgctgctagccagttgccctcgtcttcctcagcaaccctattgcacatatctgttcatggaaaagagtttgtttggtcgccatgtcgagaaagagcaagtaatcgactttatactacatgatgatcagaacctggctgtccttcctatcattgggcctcacagaattgggaagagaacccttgtccatcatgcttgtcaagatgaacgggttcgtggtcgcttcctgaatattgttttcttccatggtgatgatcttggaaacatttcattaatgccttcaacgaaatacttgtgcatagttgagttcagttgggatgttgatgcggaagcatggaagatctttcgatcatctatgaagaaggcagctataagtggcagtaaagtcattatcataggaagaacagatgagattgccaagtggggaacaacaccagcaatcaggttgaacagattgtcaccagaaatgtactggtactacttcaaggcactttcttttggaagcatgaaccctgacgaccatccaaagctggcttctctaggaatgcaactggcaacagaactacagggatcatttcttggtgcaaacatacttggccacatactaaggggtaatccaagtgctgaaatctggagtgggttcttgatgagcttgaggatgtcacgaaagcgcttatccatcttcgaggagcatcctcctgagaagaaccacccttctcatacagctgaagtagcgttcatgaattatcgaggttgtatgttgtatgatcttagggaggctggccatttccagagtgatattcccagattaacaccagcaggagtagagctagaaggcaaaattccttgtgatttggggtttgatgtgctggtatggagatctcaaatcccgccattctgcaactacatagctacatttttgcagccaaagccccggcgcattgtcagaaggaacaagaatcccctggcagttagtattacttatcaatcatgatcttgtatgaaggacatatgccctccaatttctggtcgatctgatcagaattcggatggtcaagatcgattgggatggtaaagaatctatatgcataacaatcacagtaacctgtaacttgttccagatactagtgtacctgtacatccgcttcttcttcttttttcttttcttttttttcttttttttttgctggtttggatgtgtgtagtttaaggtagtaaggaattgatgtgggttttaaaaaataacaattatttcctcgtttcttttgccccatgttctatcatttaattacttcttgtgaaagggcatgtagcctagtgattgcagtgatctgagtagcacctaagatcctaagtatgttgggtccaatttctctttcttgttaacttcttagccttattttcttacatggaggaaattggaatgacctgcatggctgcatgtttagcttgcgggttgctgttggatttgtgaaaattttgaatgagaattcgccgtcgtcttgctcagaacggagcatataatattatagagtaatttagtgagtaagcgtcatgcatattattacagttagcatatattcattggtgtcgtgtttcatattgttgtgaactcgaatacgatgctaattctgcgaaatttgagggccgtgaaatagattaatatgcttgtagctgacctgtaaacctgctacttaatctgttgtacttgtaaaatgctctacatatgggatcatcttaaaaattcttaatcgactaaccacattactgcaccctacataggtgttcacatcgctgtagttttgataatggctgtcgattggctatctcgatgtgtaaaaaaggaaagccacagaagtgtacaacacacaagatgttgattattattattattattattattattattattattattattattattattattattattattattattattatctttttaaacataataatagagatgttcttaccaacctggttgcaagcactagcagcctgtgccctcttctcagcttcctagggagcatcattgacaaatcacacccttctgatgacttcgcgctacaaaataaacaaacctaatatagaacataacatatatcttagtattacaaatctacaaatctggatagaacatattttttttatagtaacacagtacaaatgcagacgctcacaacacgtgcactctcatccctataaacacacgcacaccctacttctatgagcacctccgaaagactggaccaacgtatattgaggttaacaaagtcaccacggacacctcattgttctaacattgaaagaataattagccataaatgctagttccaccaataagaatctaacttgttgagttacggtcacttcgctggatatatcatatatcaaatgttacctcacatattacaccacatattagatttgtttaatttagaagagagggagtaagaaacaatgacaaaaggtatccaacttgttaagcttcatctttgtttgtactccatatataaaaatagccgcagaaatcacctgagatgtgtaggcctcgtgttctccacgcgcttctcgacttggcgcctcgacgagcacgagcatggctaccaccaacggcgatgccgagctcaccgtggcggaggaggcaaaggaggaggaggaagccaccgacgacggcgacggcggagtgagctcccagtgg

SEQ ID NO: 16680 - DNA, 4250 bp, Oryza sativa
tacagggtgagggtggtggtggtcgtcgcgacggcgagcctcgcgctggcggcgttcggcgcggcaggggcgcggctgggccgggctcccggtggccgggccgggcttagggcgtggtcggagggttgctggccatggccgccacctatggcgtcatgaagctcttcagaacacatggcgtttgatgaagctgaatcatgattaagttgacatgatgtaaaattatccaaatgcatagagacacggttttttttttaaaaaaaaaaaagcttcggctaaacatggtgagacttaccgattagtgatgcaacatgcgttcttgcatttcacaggtaaaaattgcttctgcataagaagaccagatatgaactggttaccaagtttgtccatggatctgaatgctccccaataaacagaggaagattgcaaattcatacattttccactgttccacaccataatctcatttcttgccagaaaaaaaggaaacgtcagactgtaccagaatggaaacaacgaaattctactgaaccaacatggttgaactgaaccatttgattgcatctcactgcctgcatgcgctgcagataatcatttcagctttacaaaatcccacagcctcagatcatctcagagcagctgcatggatggatatatatgtcatcccgtaaatatatatagagttggtaacatcctagtagctactagcttgcttaaggtatagatagtcagctaacgcgcgctacatatataatatatacaaaacgaaaactttcgtcatcatactatatatgctaaggttctccatctgtgagtttctctcctagattggtgccgctgacctgtgttttgccgcgatttagtattgattctttaacctccctgtatttcttcagctcctcaagggcgtcagttgccgtcaccggtgtagaacttgatgcgatgctgccatgttcctcagtcacgaccttctgaactgacgaaggttcttgaggaaccacagcagctgcatctgactgtaggccttctctgaggcttggtgcagtcttcagcagatgcacaagagcaccaatggctgcagctggagaccttgtggacgagccaccagcatcttggttcttctgttcctccctgtctgagatatcagccctggaaaattgaggaggttccagttttgcttatacgaagacttatatagaccccaaaaggtaattgaaaaatcagacaagcagtaaatccacaatatagactctttcactaccaaatttctttgagcatgtactggccattatgctcttctttaaaaaagaaaacaccatcttgctcattgctaagccttataatagctggatataatgggatacaatcaaatatgtaatttgataaatttattcctaacattagtaggctagcacaggaatattgaagtatctggttcaagaggtaagctatgatgacctgttttagattgttgagttagaataagttgcaatttctggaacattgtagataaatagttataaaaaaaagctaaaagtagttaatagacacagattgtcctgtacagggtaaatggagggtgggctaagataattattacatgataaaaggataatttgtgcagtgacattataaagtaacaggctagagattgtcagctcctcagttgaagctatatcagtttagtagaattaagaccgtaagctgcaaataagttaggtgcaggaaacaagtagaggattttaagacaactgaccttcattttgaatatttgatttatatctacaaaatcatctcagttccatgcctaaatattaaaattgatgtacatttctatcaattatctttcctaaaaaaaccactctggtttgggttccagttcatagtttgcactgtacattgaaatctagcctgtaatgcaattcatattcttatattaatttttcaatgtaaattactattctcattagtcaccagaacatacacgtgaacaggaaaaatataaaattaagcaaatgtcggaaataagaaactaaggaataacataaattaatgaatagtagttcaagagtacaataaaggaagaaacattatattgccaattagtatgagaaatagatttttttttctggttcaggtaacattgagacaagaaattatgtgactattgagcatctaatctagaatcttgaagcaagcatagtgcctcttcagttctcattaagaagagcccactttgaattaatgaataaatttttaactataatcaaatgcaacaataaggttcacaggccttaatgagcattacaaaaatatagcataaccgtctttaatttgaagaaaactacatagaacacatttctgcattgcctgaaattaaataaccctttcttggagcatgtgcatattaagggcatcattctggaaatactcaggtgtcaggcatagtctcacaaactacatactatttcaattaggtgactaggaaagaatacctgttaagctgatcaattatggtgtctctatcttcccatgcaaaaaccaattcatgttcatccagttcatccataataaaaagtttacttgatgtccgagtcaatttcagtccatgaaagtatcccaaatcatatttactgtaagataatacctagggcagaaagcagaacaagaaaatcatcagccaaaaatcagatccaattatcctagggtaggaatctcataataaaattattgttattggctcattgcaaatttcacatgttgcttgaacaaataacagatatcaattaccttttgcaaggccatgtccttttcaaattcacccaacctgactagatccttccttacatttgagttatgatcaggggaatgtgccaggttgtcattgtgagatgagaactggtgcttacccttcgaacatggagaaggaggcaacccgctacctcctcctccgcctgacttcaatgtgggaatagtaactggtgcactctcatatcggaacaaagggtttttagggtagttagctgaaggggattgggatggtgatggtgacaatggtggtgatggatagcattcttcaaatggtgtatatttcttctgcccagaggatgatgcattttgtggatgtgagcatgtttttagagaaacatgcagaggaacgcctagctgtgggcttccacgggattgtgccttagtgggagaaggagatggcgacactgacgttccagctccatgctcaatactccaactgtgcctcctggtcattgcagcacatgcaggtgcaatgccagctgaagggagggaattgaatttctttagaaagtcagttgtggggctcccaacgtaatccgttatgatctctggtggcattggtgatgtaggttctgaagctgccaccacctccaacactggcacataagaaactgacaagctcaatcggccaaacagagtttcaattggagcaaatgcatagtgtttcatctctgcatcctctgcccgggtgaatggctcaacaaatgaagatatcttgtgtgacaggttgagaggacggattctcccagatgagttcagttccctgaagagactgtatgctggcaagagcctgacgagcagatgcaatgaccggagtaacactgtcgatccctggtaggtagccctgtacaagctatgatcctcagccgagctgttcctagacttcctgccattgttcttgctgccattaccattgccaccgccagacttgcgagcttcatactgtatcacccacctctctattatcttcccactcccagcagctgtgttgctggtgctgtcccggcataagaggacaatgtcaatgaccaacggctcaaggttgctctgccgccacaggtcaaagttctcgagcacagccgggcagtcccggagcgcaaggttgaaccaccggtcgcgtggctggctcccggacagcggcgaggacggtggcgagggccgcgtgaagttgcgcgacgactcgtacggagagcgcgactccagtatgatgtggaggctcttggcgaaaaactcggtgatcacttgctccaccatgggtggctccgcggcagcagccatggtatcaaacacctagtgtgggtgcatctgggttcagctaattttgctttctttgggaaaaaaaactatgctattaattcgagctgcgtctccaatcttcgccacgccggtggcggagggagaagaagaacgagtaataccttatccggagccaatctcgc

SEQ ID NO: 16681 - DNA, 5818 bp, Oryza sativa
ggccgacggcccatctagagaaaaaggaaggaaaagaaaagaaaaagaggggaaggattttcctgggattaaaattgcactttggtgatttttaattggttaaaattatttccaaggctctgaaaattccactaaaaatcttgttaatgcattggagcatggggaactcaagaaaaattccaccacgccgaattcaattattaattgcatttattaattagggaattagctctaggttaaataagataatttcttcggacgatttatttagccaatttttaaagcaaggagagggggaaacttcagggtgtgacaaacttcagggtgtgacagtgtgaccgtcctttgtgcgattgtggggatggatgcatactcaagtcttccctcatgatacaaactcggggcaggagattcttccaatgcgtgaactttgatcaggtatgcttcatctattcgaagttcaaatggataaaaaaactaacttcttcgtacacaattgtaacatcttacgcagacatatcgtccaatgtgcaacttcatcgagtaggtagacatggagaacccacaaaacgacggaacccgtgcttacccacgtagtgaaacaagatcggactacctaaggcggaaggatgagcatgaacgtcgaattgctgctgaggctttagaatggcacgtaaatccccttggactccccacgtggcgtgagcgtccgaagtgtcgttgtggtgaccgttgtcaggtcataaggtccgtaaggcaccgaactcgaggacaaaggtgtttcgtgtgtccaaacattgtcgacgatgatttcgtggtaattacaactattcttttcatcactcctcagtactatcattaacttaactatcccaaaatggatgtacataggaggatgtaaggaaatgtcaattcgtacaatagattgacacagtcagagttacttcaagtggcgggccgataacgcaacctgaaccgaccatacagttcattcatgcttggatggagtacgaacgtcgggtggaaattgcaagcttagactggaggaacaatccattagggttacctaaatggtccgagcgtccaaagtgtgggtgcagagatcgctggcaggtggctacatcctttgctgaacaaacatttcgaaggagatattttgtctgccccaatgtagacaacgatttcgttgtatgtctaaccatttacaaaatccgctatgatttgcacaaaattactacccaaactaaataacattactatttttacagggcaatccaatgatgggtggatttactcgatggatcgacaatgtcactccatcatatcatggccagaagataacagagtcagaaacacaagtagagtatcaacgattgaaggaccacgagaatgcaatgcattctaaccgacctagaaggggccgataggttactgcatgcttgattcgtcgggatcgacaaatttgtaccgtgtatcgatggcacttcttatctatcttatcattacaatgtttaattatggtggtgattttttgtatgcgtaagactaagggcctatttggattgctaccaaaaacatgccctaccaatattttggtaatttgaatagtacttgtgtttgatttcgattgaagcctattcattggtaatacgtaatctagatttgagattatgtagaacattcttcactacaattttacattttggcagcaaaccaaatatgatcaaatgcaattttaccttaccaaatatttggtagtgccaaaacttgcttatattttggcactaacaaaatatttgtacggtaacattccaaataggccctaaaaaataataaaattgtattttaccagtcttggagattttaatcttgtatagttttcaatataaaaagatttgataactattgatatttataaaaaaatataaagcacagtataaaatcgccctcccccagggcggcaagggggccgcctgcaaaattccaggccccccgccgcccatttgcaggcggccccccgcacagtacaaaatcgccctagcggagggcggcaagggggccgcctgcaaatttcgttgacggccgtcgcccaagagcgaacggccgtctgccacgtcactttcgctgccctctgggatggcgatttttaaaaatcgccctcccagagagcggtaggcgaccacttctgtcaattttcaaaatgaaaaattatttttgtaaaacttttaataaaaaaaattaaaaataaaaaaatttccttcccctcggccttccctcgtctagggcttctcgtcctccgacgacgacgacgcgagcacggcgatcggtggtccggcgcggcaaggttcgaccaccgcctcctgccccctacctccctaccttctccgttctggttttgatttttctgctatctctcgtctgcgcgccctgtgtgaattggctagatctagtgaaaatggctcgctcggttgaatcgagttagaacggccagatttgttggtgagtatgcactgcgggttgaaaatactggtaatttttcgttagaaattttgcccaaccatcccttccttggatcaacctgctactcgaacccaaacccttgaggtacagtttgttctttcatttcggacttctccatctacattcactaatttgttatgagctttatgatcattgcggtaaatagcaataggaagatacataacgtcacatgttttacgagggcaagtagtagatttagcactaataatgtgagcttatgactggacattcatccgcatatttctgcgtcacagataactgcctgcaccgaatatttccacttcagctctcttccttttttgatattgattgagtttctctgttctggagtttatcttgtttatctgtatagttgtgttcatgtgaatctgatgttatagggtgaggcaatggtttctgcaattagtgggggacttattttctatttagcctgccatgttattcaatcttttgttcaaatgagaaactttctgtaacacttgggagtatttatcagtcttgatgaatttgttccatttcatggttgtgcagcaacaatgacggctggatacattgccggttccctggttggatcatttgccattgcttacctgtgtgacacatttgtttcggacaagaaggcatttggaggtgactgtcctcttacggaaatgcctgtgcttaacctcttgtctgtatctaaagctgcattattttttttgtaaacaggtagcattccaaagactgtttctgagaaggagtggtggctagccaccgacaccaagttccaggcctggcctcggaccgctggaccaccggtcatcatgaatcccatcagccgccagaacttcatcgtcaagtccgctgaataggcgaaaccgtgagagaagctggttcagcgtcttgtttccatcacggagctgaaggttattttctaggtcttaaaactgtaataagacatttttgcagtttcagtcatatcggtgagcaaattttggggcttacagcttacttaacatttgatgagttctgttcgtttgtgaaaattacctcctaggagcaaagaattgtattgttctcctattttgctgtgttcttttgccaatctgctgcttaagctcattttgtggcgtttccttgccttctgtttccgcactttggaccagtgtttgtgcatgatttatgcttgaaccagtattggtgaaaccgtgaaagcgattttgtcagaccctgtaataatgtcatatatcctgttgtgcaagggtctcacaatgcttcgatgctcactgaagactttgatgaaaacctcattttcacccgtatgcttgcatatgcatatgatctgatcagttggttgcgagaactctatgccaaaaaaatgttactacaaaaatgttctgcgtctgctagcttctctgcccgtttctacaacaagctgtggctcaggaggaaagcaaaccaaaacaattcaacaagctgtgctcaggaaaacacaaggctatgttttcggcaggaccaaacttcatttgatggagacttataattctctattatcaccagagaactgttgtacatgttcagtccatattctaccaaagtcttctctctccatcatcctggcttagcatcagagatttcatttacaatttgttctaaaagccagctccccgtggaagtatttccttgtttatctccttttctccaaaattaaccagtttattttgcagaaagcaggtaaacaactaaacaccatcctacaaattttgccgctaagcgggtaaaaggagacgacgggtcaatgcttttatcatgaaccctaccatccatttatccacccaagagcaaagttagaattgttcttaccgcctaccagataaaatagacacatgcgaaaagaacttgcaaacaataattggatacattatgtgagtaaaatccacacgaccaagaatttgtgtgaacatgtcagggtttggaataaaatacaaaagcattttttttcgccgggcaaaatacaaaagcatttgccttcagcctgtcaacaaggagtacgtagtgtggcaatattccacaaaagtcagtcttccttgtggtaacctcagaagtctcaacacaacatctatttggaagacgtctgaaaaaaatataaattatttgcttggatttcaaatcaaaacaagatcttaatagccgaaaattttggctaagcgaggattgtcataccacgtgacctctaagctttgcaaccaacatgaaagactagtatgcatattcttcggcaaaatttgcccttatgcccaggaagtttggacattgtttttaaggtggtaaattgcaaaatcatggagagagcccagccaaaactcgttgacagtttcgcaagctggtggcatgaagcaatgtcctagcataccaaaaagagatggacaagaagttcaacagccctgttgatgtacacatgttggaatatttgaatggagaggaaataaacgagtcctccaaaatgaacaccagaatttgcgagatgtccacttcaagatctaggacatcaagcaaaaagagagatccccagtttcttagtttcttggttgctggccttaggagctgctgtgggtttggttttggcctttgtccattgagtttgtgatggagctgctgctggaggaacattccttagtttgtgatggtgtggatctttaggacactcatcagcttctcaaggtcctcctttattgtctgaactctgcaaggagatgaaatggctgacatgatcacttttgcaactacagagatgagcatgtcctcttcgaatttgcgagaccaaaccaggaagaaattaatcgaaacgaattcctgtaaacaaacatatcattaaagtagttggaatatagaaaggaaggagcagtgactatgatggaaccaaccgatggaaggcactgaaactacatatattgttgtacattaaattggccatacacaggacatcaaagtcagaattcagaaacagaaagtagcttcttttgtgaactatattgtcagacacatgacgctagtagggtagcaatagtaactaacagaattttacatactcaaactagtaaaaacagatacaatagcggttccctaagaaagaagacatccatgaacctgcaatagcatgacatatgctcctttcacctaaactgactgaataatcagtagtagctagaatctgtgaaaggcatacccagccttctaaactatattgtcgaagcgtagacaatgtaatttctttctagaaatttttcccccagattaa

SEQ ID NO: 16682 - DNA, 7429 bp, Oryza sativa
atgaaccggctgataagatcagttgccacagcagaaatcagaatctccatgctcaccagagctctgcttggaagcaaatggtcaaaatgggagtttgcaaagtgacccaggcttctagaatctagaaggttacaaagaagtaggccaagagaccaagacaagtcaacaagaaattaaagtctattattatcaccagagaagggttctacatgttcagtctatctcctaccaaagtagcttctccctccatcatcctcgtttagcatcaaagctttcatttacaatttgttctagtagccagggccccatgaaagtatttctttgtttgtccccttttctgcaaaataaaccaattctgcaaaaggagacgacaggtcaatgcttttatcatgaaccccatcatccatttatccacccagaacaaagttattgttcttaccggttaccagataaaatagagtaataggcccatgcggaaagaacttgcaaacaataattggatatattatgtgaggaaaatccgcacgacccagaatttgtgtgaacaaggagtatgtagtgtggctttggaataaaatacaaaaccatttgccttcagcctgtcaacaaggagtacgggtggcaatattgcacaaaagtcagtcttccttgtggaattcaaaggttacctcagaaatctcaacacaacatctatttggaagacgtctgaaaacaaatgtaaattatttgcttggaattcaaatcaaaacaaaatcttaaaagccgataatcttggctaaacaaggatggtcaaaccatgtgatctctaagctttgcaaccaacatggaaggctaacgtgcattttcttattctttgtccttatgccaaggaagtttggacattgttctaaggtggtaaattgcaaaatcatggagagagcccagccaaaactttttgacagttttgcgagctggtggcatgaaagcaaaaaagagatgggagaggaagttcaacagccctggtggtgtacacatgttggaatatttgaaaggagaggaaataaatgagccctccaaaatgaacaccggattttgcgagatgtccacttcaagatctaggagatcaagcaaaaaagagagatacccagtttcttagtttcttagttgctggccttaggggctgctgtgggtttggttttggcctttgtccattgagtttatcaaacctcagcatgtagtgtgccttgtaaccacatttagtctttgctatctttcttctataatgcatcacggcagagctcctgcccttttctctaaagaagaattgatctcactgagaacaaagtcacttgtgacaatgattttcaactacagcctcttcaacaggctgcaactttgatgtgtaagaataatacccagggtacatacctaccataggccccttgaactggaaaaacattcctcagtttgtgatggtggtggatctttaggacactcatcatcttctcaaggtcctccttattgtctgaattctgcaaggagatgaaatggctgacatgatcaattttgcaactacagagatgagcatgtcctcttcgaatttgcgagaccaaatcaggaagaaattaatctaaccgaattcctgtaaacaaacatatcattaaagtagttggaatatagaaaggaaagagcagtgactatgatggaaccaaccgatggaaggcactgaaactacatatattgttgtacattaaattggtcatacacaggacatcaaagtcagaattcagaaacagaaagtagcttcttttgtgaactattctgtcacacacatgacgctagcagggtagcaatagtaactaactgaattatacatacccaaactagtaagaacagatacaatagcagttctccaagaatgaagacatccatgaaactacaatagtatgacatatgctcctttcacctaaactgtctgaataatcagtagtagctagaatctgtgaaggcatacccagccttctaaactatattgtcaaagcgtagacaatgtattctttctagaaaattttcccccagattaagatttgtgtctgtgtattctcagaggtagatcgtgttcctcttacgaaccatgcgtcgcggttttcgtttctcatacgtaactatgtagttacagtagggtggaatgcgagatctccagaccagcacatcaaacttatcttcgacaggaatatcacaacccagtagcatgtctcgtgatgtcagttttggtagctcaccatctgcagggccagcgaccctaacatcataaagcaggcaaccttgaacttgaccatccacaacggctatcctgctcatatcgacagggatatttctttcgaaaagatcgtcagggtgtagaccagaggaagtcaagtgcttccgtgcaagctctcttacgaataataagattctcttccagaattgagtgttaggattagctcttaatagttcaccatatatagttgcagaaagaaatgatccattcacctcagtagctagctgcatgaccagagatgctagtttcggatgttcatcaggatccatacttccaaaagcaagtgccttgaagtagtaccaaaactcttcttcggatggcctcttcaccctgatgggttgggttgtcccaaacttagcaatgtcctctgttgtacctatcactacaaccttaattccaataccgggcatattctgcaaatatgattggaattttgtccaagctgcctcatccacatcccaaatgaactcaataacaaacaaatatttcccttgagaagccttggagttaagcgagagctctccggtcttcagatcgtcttctttaaagaaaaatatatgggagaagcagttgcgcaccctctcatccaggcaagcatgttgcacaagagttttctttccaatccttggtgggccaataataggaagaatgctaacatacggatcatgaggatcattgcaaagcaagaaattgatgacttgctccttctcaatacggctgccaaacatacaattctctatgtatagatatgtactgtaaggctgacgtggtagacgagggtggctaccaaggagaatgacaaattccctcatatctgcaatcttagtttctaaaccatcaacaacatctttcaggtttgttctgctcctgctaccaaaggctattggtgtgtgttttcttatggcatcagcaaaacgaaagcgcttgcgagagttacaggctgacaaggcaaatgactgaatctcatgactcacctcatcttcgatgctttcttcttcagggggttggaacttgatcttgtcgagcacgtagtatccgaggtagaatccctcaataaatccctttagctgcaggagcattccttgatttgtgatgtggcgcccctctgcttcctcaacaacacagtgcatcctcagcaagatgcgttccagcctcctacgatcatcctccttacgtatatggtttctgtaattttgtgctaccgaagagatgaaccggctgataagatcacctgccacagcagaaatcataatctccatgctaaccagagctctgttggaggtcaaaatgggagtttgcaaagtgatcaggcttctagaggttacaaagaagtaggcaaagagaacaatacaagtctacaagaaattagtaacaagtactggaagcagttcacacgagatggctcttcctgagccagaattttctcttcaaaaagtaagacaatgcattttcaggtttacattaggcactaacagatatcattgtacgttgaattgttcgtatgaggacaccactgtcagaactcagaagcataaagtagtttcttttcaaatggtttttttcatgaatatagtgctagtcagagcagcaatagtaactgactgtttttaactatccaaattaataaaagcagatacaacggaacttttttttcaaaaatcaaacacttattagatacagacatagaggacagacacatataccagtttgacctgaactatctgaatagcttgcagtagtggtgagaattggtgaataggttatctgagagagagagagagagagagagagagagagaaagaattggtgaaaggcacatccagccttttgcagtatgaggtccgtcaattgtcaaagctgtaattccttcatttacgaaaaggtaaattagatatgatttaacagctatgttccttactttcctgtgaaatagacatgaatttacatgcattcaggtgtaaaatagtttgtgctcaaccttccaagaggaagatatttttcaatgtgcttacaaacagtaccatttgtagtgaggttcaaagtgcttacaccttgagtaaattccttaactttgtaacagagtaaatggtaataactccttaagttgttcaagccaccttatcaagaacgaaggaataatggaataatgcgtttaaatcctgatccagccaaagaagatgaacagagcgagatccaaagctccagaggtgtcgactcacctgggggcgcggcggcgattgaccggagcgaacactgaatccggcggcctccgatgagaatcccagggaacgccgagaaatgcagccaccgtgctcgcctccgtcaaaccaccttcttcctctccggccatccatctctctctacgttctccactgattttttttttacgccggtttcttcttgatccagcactctattaaaattctggggcgaccagtggaggaaacctcgccgccgccgccgcccggcgaccggcggcggcgggatgaagggaagcgagggctaaacgtacaaaaagcgccatctatagtaggataatttgtagaaatgatagggacctttccgcaaagctccggatcggtgccatagcgaattaacgatcgtaaaagggatcattttgtgtaattccatcaagaggggtatatttgtaaaactactgaggtaccattggtagacggtagtaagagcatccccggtagctcatataaatttcattctctatattcacatttagatggtcatctaaaaagattctcactccatatttttcttcgctccaacagatcatccatattacatccttcatatatattttaatgtatatttcaactaccatacatttacatttcctctcatcctctcttctattctattctactgctacttcgatgggggaggaagaggttgggcgacgggagctcgttgggcggaggaacagcggggagtcgccgggcggaggaggaccggtggcgcggtgctcaccgagcggaggaggcgcggcacgggcggtcggggcggaggagccgcggcatcggcggcggggtcgcggggggaggagccacggcaccggtggcggggtcatgggcggggagcggcgcgggcggtcggtcgctgagcggaggagccacggcatcggcggtggggtcgcggtgcagaggagccgcggcaccgtcgacagggtcgcgggcggtcgcggcgtggaggagttgagaagcggtggggacggccaggcggcgttggtccttcgagcggtgggggcggccgggcggcgtcggtccgaggagcggccgggcggagaggaggcgcggtcggaggagcagcggggcgacgcggtcagaggagcggcggcgcgggtggacactccggtgctctccccctccagatccaccacctctccgcctctactccggtatgcacttcctctttacctctactctcccgccggttcttgtccaaatggtgacgcgagtttgattgggaggtgagcagtttaggattgcgtgaggagagagacccgccatatttggcttgggaatggctcggtttggaggacctccaaaaatagcgtgtgcaatggaggctctgctggagcactgtttttctcctccatgcgccaaacactggatagatgactagatagaggagctgctggggatgctctaatatgaccggctcatcgtttgccttacatgaattcagcaaccgtcaaactttaaattttaaaacatatttttttctaacgcagttttttttcaccattggttttaagttactaagtacacatatataaatgttttactcctaataccgagctagctaatcgatggaatccttatagatatgtcaaaaaaaaatctatttacataggtcatatcattggattcaaatggactggactcttttagacaattagttatagacctacgcattgtaacgtctttttattcagtttagtggaaaggtttggatcgagtgggatgtttgttttttataagatggttagtttttcaggtgaaatttttttatgggaggaagagattttcaagtggaagtggaggacagatgggaccaaaggacaacatctccctttattaagagcgagatcaatagtacagcctactgacagtgataaatatcatctacatcagctatagtagacgtagcagctagtttttacaataattgattctaacatgtttcccaactctgaaagttcattaatttattttcattaatttattgcttttggctaactgcctcttttctctctttgccatgtttctctccaagactcccatctactgcaaacagaccaataaaatcttctttgtacccaattttgccttggggacatcaaggctgaccaacaacgctgtgctcataggccccatcgttctccactttattaagagcgagatcaatagttaatgccaaaatttaaattttaaaagttaattttgaagttttttcatcaaagtttatatttcaagattggtgtttaagtcgctaaaaacatatatataaaagttttacctacaaattattattattttgctaatacgccatatggcatattatctgtatttggccaaacgatgggggcaagcgagcagctcgacgattaatctaccaccgacttttctctctcttcatgttctctctcttccaaccctgctttaatctggtatggattttggtgcagcctactgactagacttattatagtagctctaagtagtggagacataggtatcctccatatctccgctacacatcaccaccactggccaccatggccaccgctgacttacctatatttggtgtcaacaatgtaaacatatattatgtttttagcatggatgataataaacgtgccataaggctaaagtggcaactttgatatgaaattaagttagttcacaatattatttcaatatacacattgtttacagtttatttacacgtgtaattgtgctttgtgttctctgtgcgataaattaatgatttgatcacggtacatatccttcctatgattattatcatttggataatacatgtagtgtgttcatgattcatgaacagatttgtgcaatagaatgacaaactttgttcacatcataaatttttaat

SEQ ID NO: 16683 - DNA, 36528 bp, Oryza sativa
aaatttaaacccaaaagataaataattttggttcttaatttttgacttaaactcttatatggatttaataaaaaaattcaaaaacttaaattttgtttttcaaattttacatcaaataattatgtcccattgattttgttgtaacttacagtacaatttttcacactgtgatttatgaagtaggtagcatgtaagtatgagaaaggggcaatatagttatttttgaaaaaaaaaaagtccaatagtcaactaatggaacgaaggtagaggagatcaagatgaaaactcgaggacacgtaggggataaggcagaacttacggatatgtagggaattttctctttactggccaaaagggccttcccgtaatctcatatatctctttacttgattaggccaaaagggccttcccataatctcatatatgagtgcatgcattttgttctacatgtttggttcatcttctaccaaagttttcttccatcaatccatcatcatcttccaccaaagtctcctccctccatcatctcccactaaagacttattgttagacatcctaccagcatgcatgtgagaagttttcatttttacgactttgtctagtagaatgaaagtgtttctttgtctaactatctccttatctgcaaatagaacaataaatgagtcagcaacatattttgtaaaccagcccagtcattcctggttatgtacattgaccacagcatgattgtcaaacaaggcatctggcatgatatatggagaatccagccagacattaaaaaagttgagtcactgtgagttggggtggaagagaaattacaagccacactaaccaccctacatgcaaattttgccagagaacaggagatgaaatggctgacatgatcacttttgcaactacagagatgagcatgtcctcttcgaatttgcgagaccaaaccaggaagaaatcaatctaaaggaatgtctgtaaacaaacatataattaaagtagttggaatatacaaaggaaggagcagtgactatgatggaaccaaccgatggaaggcactgaaactacagatattgttgtacattaaattggtcatacacaggacatcatggtcagaattcaggaacagaaagttagcttcttttgtgaactatattctgtcacacacatgacgctagtagggtagcaatagtaactaacagaattttacatacccaaactagtaaaaacagatacaatagcagttctctaagaaagaaggcatccgaacctacaatagcatcacatatactcctttcacctaaactgactaaataatcagtagtagctagaatctgtgaaaggcatacccagccttctaaactatattgtcgaagcgtagacaatgtaatttctttctagaaatttttcccccagattaagatttgtgtctgtctattctcagaggtagatcgtgttcctcttaccaaccatgcgtcgcggtttttgtttctcatacgtaactatgtagttacagtagggtggaatgcgagatctccagaccagcacatcaaacttatcttcaacaggaatatcaccacccagtagtatgtctcgtgacgtcagctttggtagctcaccttctgcagggccagccaccctaacatcataaaccatgaaatcttgaacttgaccatccacaacggctatcctgctcaaatcaacagggatatttctttcgaaaagatcctcagggtgtagaccagaggaagtcaagtgctttcgtgccagctctcttaagaataataagattctcttccagaattgagtgttaggattagctcttaatagttcaccaaacatagttgcaccaagaaatgatccattcatctcagtagatagctgcatggccagagatgctagttttggatgctcatcaggatccatacttccaaaagcaagtgccttgaagtagtaccaaaactcttcttcagatagcctcttcaccctgatgggttgggttgtcccaaacttagcaatgtcctctgttgtacctatcactacaaccttaattccagtaccgggcatattctgcaaatatgattggaattttgtccaagctgcctcatccacatcccaaatgaactcaataacaaacaaatatttcccttgagaagccttggagttaagcgagagctctccggtcttcagatcgtcttctttaaagaaaaatatatgggagaagcagtcgcgcaccctctcatccaggcaagcatgttgcacaagagtttttttcccaatcctttgagggccaataataggaagaatgctaacatatggatcatgaggatcattgcaaagcaagaaattgatgacttgctccttctcaatacggcgaccgaacatacagttatctatgtatagatatgtactgtaaggctggcgtggtagacgagggtggctaccaaggagaatgacaaattccctcatatctgcaatcttagtttctaaaccatcaacaacatctttcaggtttgttctgctcctgctaccaaaggctactggtgtgcgtttgcttatggcatcagcaaaacgaaagcgcttggcagagttacaggcagacaaggcaaatgactgaatctcatgactcacctcatattcggggggttggaacttgattttgtcgagcatgtagtatccgaggtagaatccctcaacaagtccctttagctgcaggatcattccttgatttgtgatatggcgtccccctgcttcctcaacaacagagtgcatcctcagcaagatgcgttccagcctcctacgatcatcctccttatgtatatggtttctgtaattttgtgttaccgaagagatgaaccggctgataagatcagttgccacagcagaaatcagaatctccatgctcaccagagctctgcttggaagcaaatggtcaaaatgggagtttgcaaagtgacccaggcttctagaatctagaaggttacaaagaagtaggcaaagagaccaagacaagtctacaagaaaatagtaacaggtactggaagcatttaacacgagatggctcttcctgagccagaattttctcttccaaaagtaagacaaagaaagaactcggaactataaagtatttagtttcttttcaaaaggttcctttcatgaatatggtactagacagagcagcaatagtaactgtctaactgactgctttcaaatattcaaattaacaagagcagatacaaaagaatatgttttcaaaagaaacacttattctatatagagatggtgtagagacatataccagtttgacatgaatataacatgaaaaaaagtcaaaatgacttataatatgaaatggaggtagtagcttgcagtagttgtgagaattggacaattggtgaatagatcacagccttttgatgtatgaggtcaattgtcaaagctgtaattccttcctttacgaagaggtaattagatatgatttaacagctatgttcctttctttcctttgaaatagacatgaatttacatgcattcaggtgtaaaatagtttgtgctcagccttccaagaggaagatattttcaatgtgcttacaaacagtaccatttgtagtgaggttgacagtgtttacaccccaggtaaattccttgtaacatagtaagtggcaactcactaagttgttctcgccgccttatcaagagcgaaggactaatggaatgatgggtttaaatcatttaattaagcaaaagtggctactataccatactactatccagccgaagaagatgaacattgccaatagaaaaaaaaactgacaaatcctgactcaattgtatactttctagagggattagttcaagcagattaaaccataatgaccagcatgatcgtagccaaagaagatgaacattgccaatcagattagttgtagatctcgcacgaaactgtacacaagctatctatcgatactatcaccagattagttgcaaaatcccgatgcatgcacacagccagatccaaagctctaaaggtgtcgactcaccggggcgcgcggcggcgagtgaccggagcaaacctcgaatccggtggcctccgacgagaatcccaggccacgcacacctccgtcaaaccaccttcctctctatgttttcctctgatatttttttacgccgatttcctcttgttccagcgctctattgaaattctggggcggccaatggcgaaaacctcacctccgcctccgcctccgccgccgccgccgcccgcgctgcatcccggcgaccgaccggaggcggcggcggcgggatgatttgcaaaaacggtagggaccttttcgcaaaactccgtttcgctgccattgtgattgtagaaaggggtcattttgtgtaattccatccattccataggggtatatttataaaaatactgatagctaccagtagcgaactagcgatcacacattgggttcaaatgggctgagctccttcagacgatatgggccgtccgccgtcgttttcttctgtttgcaccatatcgccgacaccggttgccgtctacttcctccatcccataaaaaactaacttaatataagggattttgagtttttcttacaatttttgatcactcgtcttatttaaacttttttaaaattattatttattttatttgtgacttactttattatctacagtattttaaccacaactttttgttttttatatttgcaaaaaaaatttaaataagacgagtggtcaaacgttgcaatcaaaaactcaaaatcccttatattgtggaacggagggagtatgacacatcctattactacgaatttatgacactaaagacatttttgttagatattctacagcatgtgaattgttgatctccaattatccatcatcttcacttaccatcaaagaaatcgtttttacgacttggtctagtagaatgaaagtgtttctgactatctccttatctgcaaatggaataataaatgagtaatcaacatattttataaagaataaattacacccacgatacaggaactttgataggtgggtgtgatctagtgtaagaacttgaaaaataagtagactggtacatgaatttggcaatcatggaattttagtttaaaaacactgatacatacctttgattaatcctaatattttaaggttaactgctaaatcgttggctcatggattcaattttgtgttttgccattttcgtcacccgagacaatgaatatattgattagtcgaatcgctcgaaaattatattaattagtttgcatgcagttacttttgatatcatatattttttagtttcaaatcaatagattattttattattataactaagcaattcaaagcaatacataatacatgtagattcttgtggagatagcttgagtggctggttttttatatagcataaaaagtatggtatggaatattgatattttaaccaaaatacacgcactagccaagttattgcacctatatgcttattttttaagttcttgcattagactatactctgctaccaagtttatgtactgtagacacagtttactcttttataaaccagtctagtcatccattgggtttactaatcaacttgtttatgatgaattattcctggctttgtacattgaatacagcgtgattgtcaaacaagacatctggcatgatatggtgaatcctgcgagacaataaaaaaaagttgatcagtgtggaagagaacttagaagccacaccctaaccatccttcctacaaattttgccgtagaaacaggtaaaaggaaacagtcaatgatttcatcttcacaccacaaatttgacacctgagacctttccaacctctgttcagcagaacaagctgaggaaatttttatttttcataaggatttgaactccacacaaattcttgtgtggaaaaagagtattgccagctttcagaatctggtataaaatcccaccttttggccaacccggaaaaaaataatctagtaaaagcttggctttgtttaattcagcgcaaagtttggattttggttgaaattggagatgatgtgactgaaaagttgtgtgtatgacaggttgatgtgatgaaaaaggactgaagtttggatccaaattttggatctaaacacagcccttctcaccctaaagaattcgacctctcccaggtttcaaagttttttttttctcaaaagcgaaagaaggctgcgcttcattttattaaggagaatttacacaggagataccgaaaggactgtcccccccaaacatgtcacacaggagagactgaaatggttacaaagtgactaaagtgaggattcctcttcttctgacaatttgtatgagaaaaaagatttgatcaaatcaatcgacattttcctggtttccctacaaaagagttcgtctaagcttcataggtccaaaaattactattcatcacctctgtcacctaggtctttttattaaaagtcatgttatataaccaatggaagttatcaggcatcagcagtagtttgcctccctatccatttatccacccagaacgaagttctttaaccattgccaactgttcttaccggccaccagaaaaaaaaatagaaccatgcaaaaagaaaaaggaaacaaataaacaatcatttgatacattctgtgaggaaaaattcagacaacccaagcaaaaaaaaaaaaaatcctttcaacatgtcaagctttggattgaaataaaaggcatttaaaaaaaatcctttcaacatgtcaagctttggattgaaataaaaggcatttatcttcagcctgacaatgatgacaatgtagtgtgttgtggttgtggatgtccgaatattccacacagtcagtctaccttgtggaattccaaggtagcctcataactctatttcgaagacccaaactgtaaacaaatgcagattcttcactgggattgcaaatcagaacaagatcttaacagccgataataatttggctacgcgagcaacggagcaaggccacaccatccgatcatctgcaacaaacatgcaagactgccatgcatcttcttcaccctaatgatcaggaagtttgggaccctgttttgaggtgagtaaattgcaaaaacatggataaaatccgaccaaaacttgttgatagttttacaagctggtggcagcatgtcctagcataccaaaaagagatgaagaggaagtttaatagcctggtaatttacaaatattggaaggagaggaatagaagaatcttccaaaaagaaatctggatttctcaacatccaagaggagatcgagcagcatgaaagactaaaccaagaagaaattaatctaaacgaatgtctgtaaaaaaaaacatattagtaaggtagttgaagtatataaagtcagctgtgactacgatggaactgatgaaaggggctgaaactaattgagaagaacactaaattggccatacatagggcatcatagtcagaacattgaagtacaatattttgaaaacatttctgtcacacacatatataatactagtcagatagcaataggaattaactgcatcttgcatatccaaactgataagagaagaaacagagttttctttagaaaagaaaaacgtttatgaccaatacatgtgctacttagacctgaactgtttgaacaatttcaatagtagttcgaatctgtcaatggcatagacagcctttcgaactataccatcgacaatataattaattccttcgtagaaagtttccatcagcttaagggttatgcttatatttctctcaatgcttgatggttcctcctgccaaccttgtaccgtcgtttttgtttctcataagtaactatgtagttagagtacggtgggatgcgggatttccataccagcacatcaaacttgtcttcagcaggaatatcagcacccagtttcaaatcttgtgatgttagttttggtagctcacttccagggccagccaccctaacatcgtaaaccaggcagccttgaacttgagcacccacaaaggctaccctggtgaaatcaagaggggcatttctttcaagaagatcttcagggtgtacaccaaaggaagacaagtgcttttgtgccacctctcttatgcataataacatgctctgccagaactgggtgctgggattagctcttaatagtccacctactacggtcgcaccaagaaatcctcccctcatctcagtagccaactgcatacccagagatgctagctttggatgctcatcagggtccatacttccaaaggcaagcgccttgaagtagtaccagtactcttcttcagacagcctcttcagcctgatgggttgggctgtcccaaacttaagaatgtcctctgttgtacctatcactacaaccttaattccagtaccgggcatattctgcaaatatgattgaaattttgtccaagctgcctcatccacatcccaaatgaactcaataacaaacaaatatttcccttgagaagccttggagttaagcgagagctctccggtcttcagattgtcttctttaaagaaaaatatatgggagaagcagttgcgcaccctctcatccaggcaagcatgttgcacaaaagtttttttcccaatcctttgagggccaataataggaagaatgctaacatatggatcatgaggatcattgcaaagcaagaaattgatgacttgctccttctcaatacggcgaccaaacatacagttatctatgtatagatatgtactgtaaggctgacgtggtagacgagtctggctaccaaggagaatgacaaattccctcatatctgcaatcttagtttctaaaccatcaacaacatctttcaggtttgttttgctcttgctaccaaaggctactggtgtgcgttttcttatggcatcagcaaaacgaaagcgcttgcgagagttacaggcagacaaggcaaatgactgaatctcatgactcacctcatcttcgatgctctcttcttcggagggttggaacttgatcttgtcgagcatgtagtatccgaggtagaatccctcaataagtccctttagctgcaggagcattccttgatttgtgatatggcgcctttctgcttcctcaacaacagagtgcatcctcagcaagatgcgctccagccttctacgatcatcctccttacaagtatggttgttgtaattttgcgctaaagaagagatgaaccggccgataagatcacttgccacagcagaaaccagaaactccatgcttaccaagctaaagctcttcttgagttcttgggagcaagtagtcaaaatgggacttttcagagcgagagaagatcatagaggtgaaaaagaagctagctataagagtcaatgacaactcaacaaaaaaatagtaacaagtgctgaaggcagttcacgcaagctggctctatctgaaccagaattttctcttcaaaaataaagactaagcatttccagatttgcatgtttatacttttcattactggctataaagcacatgccgattagtaacaattaggaagtatagtatcatcacttatgacaaatcataatatatatatatatatatatatatatatatataaacaaaacacatacaaactatccatatttaatttcagcatatttcttaaatataccatattgcaaaagtatgctgcatgtaaaataaaaccaaacaaattttgctcatcaaatctactaatttaaaagttactggcgatcaaagtgaaaacaataccagtcaatgttgactagtagttgggagcagagtatatgttcctttgtctatctgactatctccttgtctgcaaatagaataatgagtgagtcagcagcacatcatataaaccgttcagtgcgtttacaaatcaacttggttctgaaaccctggtcaaaaaaaaaaaaaaaaacttggttctgaaacaagcattattcctggttgtgtgcattgaccacagcatggttgtcactccaaatctccaatataaaaaaggtatctggcatgatttggagaagaattcagccaagcattaaaaaagttgatcactatgagtaggggtggaagagatattacaaaccaccctccacacaaattctgccaaagaacaggtaaagaagacagtcaatgatttcatctgtcccataaatttgacatctttgtcacctttccaaccagtactaagcagaacaacgagaggaaaattttgatcaatccacaatttctgacaagtttagatgagaacaaagatctatcaaatcaatccacattttctgggtttctcctacaagagttcttctaagccttgttcttccaaaagttacaattcatcacctctgccatttagatctttttgttagaagttatcttatataacctaggaaagctatcaggcatcagcaggagtttgcttccgtatccatttatccacccagaacaaagttctttacctgttgcctattgttcttaccagctatcagaaaaaaatagagccatgcaaaaagaactagaaaataatatttggatgcattctgtgaggagaattcacataacccagcaagtgtgtgaacaattgtcaagatttggattgaaatacaaagcatttatcttcagcctgacgatgaggcctatgtagtatgttgtggatgtccaatgggcaatattccacaaaatcagtctaccttgtggaattccaaggtagactcagaagtcttacttggattgcaaatcaaaacatgatcttgaaaagccgataatttggacaactgcaacttggattgcaaccaacatgcatggtagggccactgttttaaggtgagtcaattgcaacatcatggagatagcccagtccgatcttttttgacaatatcgtgagcttggtggcatgaagcatttcttagaggaaattcaaaggcctggtaacttacacatgttggaatatttggaaggagagaagtagaagagtcttccaaaatgaatgctggattttgcaggatggcctcttcaagatcaaaaaggatatcaagccacaacagatatcagaccaggaagaaattaatctaaacgattgtccataaaaaacatatcaatagataattcaaatatagaaaagaaatcagcagctgtgactatgatggaattgatgaaagcaactgaaactaattcagcagtaacagacattgttgtacaataaattggttgtacacaggacatcatactctcaaagtagtttcttttgaaaatgtttccgtcacacacataatagttagggtggcaataataattaactgtattttacatatccaaactaataagagcagatacaacagcactttcttttaaaaaaggaaacatctatgaacacacagtagcggcacatgctacttcgacctgaactgttggaataatttcagttgtagttagaatctgtcaatgcatacccagccttttaaacagtactgtccacatcttaattccttggcagattttttcctgttaaattaagatttctgcttatattttctcaatgttagatggtattcctcttgccaatcgtgtgttgtggtttccttttctcaaacgtaactatgtaattacaatagggtgaaatgttagatctccataccagcgcataaaacttatcttcaacaggaatatcaccacccagtagcatgtctcatgacgtcagctttggtagctgaccttctgcaggggaagccaccctaacatcataaactaggaaaccttgaacttgaccatccacaaaggctatcctgctgaaatcaactggggtatttctttcgaaaagatagtcagggtgtacaccagaggaagacaagtgcttctgtgccacctgcccacctctcttacgaataataagattctctgccagaatcgagtgttaggattagttcttaatagttcgccatataaagttgcaccaagaaatgatacattcatctcagtagctagcttcttatgaaccctcaacattctactcaatcaacaaccagcacaaggggaaaaccaacaactccagctcaatttctccaatacttggggtcacaagtagcagaatgggaacagggattggggatgagaattctaggcaaggaattagagaaagtagacttggaatttagagaataaagagttggagaatcaggaagagcatgaggaggaaggaggctgcagccatcagattttctgtaaattcatcgacgcttcctgctgtgacgattggtcctttttgtagtggcaagcttgacaatagattgggcctaataggccttcgctttacctgcattccaacctggcccacgtgcgtgacatagctgcatggccagagatgctagttttggatgctcatcaggatccataattccaaaggcaagcgccttgaagtagtaccagtcgtcttcctcagacagcctcttcaccctaatgggttgggttgtcccaaacttaggaacatcctctgttctaccaatgactacaacctaattccagtactggccatattctgcaaatatgattggaattttgtccaagctgcctcatccacatcccaacttaataacaaataaatacttcccttgagaagccttggagttaagcaagagctctccaatctttagatcatcttctttgatgaaaaatatatgggagaagcagttgcgcaccctctcatcctggcaagcatgttgcacaagagttttctttcccatcctctgtgggccgataatcttagcaaagcaagaagttgatgacttatctttgtcaatactgcgaccaaacatacatttatccgtaaatagatatgtgctataaggctgacgaggtaaacgagggtagctgccaaggagcatgacaaattctctcatatctgtgatcttagtttctaaacaatcaaccatctttcaggtttgttgtgctcctgctaccaaaggctactggtatgtgttttcttatggcatctgcaaaacgaaagcgcttggcagaatacaggtagacaagggaaatgactgaatatcatgactcacctcatctttgatgctctcttcttcagggggttggaacttgatattgtcaagcatgtagtatccgaggtagaatccctcagtaagtccctttagctgtaggagcattccttgatttgtgatgtggcatccatctgcttcctcgacaacagagtgcattcttagcaagacgcgttccagccgtttatgatcctcctccttacatggttgctgtaattttgtgctaccgaagagatgaaccagctgataagatcacctgccatagctgaaatcataatctccatactaaaccgagctctgcttgggaacaagtggtcaaaatgggagtttgcaaagtgagccaggcttctagaggtacaaagaagtaggcaaagagaccaagacaagtatacaagaaattagtaacaagtccaagtccaggaagcagttcacacgagatggttcatcttgaaccagactctttctcttcaaaatgtaacacaaaacatttccacatactttcctatgtagtagtagacatgaatttacatgcatttaagtaaaatagtttgtgctcttccaagaggaagatattttcaatgtgcttacaaactgtaagcatttgtagtaaggttgttctagccgccttatcaagaacgaaggaataacataatgatggaattttaatcattcgattagtcaaaagtgctactataccaatactactatccagccaagaaagatgaacattgccattagccatgatcttaatccagtgtttgcgcgtaaaggcattttcctagcacggcattgcacacaagagcgagatatagagctccaaggcatcaactcaccggggcgcgcggcgggcgagtgaccggagcgaaccttgaatccggcggcctccgacgggaatcccagggaacgccgagaaatccaaccaccgcgcacgcctcctgccaaccaccttcctctccggctatccatctcctcctccgccgccgccaccgccgccaccagctgcctgcaacctcactgctcgatctctctctctacgttttcctctgattttttacgacgatttcctcttgacctagcactctattgaaattctccggtggccattggatgaaagtgaaacttcgcctccggcgccgccgcctgcgctgcatcccggcgaccggcggcggcgggatgacggttgacgggggagcggagcggggcggggccaaatgcagcttcggaaatttgtacaaagtgtaggggccttttccgcaaagctccgataggggccattttgtaaaattccatccgcatggaggggtatgtatgtaaattatcatttgtaaatggtaaagaaatccattttaaaaaatcacagggtaacaagagtacctttagagcaggtacaataggtggctataagccagctataaacatattttaaagagataaatgaagagagagaagagcagcgggctacagatttgtagccagctgcagcacggactccaagacgtaatgtgtgtatgacaggtgggaccaggtattaatagtatagtaagcaactattgtatgaattggctattacattggctatagacgatttggagctagtagtgggctgcactattgaccttgctcttgtacagtatgttgtctacatagggggttttgaactttatgccactctcgctctcctacaccgataatgttttatcaaataccaccttcctaaaaatttttgattatttaccatctaaatccactaaattatttttattgtgccattgttgtgaactaagtcaacaaaccaaaggataaatgaccattgcccttatcttccgtgaaaagagattgaggaggagcttagcctctgggtggaaatggttgccctcccgtcatagccacttcgaacgagttaaagccacactagcaaccccctcccttcttcacccctccgaacgagctagagatggtgtatcctctgtgactctgtcgtccttgccgcaccagaggtaatcgaggatgagccacgtctagcttaaaatgtcgatctggacgttgaccgccacgctgccaactgatatgcttttggttgcaacactgtgccactttgaaggcgccatgcccgtttgcgacatcgcgttgccacccaatatagagtcatcggagctcagttcataaccactggccaacatgtgacgacgtcgttccttcgtggcttctcctccatgaattgggaagaggaagaagataagggcacctaggtcatttttatccattctgcttagtttgctggctaaaatggcaaatttgaaacagcttagtcatcttaggtggcaaataatcaaagtcttttggaggagtgacatttgagaacatgccatccgggagagtggcataaattttaaaaacccgtatgtataacactagtactagatcaacttgtattcacttagatgtgatacctaaccttatgtttcatgttgacgttaacattatgtcactaaaatagttcgatttgagcttcgtatatcggcaaaacctaacagatataacatgttgtacccctcacatttaaggagtgggcaaggaagtcaccaaacctccttgtcattagactcgtcacacactcataactcctcatcggcatgagcattggctctctccttcaattgagccccatccctcttacaattgttgttgcctatatcagaagtactatgtcaccagattcgacttctatttcttttctttttgtcattgccgactgatgcttaatcacattgttgcgccccttcttatcctcttcttgatgctaatttaccgtctttcttgcaattttttccatcgctgtcctaactcaatatcgagttcccaaccatatacaatgtctagccaacatacatgggggctacaatgacggacattgagcttgctacttacaaatactactttttttctctttcttttttcttttcttcgttttctttcacttattcatgattatatcaaggtatatcaaacaaagaaaattagacggaatttcagttcttctcttacgaacttaaagttttttttttttgacaatacaactcaaagttggtttatctaatgacattcgtaattatactccaatataatattatccatatcatcagtgtggcacctctactcggattgaggtgttttcaggcttttagccgtccgtttcacagtgaacgaccgagatcgatcgctacagtgattcgtgaattgtaattatacacaattgtaactacgagattccagtcaaaaaaattgtaagctataatgaaaaaaaaatgcaaatcactgttttctattgtaacaacaaactcattttactatgcgtctctacctttttcttctacccgaccctccacgaagagatgggttgggaacccatgagaaagaacacagccttatacctatccaatacttgtcgccctccgcctagctccaacatatattcatatgctctttaacttattaataactcgtatccaaaaattaaatttaaaatttctattttgagcgttgattttaaattcgaatttgattttaattctaggggtagtatatttgccggctttgaattcccgaatcccggccggactccgccaccaccgcaatgccgcgccgctccgcctcccggtacgccgcctactgggccgccgacgcgctcgccggcgacgacgccctcgacttctccctcaccaagggtagggttcatcacgccggggtccccctcctcctcctccgcgctcgcctcctcaatttcttcctcctctcaccacctagggttgttgcgcagcgctggtgggcgtctcgccggattccctcacgggcgcccccgaggccgtgcgggagcgcgtcgcgctgcggtgcctccaggaggtcgtctccctcgcctccgatggcgactacgaggccacgccgacggccggaggggtgcttagtgtggacgcctcccgctcctgcgaggactcgctgcttcaactcatccgagaggtattcagcgcgcacgatacgcgaccatgcgcactcttgtggctctgatttctgaccttccttgtttcatcaagtattggttgatttgattactggaggttggttgcgatttgttcatcggttcatgtagtagacaagcgatccccattccctgttggtcggtacattgctggagatagttattggtagcttgtttatggtgtcggatgcgattgtgctggtgtggggttagtcatttccagctttggttatgtctttttttttttcagataaacaaggttgacattaataaatacctgggattttgtgttaatttccttcttgattcaagaatcaagagatatactacaatcggaacttgaataagtcatacaaacacatgcgtcatgattgggttggtagattgtcttgcttcaatttcgtaatggcaagagtacatatcctttctgattacacctatacaatgcttcttgttgtgtaagcagtaaatatcaatggacatagttggaattatggaaaagatattttctgaatttacttctcaatagtgcatcgatgatttatatgtcacattttccagcaagtacagtttataatgggctttagtacgttttttttttgtacaaaaatacgtgatccttcaatttgacgtattccacttcaatatttgttgggccctctaaccaatcacttaatccctgatccaatgtttcagatcaatactagatcttgttattaatttttttgtttgcgtattctgttgatatgaaacatgatgtttttcttgtaacatttccatctgttgtgttccctatggataaattctgcttaaaaggcaccttgtgccctctacccattgtgttgattactgatccagtgttctaattgtacaatattgctagcctagaccctgctatacaatgagctcatgcattccagtgatatgaaacattgacattcctcttttaacttccaatcttctgtgttcccacctatatttgcctatatctagagtctaataaaatacctctaggttaattcccatcagactgtaagtctttaagggttgagatactataagactatatccctatgaagaatttatgcttaatctccaggctctaaccaatgagttgtttcactgctacatgttctaattgcgcaacgttgctaggcaagatcagttattttctgagctcatgcattctggtgatatgaacataatatttcctctaccttcactctagttattgttgcaagttatatatgcttattattatgtctcaaaagataattgttgcatcaccttgcatatggactccataaatgctaatatttgtacagggacaagggaatgccatcgtgccatgttaaatgttatttctcacatgattatgtgtggcactatggtgcatcaccttttgagatgatctccatgaatgcgttaatttgtgtagtgaagaggcgatgctgtgttaaatatgtttattcattcagttttgaagctagtgtgctgcaatgtgcatattataaagtccttcctgatgtccagctaatttcaatgtttacataatgtaaaattttcagattggtagctcaggaagcttggagaaggttatgcttctgccctttagtcaagatgtccagaagtttatatgtataaagagacctacattacctgaaacttcttttgaactggtatgttaaaatgcgacatttcagaactgaaaaaaaggacttcttttgacatattgttgtgctgcttgtttgtgttcagctcagagaagtttacccagagatcacacctgtggtcctaccatcgccagtggagcagaatggcaatgatcaacatgacaatgtcagccatgatcttgaaaatacagagaagactgggttcaatacagatggcgctcagcttcagcaagatgatctggcaaatttagtcaacgaaagtaacacaggaaatcttcagaaggatgcaatggcaactcctgattttcaccaaccatgtacatcagaaaataggtgttttgatcagccacaagaagattcaattaatgcagttggtgtcaacatcaggtctccaaaagacagtccaactaatgtagatagacacatacaagttgcagctgagccttctttagctacttctgcagatttgctgggaagtaatacaggaacaatttctgagcaggacatgatagatgatacaaccatggttcaatcgcaatctcaaggggtcaaaaatcctaatacacttcattataataatggagatgaaccacttgttgccagcattcagtcaccaaaggattccatccatgaaggactgaccatacaggcaactgtttctccagcttttgacagaagcaatgatgctttaccagcaagtacatctgaaataagccagttgcctgagtttattactgcaagggatacagtaatgaattcagagccacgtatcaacaaatctcatccaaattccccgaaacatgacactgttgataaagcaaatcaagatgtggattatggcagtgttggtattcagaaagctgctgctttcctatctgaagatcgcaatggggctactcaaggagagaaatctgaaattaaagatccaccagaaaatactgcagaacatacaaaaatgtttgaacaagaaaatagtgtcgaggctcagttggaagtcggttgttccgacaaagttaatcaagatatacaggatgatggcaacatcatgacaaagaatatggtctgtgatgggctgaatgtgcagactgctccggaacctcatagctgcagaatggccttgcataacaaaaatttggtggccaaccatttgtccgagcagaatattggaaggaacacaactgctgttgagaaagattgctgcagtattccaacctctcctcaggttgttaatgacacaagagtgaagcaaccttcaaacaagagaaccatggggaatactgtggtagaaacatcgcatgtgcattcttcagatgatagtctcagtggcttcgcagccaccggtcttctgtcaatggctgacaaaataccattctgtactcaggatcaagatgccaacggtcctgttgagggcttgtcagaacaagatttgtgcataaagtgtggtaaagatggccagttgttgaaatgcagcagctgcttgttagcggctcatgatacatgttttggttcattagcgacattggatgattctggccagttgtattgtcctgtatgcttctatactaaagcaactgaagcatatcaaaaggcaaagaaaacgtattctgaagcaaggaaaaacctatcagctttccttggtagaaagcaattagctgagcaacatcagcaagctgcagtggggcaaagagctgccaacaacgaggatcatttgaatgggtgtaacgatgcatctaaaaggaaagataatcatcaatctgaaggaaataacctttctcatagggatgaagaccctacccggaagaggaagaagcagaagacaaatgctactagtgatgcttgcgctcaggaagtagtcactgaaaaggtaccagttgttcagaattctgatgttgcacccatgaataagcattctgtactccagaataacagaaaacaagctcaggttgcagagcacgagcagccagaggaaaatgaagaagctagtggagaatctggtaatgacaattcattgcacaaaacaacacattcatctcagaccaaatgcagtcctgctgtaaatcagaatgttgacgctgacaaagaaaatggccttgcaagttctcaacagtcagaagattctgatgaaattgaagctacatcttctaatgactctaccaagaaatcatcgcctccttggcgcaagttgagacaccgcaaagcaatatatcaggataaggatacagcaatgccaagtaattctaagaaagtacttgggaaccgtgatcaacatatggcttcaccatcaaggaaaaggaactatgcatgtccacccaagcgttagtaagtgttattaataactaataagcttcataagcacttctttctcctgttgtactcccatttactgcagtctgcacatagccaaaagcatagtaaacataatttatatgggcacaaaaatgtttgagttgtggttaattttgaaccaaatgacattgaacactctgtctgatttatacatatgacaaataaaactgcactatgagagagttggtgggatagaacattaagttttagtgctctcgcaagttacaacacagtttccatgaatattcatagttcattgtcttagactgatagacaacatcatgcatcagcccatatggtttaaaaggccattagctttatcatgtaataatactgtatgatggaaagcaaatttgtaggaatcattaatacctagaattcataggagtgtgagctcatgaagttatatttacgatagtgaaatcaggctgtacttacatatggtcctgacataggtaatgcacggtattctctgttgcgtgaaaatgcaagtatttacaacaaaaatggaaccatcaacgggaatttcgactcattttccttataggacttcggtgtttgctagaatggatacctattcagatgcttcatttgttgtgattttttttttcactggaactctaagagtgtcgtacatggtagtaccaagaatttaagcatgtcttttcttgcagctctaaccctattgtaccggctggaaggcgcacaaagctctgttggacagaaaaggaggagataacgttgagggtgagtgcacctgatctgaaaaagttgttaccggcactgatgaatcttgcaccatcttctgttgcctagctagtaatgtgcatggatgcacctcttgtatacttacacttctctcgtgttctattcaggaagcaatggcaaaatttaccccaagggacaatggcccaattccatgggtccagatactggagcacggtagggacgtgttccacaggacacgcctcccatccgacctgagggtcaaatggaggaacatgaagaagaaatcaggctcatgacagtcttaacaacctactagtgcaggctgtgcagcttttgttctgtgtattctaaccacttactcttagagcccattgtgtgtgtcatcaccatcttgtaaggttgtaaattctcgttttcgagaaaaaaaaagtaaggttgtaaattctccttgatgtgtagaacacttcaattttatcgttctttcttggtatgtagaacagttcagtgaacttagtttgatgtcccgagttcaacacatctattttctgcagatggctcccttctgttaaatgttaatgaaggcgaataggtgcaatgcagaagtgaagatggaaatttttgtgttcatatggacaaaatgttcaggacaaatgatcaatagggagaacagcaatgttcagacagttaagagagagagaggggtggggggagggatgtttgatgtttaactacaatcacaaatttacaaaggctcaatgatggacagggtccaaaacgagacggcgatctaggcctacacaaggataagagccagcaccaaatatatgttatttatttgatcgaagcaaatatcagactattacataatatattagagaatttcacggactaatttgtaaaattagtggttgtgatactgtgctttttgttaaacaactgtatcattcatacatcagctatattttgtatggtacagtctgagctgctcctagtagggagctagcatttttaaactcgaccatagttataacttatcataaggagtttataaattttaatttcatacaaaattcacagagtgatcagttcaatcaaaagaattatgtgaagcttgtcacttgtaaccctgcttccactacaaaactattttgagttcctagagtcaatatcatgtgcgggaaaactgtttatagttcctagagtctgctcacaatagtgcaccagaatctccacactatcagataactccgcattctgttacggttagtacccaatggctttagctttctccaacaaattctccaaaagttgatagaaccaactcagttgctgaaggatgagctctatcgttagctctgaagaaatctttgatcgtaatacagcagcaatccctaagaatcccagcatcttcatgtttcatcagttttcgtactcttgccacattctgtcttctttgtggaaatgtgcacgttcaacagcaggatggatataagtttcaatcccttttggcttgaactcaagcagcttgtcagcagcatagaaggcaagtacaacaattccatgactcccgcatccagcagccaaacttgaccagatgaccttatttggctcttgggcaacaaaacaaaaactaggacaacaaatgaaagaaaactagtaaaaaatccgtggcagtaagcaaaatagttcatacaagtcaacaagaaattagtactaacaaactggagttttcaaagtgagaggggatcattgaggtaacaaatttgtaaatatttcttaaatacaccatattaataaagtatgttgcatgtaaaatataaccatatacaacttttgttcatcaaaatgtactaatttaaaagtgattggtgatcaaaccaaaaataataccaatcaacatcgacaagtatttgggagcagagtataaagtttgttgggcttttgggagcagagtataaagtttgttgggcttgtgtgtggagttaacagtgtttgtatgtgtttcagcccagttggcacatataaaaaggatgtatgctcagaggagaatagacaaaggatctagagagttccatataaatttcccaaacaccacatggtattagaataacagacctctcaaatcatttttccctaaggagatatagtagaccattaacaaacttatcttcttgactacaaagtcatacaacaacacaaagagaaaatgcccataaaagcaccagaatctcctctggtttcacacaggaatccaaacagacaccgagatcaagggcctagatttccagcacaaagcaagccttcccttctcacacacaaccccaaacaccctgttgaacagcccaactagcatcctggcctgagctatgttgcaagcactcaactcacaagccataaacccttccaaaacctcagaagcattggcctcaactctcactgacccatacttcaccacaaaatcctgtatccttggccccagcaactccatctccacaagtctcaggcatggttcataactactaccaatgaagcaactcgccattgactcgaacaccgtggtgaagtgatgcaatgcctcgaagaagaactcgacaaaggaggcactagatggagatacccctcttccaattctaactaggtcctcttctatggtgaccactagcttaggctgtagcttcttgacacagacaagcagtaaactctgcaatgtgcttagtgacttgtaatacatacttgttgtatcacatgagacaatcactgagcctttacagtcctcgaagaaggcatgcagttcatcctcattgtgaacacagatggaattgtattgaaatggaagttccaaagagtcggcaaactccgataacagccgtacaactgtgtcatgagtgctagcgtgacagtcagcatatgttgtgatagctgttagtctgaaggacttaccgccacagcgagcaaggtccgacatgagtgatgaccactggatgccctcgccgatgttcaagtcgacgacatggacatccatgtcaccaatgatggcatctaggatggcctgattggtagtgaagtgtgcaaacttaacaaatggtgatagctcttgtatgatctggtgcaccaacatgttaccagatggaagtggctctggctgataacacccagtggatgcactggacatccgggaacgcagaccttggtcaaagtggtatgccaatcgatcgaaagaactggctgctccattttcaggtatcccagacaggaagtcatcaagcctcgagaatgctactgatgcaaggattgaatctcctgcctcgaccgcctctgcaccagcaaggaggaggtcgcttaaactgtcctcctccaagagctcctcttggattgctgccaagttgacactctcttggccaaaaattctatcatcacaattaatagacacatcaacatcaggagcatcatgttgatgcaactcattagaatctagcaccatggtgtcaagtaaatcaaggtcctcttgttgatcagaacaaggatcaacatggagagctgcttgagaagaccatatgaaatacccactctcttcgtgtgcagggaaggagagaagaggggaacaaggatatgacatagtctccattcagttgttgtctaccataacaagttgcctttgtctgtgtgcttcagcatggacaattggacatatatatacacaatgaggaggcaaggggaatggataaacgtagagaagaaaagacagagtgatgggtgagccttcaaggccaatgcaagctaaaatgtcttggtctcagatcccataataacatggatcaagctgaaggaagatataaaacgacaagtatacggcatgcattgtcattttttgttggcctagcagatgaagcagaacgaccagagaatgcactgaaggtatattccaagagtgcttctttctgcgtgtcagcatctattcagttattggactatatgcatataaaaagaataccatgtggtgttgcccacttgccctgaagtacctatagcttgtagtcatacatcaataagccaatgacaatgaaaaaaaatgcaaatataaactacatgcttggaggaaaaacatatgtttgatctttaatttggtggacaataactcaattcctacatatcttggttgtgtatgaagagtccgtttcagtctgatcagaacaatgttaagatttcaactttattatgaccagcaaaagcgcagttagttttcatttgctaatgtggttaattttattaatgctaaaaaaaacatgacatagacttgcttccaagctcaattcagtcataaagcgctgttataaggtggtactatattactgtcagattcctaatgtagtcaatggactaatggagttgtgctagttctgccaaaacattaataatttattagatgatagagtggagttgaaagaggacaatacagattgtttcaagtagtgaagttgttgcaaagcaaacacagaaaacatgtgtgggtcaagcatatttcttggttttaagctacctattgctgctatctgaacattttttagagttggttccagaagatggcaatgtccggtacttcatatacaaatggctggagcagcagtagagatggggcacaatgaggtactgcttggaactatgttccagtgagaaaaaaaattactaagaattgctctaattgaaggcatctggtagttaaggagagaatctcgcagtgacagtacaagacaaacgcaatagaacaaatgaacaactgttgttttctgttctgtagaaaaaatagcttggtgtgtctcactgtctcgtaatccccaactagtcttttaagtcacttaaaagtattatatcctggtctatcaatatagagtttctaaagtattagaagatacatggcatgctacaaaacgtgaatcacaaaatgaactacgaaggagcacatggaaagtttataatactaggtagaagatacaggtgtcagaaattagacagatcggctagaataatgcaattttcatatgtattatattatgccttaactagagaaaataagtgtagttctacaacaaaaggttatcctctttcagaaagtgttcagtatttctaggcgagaagccgtttatttgtaagttgttctgctacttcaataactagattgtcaagttactagttacaattacataagccttggtttgtctacacattattctagggagcatgagattacaggatgaccctgtgaatgacagtgtaacagtagtaaaagtaaatgaaatattattttttcggaatatgcaaagtacgtatctttgtattaagattgagggtaaggccttacacaagagcatctcaattatgtacaaaaaggatcaaaagaaaaaaataaaaaaataataaaaaggggtgctaaaggcaatgtctatcaagtgaaggaaataataagataatagtttgaagttcaagcaagagtgaagattatagcaccagggcaaagaaaaggagaaagtttcagcattatgccctatccactcgacaagccaatctatcttctaggtaaatggtgatttgaggcttgtctagattaaagagaaattcactgtcaactctgctgaacacttgttagcagtttcacatcctactacttagagcatcaaaaacttctgatcaattaaaccgaaacacatcacaatccaaggatggcaaggcatggtcaactgatttgtctattaagatctccaaaaaaaaaaaaattcttgtttcagaattcagtagactggatataactgaaagacgggactagaaaggcggcagaaaataatagtctaacaaatgcaagagtacattgaactttcaaaaggtaccgaagaacatctcaatcacttgcaaagcctaggtacctaactactgaaaacaaaaggactggtgacctaaggtccaagtcatactccaaagtccaaatttccagataaaatatttgcccatttcagctaatgctgtgggggagttagggaagctgaatcatgccatcatgtaggccccattctagagaaagcttacctggtagtgctgaagattttttttgccatttgcatccagtaaacataaaagcagctgtggtgttggatacttggatcgatactgcagtccaccgaagacgaataaacgtttggtttgataagtgtagtgttgaaattgaattgcgggacccatattgaaaaaaaatcccccaatcactacgttttgccttgcctgtatgtgccaactgctacaggcaacaaacaattccttactcggttggttcgaccacagtttagacttcgatttttcctctgacatgcatgcaccgactttcacagtgtagtatggttcatttttatgcactgaaatcgatttaagccttacactggagttgctctaacctctttgcttgaaattacatgtttgcttatgttcctattatacctcttccattcttccctggatcaatcaaacaaaataaaataaactatgtatgtgaaacatgatccacttaaaaaccccatgatttgagatatgctcattggcatggttttcctgaattaatcgcatcgaaacaaggaaaattgagaggacccaacaagagataggttaggttcttggatgcaattttcccccttaaaaacttctgtggcgagattatgctcaatcccttgggattgattgggaaataaactaaacaaaaaatcccacatccgaagagactgcttacccaaccaatcacacctaagtcctagccaactatcccggacagaaatgcgtgtacaccgataaaacaaacaattgtaccaacgtgggcgagcaactgacttgctttccacctctcatgtgcgggccgcagggagaagtttagggttaattaggttggttggctttacctgaatcgacggaggcgcgcggcggcggcggcattcctcggcccgtgcgctgctccggctgggtgcgcgccggaggcggagatggtggcgacccgacccgagccccagctccggcctgcttgggggagatggagatggagggagagaaatgcacggtgctttttgtcactgacacgtggggctcagagattatcgggcccatatataaaaacaaagtcacacgtctcaaggattatcgggctcatatgtaaatgataaaatcacgtgactttaactaaagaagaccatgatcaggagagaaatggttctatcatgcaatttagacactatcgcatgttttctcacatatgtattgcacacatcaacttaaaatatcattaaaattatacatttttattaatctacatctatttataaagtctcgtcttcaaattcattacattgggaaaaaaaccaaaactttaacatatttatcctctcaaaattgttagaatttttatctttttttacgatgaaaatataaatgaatttatggttaaaactttaaacataagtgtacatttttttctagatattttgataaaatctattagtcggtgcgcacggtgtgtatacgagaaagtttgtatgcataggatatgttgctaatcatcaaacatctaacgatccctgatatttttaaaacgaaatatttgctccacgctttggaaaataagattttaaaaataataataactagcatggtgacccgcgcagattgcgctgctagtattattatattttctctcatataatagcatatatgttttcttattataatattcaaatatattaaaatgacaacataattttaaattttataataactttacaaaactactaatgtgtaatattcatattatattttatatacatgttagttattaattatttttaatatcaaattttagttatttgtaaattatatatattcctatatggactatatggactttagactcgtcttttaatatttctttttttttaattccgaattttctgtaaattatatttctatatatactctatactcttcttccaatattatttatttttatttctgaattttcatattatattttatataagtgtcagttattaattatttttaatatcaaattttagttatttgtaaattatatatattcctatatggactctagactcatcttttaatatttatttttttaattccgaattttatgtaaattgtatttctatatagactctatgctcttcttccaatattatttatttttatttctgaatttttattatttctaattgtatttctatgtggactctaaactcatctttcaatattctttaatttttaatttcgaatttcagttacttctaaattgtattcctatattgaccttaaactcttcttctcatgtttttcttaatttcgaattttagttatttataaattatatttttatacggactctaaactctacttttaattttattgtgtttattccaaaatttagttagttttaaattcctagatggactctatactctatttctaatattccttattttttaattccgaatttctttttttttcttaattgtatttctatatggactctatactctacttctaatattccttatttttaattccgaacttcagttatttcctaattgtatttctatatggactctgtactctacttctaatattccttatttttaattccgaatttcagttatttactaattgtatttctatattctatatggactctatactctacttctaatattccttattttttaattccgaatttcagctatttcctaattgtatttctatatggactctagtctcctcttctaatattccttattttttaatttcgaatttcagctatttcctaattgtatttgtatatggactctagtctcctcttttaatattccttattttttaattccgaatttcagctatttctaaattgtatttctatatggactctgccttttcttttttctccgattaatgtgagaatttttaagccatgagagcgaacgtggaggctcctttttctattcctttaataatatataatagatacaacaatcattagaagccgagcaataaattaaaacatcgggatcactatacaatgcaattgaatatgttgataaaaattgttcgtttgttttgagccgcaacaccattccttctttcctttcaaccctagtccagttcgatacctctctttgctcgggctgtctctctttgccccctacctcccttcgttcgggctgtctctcttcgccccagcctgcaaataggcccagctctcgggctgagctaaacctccggaagaaatattgcatgatgcagctcatcctcctcattagttgagggctattgatctactcgatttcctcttttcgtttttctcaaaataaaagagaatttgcaaaactcaagattaagggcagctcatcctcctcattagttgagggctgttagatctactcgattttctctttctgtttttctcaaaataagaaagaattcgcaaaactcaatattaaggtttgggattcttgtaggttagccagagctcgtttttcttgatataaaagagaatttgcaaaactcaagatcgaggtctgggattattgtaggtcggccagagctgatcgttctcattatatctcgatctctcaaaattgtttgaggattgttgatctactcgatctcttctttcttctttatgttgaaactcgatattaaggctgggatgcttgtccgcggccataatcaatggagattaaacccaacgaaattaagggaagacaatgaggtgggagtaggaaattgattttgcaattaattgaacgagggaagcgtaaagagatccgaccacactcatccgtgagatccgtccacactcatgaagataatccaaaattgattgaggggttttgatttttgtcgcctcctctttctgttttacaagaattagagcaaaattgtattgtatcgacccagaatcgaggaatcggatgggaaatttaggctccacggatgtaatatggaatcgagccctataccgtggatgggaatcggggatgaaatattttttgactcgtgcactcgaggcagaatcggaaagaaatcgtgagggatatggattcgtgggcgctacggattaaatatttttgatgcggaattggaaaaaaaaaacttgtgcacaaaaaagttggcagcgatctgatctggattcgtattatacggagtggaatcaggaatcggaaaaaaaattagcgcctgcttcatgagacaacgtacgaaatttttttggcaaaaacatcttaaatttttataataggtaaagataaagataatagataatcttctactagcttaaaccgcttcatctaaactggaattaggcatgcttggcaggataacatcatgtagattccaactacaaagcccctgtaaactgaaaccgaatggccctgtaaaccaaaacactggagaaaatacagagaaaacatactgtcgccaaatgagtgagataggccaacaagaacattctatgcccaacctttgcagatcatatgtccccaggaccaggccaaactcttccaatggccgtttggagcacgtccaacttctttttttctatggttccagccttaacaagagaacctcctgatcttttcttctcattttcgtcggcagcattggaccacatttagaattttccagatccaacaaggttctctgatatgagagaccacatgacatgactgagacactgtttttttaaaaatatgtggacatcaatggcagctggggacaaaacaacaagagtttcaatcagaacccattccattcactataacaacatctttacaaaacaaccgtcgcaaacatgttaaacacagttctttcaaccttcagactaaggcattaacagatgattgaacaggaggatgaattgcattttcagtaatggtacaaagatcagctagctaccctacgaatgattcatatatgcatatggtatacatcagctatctttacagtacatgagttgcagttagcgtgcaacttgaggtgtgcttgagtcctgctcacatgaaatccatggagtcatttagggtctggccgctcatcgattggcctccgttcaaagagttatggggattatttgggtggtgatgacgtccctggtggccacttaagtagtgcatctgctgctgctgcgagaaataggtcggcatctgctgctgctgctgctgctggagtcctccattgaaggagtttccgttcatgtttggaacttggcctgccgctatcttaagccgctgaacttcttctcgtagggcgtcattcagagctgcattaaacagagaaggctttctcaacaggttgctttgcttatctggataaatatatttggattctttgatttcaattgccttgtaatggccctaaacaagataatattatatctgggccttaatgacaaagaaagaagagcttgataacattatttgtgggccttaataacaaagacggaagagcttctgaaagaataggacataccatctcgaagtttagcttgttcttccatggactgcaaccggagtttgagctctctgttctcagcagttaggccagacgtgtccctctgaccataagtaaattccaagatgaaaaagggtataaaattaggaatgtgtgagcaaaagataattagaaaatcaaaaaaccataagatagaacattcaaacgctgaaaacattaacattagcggatgagactgatgcacaatcagaaacatgatctttattgttagcagcagagtaaaatttaaagtgattttagttagaaataacattaacaaggagtaaaaacactaatttccccccaaaaaaaaatcactagtcctgacttcttgattccctatataaaaaacttagtgaagctttgtggagcaagataaacatcagctgttatccctgaccaccaaaccaaagtttcaaccccccacctaatttcatcatctttaatcaaaccagctttcaaatatagcatcaataaccctgtttctgacatgaccaacctataaagtatataggcatcagcattatgaccctacttttgggtgcaataaatccttcagttgtcacatcggctacaagaacacttgcagacaaaagaaaattaagaaaaaatgcataatgtgttcaggctcaactatgttttcctgaaacaaacttgtaatatttgcggagtaaaagactacaaaacttatggttactcattataatttgttagctctcgaatgataaattcacaagacagctattccatatttacaaatcatataaagccggtagatcagcttattctccctgtaagcaggactaccataggctctctccaaaatcaaaaatctctggttcaaaaagtgtgaactgataggatgtgcttaactgttcaagggctagatgacctagataagatattatggaatttttgggataagccgttacaaaagctagcatatcaataaattcaattctcactgacattctctgaaatacaaatgtatgcagtggcagtttgcaagaaaaaaaatccttctgatcccattacatatccaatttagtatacagaatatgcagggagagaactatatctgttcatggtatttttagtacactatgaaaaagtaataatttggtcttgtcaaagcgaacatctaagcagcctaacatttttcatgtaaatagtcaagtaccagtgaaaattataaattcaaaatagcaagaaaattcctaaacctgcttgtcctggaaagtgcaatttgcaagtacagaactatagcggtactcacagttgagaataaatacaaccaaacagagactaacactttttatgatcatagcatcccagtacgcctgaacaatcgtaccagaactccagaagagctagcaactttgaactcgaaggaactagaggtggttctgtgcaggagctcgttgttaaaaaggaaaattaaagaaagaaaaactcagaagccaatgtacaacagctgtaacaatcaagtaaaaacaatcaatgttgaagcaatcaaagaatacagtaatttttttgtgatcgtccatcccaaaaactgctagtggacagtaaattggttgcactggacagtgtcaagtagaaattgatgttagtcaaatgatgtgtaagctgaaacaatactgcatcaatgtatctaaagggaaatccggttattccagctgctaatatcaggtctgatacaagagaataagaaaagcatagccaaacaaaaaatcaactgatcagatagagcactagcctcacttttatggtagtagttgcagaggcaccacaagcttgagctataatgcatacctggagcagcgtgagctgtgttgaaagcgtggttgcctctgtctgcagcgtctgcaccttcctctccagctcaccggtgtacttgatcttcctctccttcgacctcgccgccgattgcctgttcgccagaatcctacacaaaagagagtacccaccatcaaattgagaacgcaacaaggagcccgatttcaggaaaaaaagaagaagaagaagcacaataggccagcaacttcaactaaatgatttcatgtttaattatcaaattgaaatagtatagggaaatagctaaagaaaagttgttgaaaaacttcttttctaattttttttttaaaaaatccagctccatttctactgaaaccgtagtgtgaaaaaaaaaattctgacctcttcgcgcgcttggggtcgaggagcgcgagctcggcgagcctatcggcgggcatggccttcttggcgtagtcgggcggcgcggactcgccctcgaacagcgagctctccccatccatcgacccgctcctcttatgcccagccccaccgccgctactcccactcccagcaccaccaccccctcctcctccctggaacgcgaggccatcgaagaacgcggcgtcgagggagaggctcctcaggtgtgcacccccaggcggccgcggcgccgcctgcggcagcgccggcgggggaggaggcggggtcgggtcggacgccgcgggggagtcgtcggagagggaagggaagtcgaggtcggagaatccgaactcgccgtccgggtcgagcagcaggtcggcatcgggcagccggatgaacgtctccgagtgcgcccgccggtggtgccccctcggcggcgctcccccggacggcgccggcggcgggaatcgcgggtccatgatggctgcggcggcggcggtcaacgccggcgagaggcggctgctgctgcggcggctgcggcggcgaagtggctggggtttgggaggtcgctgctcggagaagaggaagatcgggtaggtaatgggtctcgactagaggaagcggaggcccccactcctgcgtggacccggtgcatagaccccaaaccgacttacacgaatctcgaggcggaatggaccgtataagtgagttccggtctatgaggagggtccacggaagaacggaatatccgcgccgtgaaatggttgttgcatccgtccccgcatgggtaaacttggtccatatacacctgtagctgtagttcgggtgcacgaatcacgaggcgttacggacgatgggatgttgcgccggtgcatagttggg

SEQ ID NO: 16684 - DNA, 8139 bp, Oryza sativa
tgtggatgacaggtggggccggggatcggcggggcccgggtagctgtgagacacgtggtggtcgtgaggtccgagccgcgtgttgctcatcttgctggcttgccagttgctgcggcctgcgggagcgggtgggccccacgggtaagccgctgggtggacaccggagctgaggcttgcacaagccacaagatacttgtctgatgacaaacctcatcttaacattattttattatttcctgtatttttaaacttaacatacgtttttctagtataataaatctggacttactattcttatatatattcattgtccttaaaaacatctcatctagattggtttttttgatggagggagtagtaaaaaatagatgtgactggataaagaaagattatgatttacttcctccgtctcattttaagcgtaccgatgagtttttttttccaactttaatcgtccgtcttatttgaatttttatatgactagtatttttattgttattagatgataaaacatgaatttagttttttaaaaaaacaaataaaatggataattaaaatcggacacgaaaatgcacggttacacttaaaatgggacggaggaaatactaagaagagaaaataggtggaggagaatggttgtgattggctgagaggatagggtaggtaaatatatagttttatttttggataagtagtgtgttgagaatagctatgttttaagacggggtagtactgcttagcttggtaagagtattttgatagtagtaaactagtaatctgttatgttaagcaggggacacgatcttttgattcgaatattttcatactagcttgatagagtattaattttaatacacagagttcgttgggtagatgctttgtgctgttgacttggttacaatgttgcgacgatatttccattatatgatttttatatgagcttgtgaatgtgacagatattgacaacaaaaatatactagtagtatactagtatcccattggacacattcttattgtaaccaattgttttcaactgaagattcatccacttcactaattaaaagggcattcgatgaatgtgattaggtcagcacagcatgagccggtgatccgaagtaagggattaatggatatttttacacacaattttcatgataatgtcgtgactttatcgtatctagtaattctgtaattacttggaattattcatttgttcaatttcatatataattagaggataattggatcatgcaattacaaatatgcatattcaaataaatatcattacaatttgtttacttatagtcgtgacactgaaattttacaaaattaggattgtaccactatcgccacgttttacatcttcttcctcatctgcacgtgggacccacccattagattcatcttcttcctccatcccccctcttctttttttccatctctctccaccacctcccgtcgtccatcctcctctctgtcgctcactcctcctcccccggcacagcggccacccccaccatcgcctctagtgccacacccgctgcctggtcaggttgggtaaggatggctggcccatcgacgtcgtggttggcatcctcctcatcgtcgctcccggtcatcgtgtcccatctgcccggcactgcggccacccctgccgccgcctccaagcctagttgtcgcgtcgcgccgagccacctagcccacgtcgcacccactctggtgacagtgtcggagtggacgaatgggaagaagataggaagagagaaggaagaagacggataaggaagaaaatggatggacaacgtgacgatagtagcacggtcctaattttgtaacatttaagtggcacggatacaaataaataaattataattgcgtttatctaaatagacacatttataatgatatggatccaattagtttacaacatctcttcctcgctaagagtaaaaaaaagatgcaacatgtctggtgaagaattgatagtgacgatgttgatgcctaccattttagatgcaatccccctaccaaataaaattgagcaagagatgctaccgattttgatattggttctttatgagaaaattccttgacgtcattttctgcatctcacatcaagaagctctttagtcatcctgtcactttttttttcactttcagaggcagaaaaacaatgcaagtaaactttctcattgggctagtttcaagtgattaatgtgaactgcatctcagaaactataaaatatgatgatcataatatgacgtgttgcgcacttgtgctcttatgctcatgcatgccgtcattttgtagtaacgagaggcaaattaaatgtagaagatagggtatgattttggtgtcgattactgaaaagatagctaataattgaaatttttaggtgagagcatatgagaagatggtgattatctaaaagcactgcagcctgcagggtaaataaatctgatggtagatgacatatagaatgattggccaacagcaagattcttggcacaacagtgaataacccactgatagtcatattacttctgagccagatcacatctaactgtggccaatcagcatcagtaataacttgcagctattgttgactctctggttgtctgaatactcctatggtaatagtaagggcctgtttaatactgctccaacttctaaatttagcttcaggagttgggtctggagtagagttgtggagctggttcattttatgagagagctccacccagctccactcctaattttggtggagctggaactgtttggctgagctccagctctagaaggggtggagctggagctgtgccaaacaggccctaagtaatataattgatttattgcggagttcctatgctaatatgtaactatgcaaaatttacatatactgtcaagaaagcatgcaaattgttaactaaaatcagtactaagatgcaaacagttaattaattaagaagtgtccaagatgcaaggagatgcatgttgttctccgaacaaacaacagaactgtgtattactcatttgttaaagaccattccatcctgtgttgcttgttctctgaattaattaacaaaagtgcagtactcgtgtaagtactaaacctgcacattagcagatatgtttagctagattgctaacacttggcagcagacatacagttggagtctgaaactctgaatcttcagtacacatacgtatgcagatccatgtcgtattctcagagttctcgttaagaagtcaatcccgtagagacccaaacgatcggttgatcacttgatcttttcttgcccaaagaacaacttgctgagacaatgacgtctgtgtagactgtagtaatgtgtcgctctaatgtacaaactggagttcgttggtcgagcaacggcagataaggtcttgaataactagacaaaactataacatcccccatatatatatatatatatatatattatatgtataataaaaaattttagtgaggacgctcatgatcttattaatattgctagtagtgaagagtcgagtctccgtcgtcccaatgcttgatccgccctaagtccaagagactgaactgttgattgatctcttgtgacagtaacactcccccgtgcatggattagtgtgtgtaacggtgtgtataatctttgaaagggacatcagtgcaaattaatcggatccgggagtaagcatctgaacttttctcactttgcaagagaagagaacacacctagctagctaggcatacgtattgcatttgcagattcagaatatcaaattgccattcagtgctagttgctcctagtaacaactaacaaaccgcggcgagatgacttttgctctatcgcttggctaactttacatgagcagcttgtgtaattagttgggctgttactttatagtgaagttctacgtatggaattatgccattacctctgttttttaaatatacggcagtgttaacttttagacattatgtatttatgtttgccgatttgttttgttattaaaaactatgtaagtgtcaattattttacttgtttttataattaaagacattttaagccgtacatattatttttgcatacctacgctaaacttttaaataaaacgaatggtgcggagagagttttttttttctcatgtcccagcaagtatataccatcggtcgctgccggcagcgtgcaccggccatcgcagaaaacgtaatcgggccgccagtgggtctagggattctagactattcataaattgtgactaacacttgagtcatattcttgaccaaacacacatattttagacccttcaattcttggagattttgttatccacatacgcatttttgaagttaattttccaaaggctgacatttgaacaaagatgtgaagcgggccttctttgggctaaatcctctgcccaatgtgcaatgtgtttgtgtcggtttagaggcccaaattgaatatatttcgtcaatcagctcagaccatcacaaaacggctagtgcaaattttcagaaaaaagcttaacataattttcccatgcgtttattcttgcaaagttcttactactaattagtatttgtaatttttctttgtgtagttttgtagatgttgggtatcaaaagttaagttgatctgatgatatgtgcgaaagtaagtacattgtttgcttgcttgcttatttgacatagctccagctccatgaaaaccttttagcgaagctagttgaaatggttttacaaaatatactagagaggtactacctccgtttcacaatgtaagcctttctagtattgtccacattcatatagatgctaatgaatctagacatttgatccacattcatatagagctaatgaatttagacattgtcatatataaagaatcattagcatctatatgaatgtgggccatgctagaaagtcttacattgtgaaacggagggagtagccattaagacaataagcaaactcaacggtaaggttgctttattcatatcaccttgccctcatggggaaaagttcaaatatcaatcatcttggacaaatgccgtccaaattcaaaatttattcgtactaatttttgtgttatctaaatgattaaatcttacgaggcttaatttgatactacttaatttccttcagttgatcaccaagcatttttgcatgaatcactcgtgcacttcttccttggtgatcttcttcgtcgccggtggcacatcgctgccgtggaacggcggcagtggcggccactggttgccggggtgcggccatgccggcatcggcggagggtggaacgggaacggcggcagtggcggccactggtttcccgggtgcggccatgccggcgtcggcggcgggtgggacgggaacggcggcagcggcggccacttgttgcctggttgcggccatgccggcgtcggcggcgggtgagacgggaacggcggcagcggcggccacttgttgccaccaggatgcggccatgccggcgtcggaggcgggtggaacggcggtagcggcggccatttgttccccgggtgcggccattccggcgtcggcggctggttgaacggcggcagaggtggccactggttgtttccaggacgcggccacgccgggttctcgccgccgccgtggtgggggctcgccgcctccggcgccggcggcgcatcaggggtgtacgactcgggcggcggcgccggcggcgaaagctccggctgatccggtggagcgtggcggccgtggtgcttggacttcggcggcgccttctcgtggtgcttcttgggcggtggcgccctctcctcgtccttgtgcttgctcttcttgacatggccgctgccgctctcctccttcaacggcggcggcgcctcgccgacggcgacggcgtgcaccggcgcaaccgcagtaggcggctcgaccaccgccggctcgatcaatggcggcaacgcgccgaacgaccacaccggcgccggcgccgcggcttggccgccggtgaccaggagcgagcgcgacgtggcgtcgacgcggcatgccgagagcgacgcgatggcgaggaccacgacgaggtacgacatcttgatggcaacttctacacgagtagaagttgttgttcttgatgccatattggattagttaattagcttcttgatgtgtttctgcttaaatggtttgcttgagctttatataggacttgaaacttgagtggtttttggttggtgagggtgaaaaatttagtcaaactttgtagaaactgcgactgggtttaattagtttggtaacaccacattcttgtagtggcttctttttgtctgttgaattcagaattacaggtgcatgagggagtagtagtaatgggttgttggtgtgtccatgaatgtgacatgcattagtgagggtttaggcaggagtcatttcttcatttgctcatggtggatctcctgtatctcttttttactggtatgtgttgcttattaattagccacattttttttctggtcatgaatggtacttcctccgtttcacaatgtaagttattctagtatttcccacattcacattcatatgtctagatttattaacatcaatatgaacgtgggaaatgctagaatgacttacattgtaaaacggaggaagtattagttctcaccatcacagttagtgcgttggtatggcttcctcacatgtggttgtcttgctaggtattactacgtactatttcctccgtttcacaatgtaagctattttaatatttctcacattcatatttatatcattaacatcaatatgaatgtggaaaatgctgtgaaacggagggagtagtatggaagagaattcccaactccccaagagaccaaacttgggctttaagacttgcatgcaccacattgtttcatttgtttcttgtatgcattaagaacgaaatagctagtggtcaaccttacggcatgctatcatcatttgtcactatgcttgggtagcaacatagggcggacgatgacgaggacgaggggtcagcaagtgacactaaaggggcgattttgacaatttgctactcttttgattgccattgccatcttatagagcatcactatacacattgattgccattgccattgcaccggtctcaagggaaacacattatggctccaaaggaacaagattatcttaattagtacctcttgtaaaaaaccacacattatagatgctcttataactgtgacacgtgatgacacttcgaatcagtaacatgtggatcaggttaggcaaatcatcaaatcaccaatctaatggttaaacccttttagctaagttttaaaatgtattccttttctaagctcctggtctgagtgtggaagattcgcgagagtggaaacacacaagacacgggcgatgtatacaggttcgggccgctgagaagcgtaataccctactcctgtgttttggtggatctgtgtatgaagaagctacaaagtgcgagccagcccccgatcgttccgggatcgttctctcctcctctttttttctctaagtgggcaaggtcctccttttatatctcaaggggataccacatgcaccatctctctctctctttcttttgtgtggggactcatcctctcttccctccaacttgacttctcttcattaatggacggagatttgtatggctgccgtccgaatgaccttctgatgggacggcccatacctacctccacttccgccggaagcaggcgcgacgtgggaacatggctgtctgctgacgacatgaccattgtcagaccggtcacaaatcggtcattcttgtccaccacgtgtcagtttaacaatctgcatgttcgcccttcttcatacaatatcttgcctgtaatggttaggatgaagcctggcatatatctgaccggaaccaacgtgccatctccaggagcaaacacgccggctccggctagggacgagtgcttggaggctctcgtcctgacgggatggggcgaggcgtgcgtcagaccgcctgtcgccacctagcccacgatctgaccggtctgtgactgatcacagaccggatgaacgagcgcgctgcactgcgttacatgcggcgtgacgcgctcgtccaaaccgcaataaatgcggttagggtgagcgc

SEQ ID NO: 16685 - DNA, 4628 bp, Oryza sativa
cgaccccccctcccccccccgagggggttaggccacgtgggtgatcgtgtctgcctcaagtctctaagtcatgatactcccggtcccatgtcaccgacagctccaaaggaaaaagattatcttaattagtacctcttgtaaaaaaccacgcattgtagatgctcttataactgtgacacgtgaggacacttcgaatcagtaacatgtggatcaggttaggcaaatcatcaaatcaccaatctaatggttaaacccttttagctaagttttaaaatgtattccttttctataagagcaggtatagtagggtacaatcagcaggcggtagaactgttcatctaagagtaaagcctacatggaagagtgagaaaacatgagagagagagagaagccggcccttaatctatcgttgggctacagccattaaaaaaacagcatgaccaatcggtcatccatgcatgctgcagctgcaagctttttccaccacttaaacgcttcccaatggcctcaatgagagagaatagagattgtgagagaataatttttgctgagttggactttttatagcccgttgctggctatactattaaacctgctctaaccgttagagagactaaggatcgtgtcataatgattctatatcgatgcctctaccttaaaaaattatgaatttcactagactgatatttatttagtggctgttagagcctatgtgtttgagagaagtaaaaaggagaagatacatgaaacgagaagagcaactagtacatctattaattattttaaatttaaaatatagattaatataattttccaaactaacctttctatagattttttttttttacaaaaacacatcatcacttagtagttgggtaaatgtgctcgtagagaatgagtgaatttatctcccaatcagtatatgtggaacgcatggagtactccgtaacatttccgttataatgttagtggataaaattataaaaaaaagtaataattataactctgttacaaccatgacattcccaacacgttgggcccatataacaacatacatacgcgcgcactcttttttcttaaaaaaaacaagccagacattggattttctattcgacttatactaacaaaaactcttgaaggaaaaacgtacttggtaaataaaacataatctacgaatccggatcataatctacgtatgagactgagagggacacgagtgatttgacgggtaggtttctatatccttaattagtacggagtatgttcttattattctaattaattttgattttcctacataataatactgcatagagagagagagagagagatacaggtggccccggcacacagttcatttgcaacgcaacggctgtttcatcttctgacgagatcacatccatgcaaacgcaagcaattaattaatcccctaatcccccaaatcctcatctccaaatccctcctcgtctcgtcctccaccgtaataatctctgaccaaatcgccaaatcatccgcccagaaagccgccgatcgatctcgtcggagagggcgcgcgaccaatctcgaccgatcgatcgatgatgcctccgaagccggctgcggaggacgtcgccgacgagcagccggagccgccggacgaggaccccgacgtcgccgaggccgaccccaccggccgctaccttcgggtccgtgcgagcgttcttccatgttttgattttttttttattttttggcgaggtttatgctggattagtttagtttgttcttctgatttggctgattgatttcgcgcgtaatgacagtacagggagatcatcggatcaggatcctccaagacagtgtaatgcttccaatctctccctctcctcgattgttacacttctcggttaattatttcagaaccatgcgtacggaaaacattggtaacatgtagaataaaacacaccctaaatatcttagaaaatgattttagattgtttgggacgaacggatcatgaaatttctgcattgcaaatagggcctaataagatgattgccttttcaccggatatgaacaagaaagcattgtaaccgttttttataattagaagaaagcaaggtttcaattacacaacgcaaccagtcgaactgccattgccaggggagctaaagggagaaaaaaaccgaaaactgaaaaaaccgaagtacattgcaacagtgttcattgacatgatatactatgttggtaattatatgtgatatgcagctacaaggcatttgatgcggtggatggcatcgaggtggcatggggcaaggtggagataaacgagagaatcatgggttcatccaaggaattgcagcggcttcgcacggagatccagctgctgaaatcgctgcagcacaagcacatcctcaagctctacgcatcctgggtcgacactaacagaaggacggttaacattgtcactgagctgttcacatctggtaatttgagagagtatgtatttatatgccacacctgccattcctctctcattcttgctacaacactattctatttcttttttcttatttttttaaagcgggggttttaatttattttccgtttatgagtaggttttattggttctacattcatatccaccttctttggaacaatggtataaaactactccatctgttctaaaatttagggcatccttattgttagtaaaaatcaacctttggtacttttgataaataattatgctaataatatatatgcttaatgtcatgtatatcatatcgttagatctatattttaaaatactttcatatgatgctgattttatagttattataacatattatgaaagaaattagtggtcaaagtgtaaaaacttataggccttaaaatttaggatagagagagtagagtacatcagataagcaaaaaaaagttcaattgtgttttatgattagggctttgttttcatgcatcaccgatcgtttgggcttttatttagaagaaaatgaatacagcataataaaattaattggctatttggcttaacgttacatatttcttttgttttcactccactagatgaatgcataatttgcccattcaatatttgaaatatctttgacactatggctgtgtttagatccaaagtttgtatccaaacttcagtcattttctatcacatcaacctgtcatacacacacaacttttcagtcacatcatctccaatttcaactaatcatctccaatttcaactaaaatccaaactttgcgctgaactaaacacagcctatgatatgactaggtaccgtacaaagcacaaaaaggttgacatgaaagcaatgagacgatgggcaaagcaaatactgacagggttggaatatctacacagtcagaagccaccaatcatacatagggacttgaagtgtgacaacattttcattaacgggaaccatgggaaagtgaagattggagactttggtttagcaatggtgatgcagcaaaggaaaacacggagtatacaaggtcggtgaactgctccacaaaggccacaataattacaagtaaattaattacaaggactggagacggctgtcttctatgctttcttgaattttcttctttatcttcaagtaaaacatgaatcgacaattactcttgttaaatacaggcaccatagaattcatggcaccagagctttttggtgaaaattacaatgagctggtcgatatatattcttttggaatgtgcatgctggagatggtgacttgtgaatgcccatacagtgaatgcaagggctttattcagatatacaagaagattactgaagtaagtggccttctatatacagcattcatacatatacctacttctacgattctggtagctaaacatataactcttctacatcaatattcatggcgctgtaactcttcaaggtgtaaagccagctgctctctccaaagtcaaagacgcagaagtgagaggcttcattgagagctgtctagcttcagtatctgacaggttgcctgcaagtgagctcttgaagagcccttttcttcagagtgatgatgccaatcacagaagctccaattcagttcaagaaccagtaaaattccctgaaaacaattttactaaagatgaaccaatttttgtctctctggcgccgaataatgggacagtcaatgggaaggagcaatctttcatcttggtgcttcagaagagtgattttttgttggaagggaacatgagcaccaccaaccctgtcatgctgtttctgcgattccctggtcctgatggtaaaataataagcatcaaaatgacatcttagcctcttaggatttgaatgcaacttagtttctgtcttttcgaacaacaaaactgacttaaatttataatttctttttgcaggtaagttcaagaatgttcagttcccctttgacatggagaaagataccagcctgtcggtgtccactgaaatggttgagcagcttgagctgcctgaatggaacaaccctgtcttggccgagttgatagacgccttcttactacacattttgcccagttggaaaccctgtgttaaagttggaaagatgttgccaagttcttcctagggagtgagttgtccagttttccccatttcggt

SEQ ID NO: 16686 - DNA, 24858 bp, Oryza sativa
gtcaaggcaaatcccccgatactgactgctcccctatgtgctcgacgactgtttggcactcgaattctgacaattctggctgctgtttgcttcaccaggtggcgctgcgagcggcggaggtggtgtccaagatcggcgcgtttgggctgaaggtgttcctggacgagcagagggggcagtcgtcgtcggcggtgcggcgcgcgagggcggtggagctgcggaccatactcaccaggctcggcccgacgttcgtcaagattgggcaggggctgtccacgcggcccgacctctgcccacccgagtacctcgaggagctctccgagctgcaggtggccgatcttgcttgcccttctctcgttcgaagcatactcgtctgattcaaacttagtagtaaggcattcaattctattccagcatttggccaatgtggcatgctcatgttcaaagatggagtgtccctgcaatttcttgcctgtttagtggacagtaattcgttcaagaacgtttcacctatagattcttgccactagtagtgtagtgcttattgttttgaagtaaatgacgtcagcttgagcttaccatttaagatgtgtcctgataactgggggatagcttccatttttggtttatgttatatctccaattggtttacatgtaaactgtcttgcaggattcgcttcccacgtttccggatgaagaggcatttgcatgtatcgagagggagcttggctttcctcttgattcaatctactcaacaatatcaccttccccaattgctgctgcaagtttaggtcaagtttataaggcacggttaaaatactctgggcaactggtagctgtcaaggtgcaaaggcctggtattgaggatattatagggcttgatttttatctactgaggggccttggatatctaataaataaatatgtcgactttatatccagtgatgttgttgctctcatggatgaatttgctcgaagagtttaccaagagcttaattatgtccaggtacaattttattgttcttttgaacctttttgcacataatctgatcaatatctgcagtatacatgtatgccactacttttcctactgatggatgttacactgtacctgtgaataacagggtttgtactttcagcatgagttctatggggcattgaaattccgaaatttcgtaacattttttttgaacgaatcggcacttagagtgcgccaatttcattgaataaagcaggaggaaaactgtacaaaagggaaaattaaggtaaaatctgtgccaggcgtttagcttctgctaggacccaagtctggaacactctctggttcctctctttccatatttcccaagtcattagaagtagttgggtgtgaactcccttcctaggcgtaccagcgcatgttgctagcgctgtccaccaagaatggattgaagtagcggggtaccatttcgtaacattttaaattcaaacaagaaagatatcaaacttacattgcaaactcttccagtgaatgcttcactgaattagcttacacgctcagttgcttaatctgtagaatttttgtttttttgaacgggatagctggagagctgcttattttaattaagaggaaaggaaataatataaagtttttacagaggtgttgtacaaagtaccagagctttgtagaattatttcctgttggttcatctacttgatggtagtgaaaactttgaatgcaggaaggccaaaatgcaagaaggtttaagaagttatatgctgacaagcaagatgtgctggtccctgatatattttgggactacacaagtgcaaaggttctgacaatggagtggattgagggtgtaaagttaaaccagcaagcagctattgaaaaacaaggtttgaaggttctggatttggtgaacattggtattcagtgcagcttaaggcaactattggagtacggttactttcatgctgatcctcatcctggtaacatattggcaacacctgaagggaagcttgcctttcttgattttggtatgatgagtgagaccccagaggatgcaagagtagccatcataggccatgttgttcacatggtcaatagggactatgaagcgatggctcgtgattattatgctctcgattttttggaacctgatgtagatgtctccccaattgtccctgctcttaagagtttctttgatgatgctctgaactcaacagtaagtgagctaaacttcaaaaccatagttgatggcttaggcgctgttctctaccagtacccatttaatggtatgttttcctgttgtcagatgctagttctcacttgtatgctaattctgctcatgtaatgatacaacttgtctatttattcttaactagtaccggcatactacgcattgatactgcgatcgctcactgtactggaaggtttagcactctatgctgatcccaattttaaggtgctcgctgcctcgtacccttactttgcgaaaaggctactcactgatcccaatccatatctcagagatgctttaattgagctactattcaaggatggaaaattcaggcaagtttatgtcctcatgaagtagttaatgaggagttttgactactcttgtcagtaattgcatcttgtactgattattctactgctatttaaccctagtattgcttctatacagatggaataggcttgaaaatcttcttgttcaagggagccaagatagagagtttgcagcaaaagatgctttgcaaccagttctaaagcttctacttggtcctgatggggaggaattgcgagtcctagttgtgaaagaagcggttcgtgtcacagaagccatcacttttggaacgctgattgattcgtataatgcagctccagaatttcttaaaccattaatatccagtggtaatccagccggaccgttcaagataagcgacactgaaagggaacaaatgattgagctgcgggacagggttttcagaatatggggccttctgagatcctcggatggctttgacccaaccatcttgcaaccaattgtgcaggtatacttcagcttcatttctcagtacgtgtgaatgtgtgattcaacctctatgaagaaatattttagctgataccatggagcaattttgatattcattcaggtgctacaagagccagaggcccgcgttcttggctcccgggttgcaggaggtgttacgcagcgcctcgcggcccgcctgttgcagcagctgctgagaactccacctgctccaggatctccttagcagataagacatgtaaattcacacggtactttccacaggaaagagaaaaggaaatgtaattcggaaatcaagtataaagttgatttcttcattcatgccggataaaaagatcccctagatgtttgtagattgttctcaaagcctggaaaattttgggtctacgaaaatcagaaactcttctccactgaagccactagggtttgccaaaccgagttgggaacccactcacttctttttccgcgcgcacgcttttcaaacggttaagcggtgtattttttgaaaaaaaattctatatgaaagtggcttaaaaaattatattgatctatttttcaaaaaaatagctaatacttaattaattatgtgttaataggccgctccgttttttgtgtaggagggacaagttctcagcaatagaagattaatagtaaaccacttcaatggtatgtctacatgggtatctatagctctctaatccattttctcgtttttctcattagactatctccaggttagtagatagctttgctctctttctcttcatttaatctcttccaagtaggaaaatatgctgacatggatcttttgtagagaggctataaataaccgggtgccctaaacgtgtttctcactctcctgcatagaatcaacgtgattctttctctgctgcactgctgtccattcactaaaagagctgcagcttgtgtacaggtgtttagtagaagagtaaatttcagaaaactgcaacttaatacagtttttttgaaatttgctcttagtagtatttcgtgttatcgcatttgtatgcatttacaggtacatgcctcagattagctaacgcccttctatgatgaggaaaggtaattttcggcctctgaatctacagaaaaacagcgattaatctctcaaaagaagagtatgtaaacgacagcacgttccaacttccaagctcatttctgacgcaagctctgagcaaaataagaaccggcgaaagcaacattgttgggctggtcgcccatcgtttctgaacacctcgcgatacaactgcacgaggcacaccagttttctcttccgtctttccgacggcgcctccatactccataggctgctgcctgctgctgatctgaattctgtctgatgcaccgcacccaccctcccgcagcggcattatctgaatctgagtagtcaagctgctcaactgaaaagtggaagcagccaaagcaggataagatttctgagagcaagtttaatagtgtagtccactacaggctccaaatcatttataaccaatgtaatagtcaattcatacaatagttgtttactataccattaatatttggtcccacctgtcatacacacgttatgtcttggagtccgtgttgcagctggctacagatctgtagcccgctgctcttctctctcttcttttatctctttaaaatatgtttatagctggcttaggcctcctttaatggttgagctagtgcactagctcatgcttgtccacctcatacaagagatagcaaaaagtctacctctccaatagattatctcatagcatattgtttaaaatgctttgggtttcacaattcctctcacattttctttaggagcttagctcttgaagaagatatagtgcattctctctccttatcttctctctcttccacatcatataaaagctgatatggagatttataagctagctgactcatccttgttggaggagcccttatagcctgctattgtacctgctatgattaatactagtactgtcacttacctctccgttaaaagggacagatataggttggtattttttttcttgacggaggaagtactcgaatctcaaatctcagttaggcccgggtaattctgctatagaaaagaaacaattaacaaaatgctgagatgaatgaatgttcaggcgaaaattaatccacaatgttctcgcaaaagaaatataattaattcacaatgtaataggacggacacgtcatgacagaagaagcatctgttgaagcgttcacgagacagatgccgcataaacaagtgagacatgccacccacgcgtccatctaatctaatctaaccaccctgcacgaatcgcgacgcacccccctgcgaagcattccgttccaagcgggcaagcgctatatatcgccgcggcgtcatctcgacaaggcacctgccactcgcccactcctcctcctcccccatcctccagtgctacggtgtcacgcagccatggcgctccgcacgctggcctcgaggaaaaccctagccgccgcggcgctgccgctggctgcggcggcggcggcgaggggtgtgacgaccgtcgcgctcccggacctcccctacgactacggcgcgctggagccggccatctccggggagatcatgcgcctgcaccaccagaagcaccacgccacctacgtcgccaactacaacaaggccctcgagcagctcgacgccgccgtcgccaagggcgacgcccccgccatcgtgcacctccagagcgccatcaagttcaacggcggaggtgaggccaagtcccgccccccttaccccttcctcgcatacggctttctttctttctttttcttcgtcctgttcatcgcgggcgatgcgggcggcgggggatctgaggaattgggtggggtatttgtgtgctattgtggctgatctggattggtctggacgggagaggcagtgtgctcccccaaatggagaatcggattgggttgggggttttaggatcctcccatttctaggggtttaggtggttctggttttattatcggccgcgaatttaggtttaatactgtgttgtagtggtctggtacatacactattttttaaaacagttgagacatgtgttaactgcgtgggtgttttgagtataaaatttgaacaattttggtgcttgttatccacagttaggcgttagctgtcttgattgtcatttggttcaggtagtgattagttggtgtgcctttgattcctgcaaaatttgagctgttttatattaatttcctgtgtttgagaggggctcagtctaactggtcaggtagcgatccattgttgtaattttgctatccagtgcttctctaatttgatcaggcagttggatgaatgggtgatctgttaagcttcatttctaggtgaaagttctgtatgcggtaatgtactttgggctcgaatttgaacaattttgatgcatgttctctgcacttagctatcctgattgtcagttggttgtgcttttaaggatttgttcgcctaagataggatttgagtagattcagcattgggttcttgggcttgtgccatagtttattttaatctagctttcaacttttgaaggccctctttgttttatgttctagacatatctagtgtttgatggggtgtattgtcatcgcagaagttcgaactgcattgaattttgtgcttgtacaccctttaatttaaagggtatgttatgttatctcccatctcaatgccagaaattttcctgtctcctgtaaaaatttgagttgttttatgttaatttcctgtctttgagatgaactcagtctgattggtcagttagtgatccattattgtaattttgagatccatcgcttctttaatttgatcatgcacttggagaatggttgatgtattaagcttcatttctatatgaccagatgcgtttctactaaattagacagcaccatgatgcatccatgagctgctgatttattgagctcaggttgagctgcctttgagttggttccacagttgccaatttctctaataaaaatatatagagacaaattagtggtccccttttactatctcttcagaaaattttatttaactttgaagaaatagtttggtagtttcacttatattcatatgttggatgataatatacatgataaattggcgtaaggttcacaatttcacattacaccaaactatcagggtgtgtttggataatgggaaatggggagtgggattaggattgggaaatcaatgaagggttaggattaaatggaactggaagaatgaatggttaggatttaaagatgcatttttgtgggtgggaaatcatttccctatcccattagccaaacactccgtcaaagggaacagcaggtggtatggtagtaaagaggtatcctcaggacagggctacgttgttccagctgggacccaagctgccgcccactcccaacgctcctgtaggatggagctgctgtgtttgtgttattgtgtgagcgcggaattgaagagactagtgttcctttcttctagagcctccaaaaaatcaggatgggtgtgacttttgccagctcttagctaaattcttgcacttggatagacaccactgcaagaggaaccaaagccaaatcttccgagcatagacacaagaaataagcaaatggtcggcacacccctcctgaccatgaagcagaaggcttagtgggtgtccattcactgccggagcatctcatctgttgtctagattcattgatttgcaataaaaaaaatttctagagtaatttattgcgatttcgttgctctcagatatctactctattcgttacaacaaagatattttcagtaatgcctttgtattaactgtgctgcaagccatgtcaatcattcgatctctgggattaacctcaagcctatcagcgtaattatccagtccatacaacttgctccatttctttcttcctccacttactttttttctactggatctccaatcaccgaattaatgaaaatattgggtgttttacaggagggtggtggtgatccaccacatgcaaaacttggctgggccattgatgaggattttggttcatttgaggcacttgtaaagaagatgagtgcagaaggtgctgctttacaaggatctggatgggtggtatgtacaccatgcattgctttatccattgatgtgtcatcctgttcagtctgaagaaatgtattgttcatttattatatttattttctcgtacagtggctagctttggataaagaggcaaagaagctttcagtggaaacaactgctaaccaggtgaaagttcttaactctttgtagattatattatttgcgcataataacaggatgtcctataccatgcagtctactcttgaacaacaacagttcaattcagtagattcttatcatttttgtcatgttttcaatgtctgttgagatagtgataaaaaacacttctgtaagatcaagggatggggattagcaatatggtacatcaatggttactgcagaaacacatcgttagaaacatatgcaataattttggtacattgggcaaggaaactgttattggatgcatgttcattgttctgataaaaaatggtaccgatcaatatgctagtggcttgctaaaatatgttactgcagtttagttaacatgtactgttgaaacaataccttgttcagcagtcctgcaattggatttcaagagttaagagcaaggacactatattttgtttaataagttgttatgacatggtacttaaaattaatgtgttttaccagtataagatgtattgtcttctgaacatactattttctaacatcctgtaaacttttatgaagtatctatgaattttcattgtttaatgaattctgaatatgactgttctaagtacatggcaagagtttgctgttctcatagttcagtttttgctttggctaatgtgttgagcaatatgaaattgtagccctactttctaaaggaaagaatacattttttttagcatcctacatggtgatttgataatagggcacagctgacttcttgcaatttgcaggaccctctggtaacgaagggggccaacttggttcctttgttgggaattgatgtctgggagcatgcgtactacctgcaggtaatctcatgctgttgtgggggtcagaggcacactcattgtttagttgctcttattctgctgttggttattattcctaatggcatgttgtaatttgcttatgttgttagtgttgctagcgccacatatgatgtgttcattgatcacaaattcacacttgaatgagttggacaacttattccccttgtagcatttgcactacgaagctattgcctttttttttaagataatggaaagaatcctgggctttacttcaaagaagctacaaccacttattacataattcactgaatgaagctactgcttgaaaatacggttcccattgttttccacaagacctaacaggagcagagtagaatgatatcacattgtttcatgggttatgtctcaaaagatcagagaaaatttaggagtagtaggatgtgactaggcatcgaatacgcatgtgcatgaatacaaaatgtgagtaccattgaagattactagtattgtacgttctgaacttctgatgtagtacatagtctgactatagaaggaatagttacctctggctgtttaacaacttacaacatcgtgcacacccaacttatttgtgcttcgaatttcaacctttgctattgctaaacagtcttcattgatttccgtggttgcagtacaagaatgtcaggccagactacctgagcaacatctggaaggtgatgaactggaaatacgcaggggaggtgtacgaaaatgcgactgcttgatgttgtctgaaggcaacgctcatggttttttttcacctagtactgccatggatctttgtatgcaataaaaatgggcctattgcacttctggaccttgtgtacattgcgtagaggtggactaatgcataacataatatgcctgagattttcttcttgtgctgctttcctgcatttctttgctcctggtgtttcactgcccatgcatttactactgcgccggtactgcctttctgtgccaattcccgttctcaaagcgaatgaataattctgtgctgatatactacctccgtttcaaaatatagtgacttttagctatgaatctggacacataattgttcagattcatagttaaaaatacttatattttaggattgcttatattttgggacggagggagggagtaatgatgtaatttaggaagaacactcgtacatatggaacgcatgcagttctttgtaaatttacaagaatagtctcgtggaacgcaagtaatggatcaaccaaaatactaatccccctcgtacctcagcacagtcctcatcgcctggtgtacatgcgtgcatctttcatataatcgcggaaaagccacgacacttgtttttaagtgctcaagttgtataaaagttggatgtgagcgatatcttttgtaatatttagaatattatctaaaaacaatatgtttaaatgtatgttggggaataatttcatcagattatattttaaccatatttaataaatatattcgaacataaatttttatcggtcaattttcttgtttctgactttatttgcttgggtgcgtgctgaagaatgtggtgttcttatctccgattctctttcacaaattttaaccatcatttttttttattttacatagatcaagacgaattgtatgattgtttccggtgtgttttttcaaaaaaaaagagcagtttttcttttcatttcgtaaatttcagtcactttttaaaaacaaaaaagtactccatacagcttaattttggaaaattcaaagttcagcataattacaaaaaagcttaggacaaacgactcgcccttgcgattttgcgaatgataaacgaacggtttcatttcacagacgcttcacttcgctcagctgtagtagacatcgagtttgagtcggactccgactccgagtcccattcggtacccctccatccataaatctcgtttcgtcctcgcccgccgcctccgcttcccattcccgccgcccgcttcctccacctgatccttcgccctcgattcgctgcacttgatccgccgctgcgccgcctctcgattcgatccatctctgtgccctagctaccctcgcagcagagtccactccacccgaggtgcgacatggccgtcgggatggcgcctcctcctcccacggccgccgcgctgccgtcccgccgccgcctcagggagcggatccagtcggagcgccaggtggtcggcggcctcctcaagaaggcggaggccttggtggcccgcgccaaggaggacgtccatggcgggcgcgccgcggcggcgcactccgaggcctgcgctctccctcgccgcggccgtttcttgcgtcgtccggaggcccgaccggaggcggaggccaccgccgcgatggacggggctgcctctccccgcaagaagaggcggaaggcggcgacctccgcgagctcgatcgtggaggtggaggtgatcgagccgaccatgcccaaggcgcagagggaccgcctctacggcctcctctcctcgctgtcggcggagatgccattgccgccgcacatcgtggccttgatgcagagccagtgctgctgcgtcgtggaccctaatggcgaagagatggatgtggaccttggctccgcgaaggatgctgccttgttccagttgctgaacctgctcgaggaattcgctcaacagcagaccaccaagattcagccacggctggcggaggagcaagaaccgcccaagatcgaggcacccgacgccaccagccgctcgtcgtcgatctgccaactgatggaggacggcgaggtcgccgatgagggcgcggacatggacatggacatctgcggcggcgtctctcccctggtagtggacaaggttcagttctcgccgcttccgaagcaagaagaggatgatgagttgatcaacaccagcggcggcggcggcttctctctccaatcgccgcctgccaagcaacaagaggaagaattcgtccgcgatgcctcccctgttgcagttgacaagttccctcaaactgaatctcctagctcgagcactggctcctcttctggatcgtcatcatcttcatcttcgagcggtggctcatctggatcatcctgcagcggttgctcctcttcaggcagcgactctaacgatgacggagacagtgcgagcagccgccctgataactctgaacttcccactgaagctgcagcgaagccattggagcagcagcaggtcacagtctgcggcggcgtctctcccctgatcgatgagttctcgccgcttccgaagcaacaagaggatgacgagttgatcgacgtcactggcggcgtctcccctgtatcagtcaacaagttcccagattctcctcgctcgagcagcagtggctcttcctcctcttccagcagcggttcgtcctcctcctcgtcggaaagtgactcagacgacgacggcgacagtgcgagcagcaagccagacaccgcagatcatcccactgaagctgaggcgccgaagcttcagccattggagcaacatgaggtcgcggagcaagacaagaagctgatcgccgagagagcagcatctccgaacaccgagatgcaggagctgatcgccagggcccaggagaggcagaaactccggcttgagctcgagaggaagacggcgcgcgagctcgagaggaagatggcgcgcgagcagctgcaggagatggagaggacggcacggccggtctacgacagcatcgaccccagtgtcatgaagcagctcgggatctccggcgatgcgcagtacatcgtcagcccggtgaaatctcggcacagcctgcatcggcgcggcggcggcggcctgctacagaagctcggcttcttcctcaaagaatagcatgatccatcatcaatggtgtctgtaaagctctgtaggtttcttgtcacattgggatcatatgctctgagcctctgacaatgatctcatcagttgcttgctctcaagcctttgatgtacttaaaaccattgattagcttgcagctaagttatgctgtacatgtgtcttgtattatatctgattatatgaaattatgaatcgtcttaaacaactgtactgtttctgccttatttcaagtgtatgcttagtcttctgttcatgaatgataacagttgcacatgttgttagtttatctgaaacaagcaaagcgacagcatcaacgaagtagtcttttttttttttggtgagatttacctttggaaaaggtaagagaaactgatttataagatatatctggtgcaaaattgaagatcaggaacaatgtttgtacatggtaagcacccttgagtttccaagagtgatgctactaacctcttaacaaacagaaaaacaaagagaaacaactaatagtgctaaaatgcctcaacaacacagctgacattgctgcctcccacttgcaaagtaacaaagcaaaaattgctgcctgtgtagtgcaggatagatgggtgaacctatttcagattacttcttgtgtgagagctctccactagttttgggaagcaaatgctcacaggaaaccttgatgggctgctcatcccaaatatacttgtgtgctcttcaactgcaacgatcttgtctgcttcgtcaaccacataggccataggttgctgttatcgcaaattccggatctcctgcgcgacgtctaagcaacactcaatgggacagttggtcttgattgcattggcgcctatatgtgatctacaagcagcatacccttcctgctcacacattcagagggtgctcagatagtcagattgcaaaggtataccaatatatgcttattaaaaagtcaaaaggttaattaaagatgcttcattaggtaaatacttattaagaagaactgactgatacatatcacataagaagcaaaaattaagaaaagatgggtgctgagttagctaggaatttgcatgttaactgaacattgatattacagacaagcgaaatacctttcgcagcgagtttatgagggtgccaagtggtggagagtttacttttgcacggctagcaatctagaaccacatgcaacaaattagttttgctggaagatttctgatagtaagcttgaatggtacattacatatttctgaacaagttaataaggaactgcaaaatatacctcatcaagtctgatatatccagggggcaaccttgagtcgctttcctcaatcattgtgtcaagaagtttttctaatgagacaccattctcaattgtgtttgcccatccccattctgttgccaagcttaacatttcagttaggaaggtggtatcatggagaggacctgtccaaagtggtcctacaccagtgatcgattcgggatcctgtaaaagaaaatgtaaccacataatagcacagttccttacccaagtatttaacagtaagaatggcttgatgagatttcttgcgtatggcatacagttctcaacttaggtgatgaacttatgtgatggagacatattcattagtagcatgtggcatatggttctcaacttattaaatgggcatgtttgtatgctagcaaagtgataatatttggtttattacctttggggtgttctattggaaacaaagtagtcagataaccttttgtattgtgctaacatactctaatagcccttacttaaccttaagaagtattgatctacttttcagacctgctaaaaatatttaatatggtccaacacttgctaactatatcatagcaaagcctgggttggcagctatggctgatctgggagtatccactacccagtaagcctgactctagagtgaatcatgtatccgggagctttaccactccaagcgatcacacatgatttgatttcaacaaagaaatctttcgcatcaatacagtaaaaaaaatgggacaaactatgatttgcttatgatgcctttcacattattataccaccacagactcgtgtacctacaattttgtctgcacaaccacaagtaatctgccccaactcatcaaatccaaaagtccgtgactggccacaacttttgcaatggcaaatgaaaccataattactgccaaaatagaaatagttagcaactacccattgtatggactaactgttcatatcgtcatagaatgaccagtaacaaaagaacaatgactaacctgatgccatcttgttttccattatgtaactgtaccatgactcgaaaaatagggccatgatatgcatagtatgagaacaatggagtaatgtgaaatcccagaatagcagcttcccgtgcagcaccacctataagcattcgcaaaccgacctcattcggatatggcactggacgtatatatgctccatatgatgacaaagagctaaagaaaacataatgttacaaggttcacatgaaagaagcatggatgctataatgcccactacaaaacaaacctggtcaagttcaacacagaaaaactaatctgtagtgtagcctagtgtgcattacaaaaggaattgactattacaacaggagcattggcacaccaccaaagaaatagtgatatgcatgtacgaagtgcacactgtcatactcaacaatctaatttgaattcactgtttctaattatactacaaacagaattactgatttgatgttcatactcattctaaaatctgctttctaacttcgctcacaccgtttgtccatctgacatggattttcctaggtaaacatatgtttcatgctctctaataattgacattatttgccatacgttatttagcagtttctagtacacctactgaacaactaaaaggccagcatttgaacatgtaaaactatgtacattttcagaatacaaagattacaaccgtcagttgagctataagaagcaattcaatgcagaagtgtagcagacactccagtttcaattgagcaaatattaatcaacataatctgaacacaataaacagaacaattctaataattgacaaaagatagaaatgcttgatgaattagcacaagctttaagaagctaaggcgaaggcattacaaattggatgatactacccgagatgtgtcatgccgaaatggaccacggactcaccttcttgagccataccctctcgcggaccgccaatccgtagatgtcagatacagtaggcccccaattctgagcgccagcaacgccgccctgatgtacgcggcgtcgccgccgaacgagtccacgtcgatgacgtcgaagtactcgcggcggaggtagcgctccgagagcagccgggtggcgtcgaggtgcgacaccgcccacctcctgtccggcgcccgctcgaagcgggagaggttgccgacgatgacggggcggagcgcctcggaggcgtcgttggcccagacgaagtcggcgccgacctgcgccaggtagcggagcgcgcggacgccgcagccgcacatggcgtcgaggcagaggaacggggcggaggggccggcggcgcggcggtggagggtgcccgcgaggaccgcgaggtcgcggcccgcggcgctgtcgctgcggtagaatgcggagcccgggtcgaaggtgaccccgcgctcggagtgcgcgcaggcgggtggctccgcgctgcgccggcggtggcggtggcggccaggttggagtgaaaaggggagcgctctggggaacgagagcgccgctgccgctgccgcggcggcggagatggccatggcgacgggaagagaacagcagaatggtttggattggggtacagggcgtacagccgttcgggttcacttcagcgaggccgacatttcgtgtgaattgttttttcctgagttacgggtgtaatttttgtagcattgcacgtccttaaagaggaagtcattaataagataagtccttaaaaatgagagagtatatatacgagggatctgtttgacaggattttaaggacttgtttaacttctaaatttagttttaagtgttgagtctcgagtgaagttgtgaaagcgctctacccaactccgttcctattttaaattgagctaaaactgtttagctgagctttaactccaagagaagaggagctgaaactggagcctgagcctggagctgtacctaacagtccataacttctaaatttaactttaaaagctacagtgaagttgtaaagcagtttcacctctttaatttattttgtgatagcacttcaaccagctttactcttattttttatggagaaaaattgtttgtctagagtttacctctaagagagatggagctggaactatgtaacataggttctaattctttcactaatcttaactttattaggagagatagagctggaactctgtaaaaataggttttgattctttcactaatcttaagagcatcaccaagagcatcccgaaattctgtcctcaacatttcagttatgggaattctaaacaagatttgaggtgttaaaatttttattcctccaacagattagctataattggtttcctaaaaacaaaaaagtaggcccttagaaaacttccaacagaaatcagctagtttccacccctcgctctcacgagatcacgcttgcgcacgtgccccttcgtcgcccctctcacgcagtaccatgccggcagatcaacccgaccggtacacgtgcacccccagttttcaacatgtacaccagcaattccagcaggcaggaaagcaccaactagcagcaagcacgactagcaattgcagcaggcagcaaatcaccaagtaagcagaacatcagcaagaaatctgcagcagcaagcagctcccatagaaagtaggaagcagcaacagcagcaagaaccagctgcatccatcaactccagcatcaagtttgacaacagcaacaaatcatatccctatatacttctgtaaactatattctatacatacccctatatgcttttgtatatgaaatgcacaaatcatatccctgaatccttacattaatttctgaattgtcaggataacatatatcagaagtagtttggatttacaaagttcagcccagaaagttaaaagagcatatttttttcttattgcctcctatgcaggcagcaagcagcaagcagccacagcaatacatagcaccaaattcactatgaatacatgctcatttctgaaaacatgtccaactactgttatttatgaaaatgcaagctctaacagatagcacaggtggttcatacaatttctgaattgtataaatttgacactactgtccaaattcaaatatatacagttcatatcagccctgacatcatagtttatgaataacatataacacaagtgggttagataatttctgaattatataaatttgacactataattttctctctgttcacagtaagaacagaacacctgaacattgagctttttgcagacttattacaaactacagatataaaaaagggcaacttttccatttcatacacttatcgctattgatttgtaataatttataattgattactgctaacttgctaagctagcaaatttcattattaattgattatcaatgtggagttcagatgtaccacttaaccacaaacatcagattcggcagcaggataagataatgcacaattacaatagacttgagatgcaacaatgatccagaatcggggacaggacttattgaaattgcttccacgaaggaactcttcttcaccaacaaaccaagccatggacaaaatggcgctggaagcgttgtgggagatgggatccagtgattgcctgggcacctgctggtacatggcctctgtcgcctgaacaccggaagtcgacgattggccaggaggcagagcacgggccgattcacaacgtatcatggttgcgctctaaatcgaggcggcggtggtggttgggggagcggcgatggctgtcctcctccagccatcggtggaatgcggtcgacgcgcgataccatgcaccgctccctggaagaaagccgacgcccggcaaccatggggaagcacctgctgcattccgatctgttgcgaggaagaggacgccgtcggtagatgaggtcgccaagaggagctgcgtgggaacgtttcaccaagcgcgcgcgagatagccgcgggcaaaggattgggagcgaaatcgatttgctagaattggagaacgaaaaaccaggacttgggtaccagaaggattgggagagctggtagggaatctgttggaagcaatctttgatcaaaaatccccaaaataccacatagggaatgatatcaaaatgctgttggtgatgctctaactttattacgaagtaacaaaggtacatagcataactgttactcactggatcaatattcatattatcttgataaacttagcaaaaattgctacatgaatttatgtaatttactggtagacatcataaaaatatgtaacggctgaaagacgtttaaaaaactggtaatttaatagaggacactttcagctcaattggcgagagaaattcttcaaagatacatttgtttggcaagtgggattgggaaataatatcccaccctccaaaggacaatattgcatcctaaccatccattcttcacacctcatttaatcctagccattcatccatttccctttctcaatcccacctctcatatcccatttgccaaacacagtgttagggtgaaaagcttttcagctaagactggaacgaggatggaatataatgtatgctaggtgatgtacttggggtgatagtaaatttagatttgcataatttctaaatttttactctaacgtcatgtttgaaatatgtggccttaagggcattctcaactttcttaagaatttatcaatctaactgagccgaaagtgttctctagcaattaccagtttttttaggatgtctttcaaccgtgacacgtttttttatgtatatcagcaaattacataaattttaagtatcttgtagcaaaatttgcctaaaaattactgttattagaagtcgtgccttatacaattgcatgattgcataatataaccgagaataaattttacaatgaaaactctcaatgacttgcaagcctatcttcagtaaatttagatcaaattttaaaatcatgctacatacatataattatgaagttatgccttatagactatggtaaagtagtactccctccgtttcataatataagttattctagtattttccataatcatattgatgctaatgaatctagacatatatatctatctagattcattaacatcaatatgaatgtggaaaatactaaaataatttacattgtgaaacggatgaagtattcatatattaatgactcaactgcaaactccataaaagttactttaaacactctcttcaacccaccaccttcacgacaaaatgccaagcttaaagtctaagttggcccaacttctagaacagcccaagcctgctcatcttaatccaatcccttcggaggaattcattcaaaagcctaggcaagccatgtgatacacacggaataaataattaggactaaggttacggtctcaaattctcaattccacagttgtatatgacggacgacacactagcctgtggtcaactttgttcgtcgttgtgctccttctgctcccatcccgtccagagacgacggccggccagcctgaggtcgattcgaacagctaaagcacgagcactgctatggccggccacgggcgtcggtgagcgatggcggcatcgacgattactctcatctgctggtttatatcctgtaagctccctctgctcctctttctcaactccggccgtctgctctccgccaatgtagcctactctttccttatcatatcagaataaacaaaactagtagtagtactctgtctaaatttgtactcccataatattttgaatattggaccaccttttattactaagctttcactttgaactacccctttacctatgttttcagtttggactagttaatatttcctttttgttgcactctagaccaccttctctcttcatctccttcaccctgtcttctcccaaactccgatcaccaaactcctccatcagttgtaggctttattttggcaatggctcttagcagcagtcgggcttggtgagtgaggcacactcatgtactcagtggtcgattagaggaagcgaagtaaggcaaggcagtggctcttggtaatgatgaaggcagcagagagcaagaggccaataaaattattcttttgttgcctccccttggtgttaccttcgcttgattcctcttctatttccattcgaattatttctgcaaattttccaccagaccgatatcaggcgcgctgagacaggtgccaaaatcaagatcattggacgagctatccggctttacctccatcttcaccagcccttggtcgtgctaagctagcccatcacgatatcggcagcaataaagatagagctcaagcgtgtacaatgccggcaacgtgctcaagcatgacttctgccgctgctgtccgtagttgcaggagtggggaggtcaggattctcatgtgatcgatctccggcagtagagtgaagagaaagagggagggagctagaggaacaagaagcctaaattgaaacattttgggaaaaatacctagtccaaggtgaaaagcttagtttatccctagtccaagatgcaagactggttaaaaaatgtgtctcaaagtgcaatttactctaatatttttttatggagggagaatcccaccaataatactctttcagaaagtgttcggatttatttgaactgattgtgctgagttatttgtagcaactagaacaatgcctctttttttttcagttgcagcagatctcaaataaacattatacatactaaattctaaaagtagctattattgtttgaatcccccaaattcgaaatactgcatgcaaaatggaaaagattaaacagctatatcaatgaggattaatacacatagtagttatatagttcagtattgtcgctccattcctatcaaggcatcaaccccggagttgtttctcaaaattgatacctccatggacgactagaatgtcatgtttggctgaccaatttgagtaactcataggatgaaaatggttcccaaaataatgtagaagcatatatttgcaattagggataaataactgtcgctacctctgattccaactgtagatcatcttagagaagtactcacaagaattaagaaagtgtagaaataaataatgttgctgtccagcaataactacacaataaacaaagggcatttttaccaaactggaaatttcgtggtgttacaaaataggacatgaggcatatcaaattgaacagcaccgatatgagtagctgcaaactatcagttttccatatgctgatatacaaatgcttccaattggacaaattaacttcaagttatgcacttatgctatattgtaggttctttttgtctactctttctgcatcatttgaagtactttcagaatgtccagatttctaatgtttctgagatattattttaatatgaacaacactagtagcatatttctaatgaagaaacaaactggctttgaacacacaaatgcttgttacaggctagcagtgttggatgaaacaaatgatcttcttgcataatatctcttggattgattatcttgagtaaacactggtttcatacaggactgcagaaactgaattgagcattgtcgaaacttgaaacgcatgtaaagatggcagcgttgatccaactatggaatgattgggagttacaggtgctggtgcttttaagcttcatgttgcaagtgttcgtcttcttttccggtggtcttcgacagcgcagcaccaactcgtcattgaggattctggtttggttagcatatttggtggctgatttcattgcagtctatgcccttgggcaactatcacggcaaaaaacagatgcaagtgaagctgggcaacctcacaagtttgcattcttctggacgcctttccttctcattcatcttggtgggcaggacacaatcactgcgttctctgtcgaggacaatgaactgtggctcaggcatctgctcaatcttctagtccaagtttgcttggccttgtatgtgttttggaaatcagcagcaggcaatcagtttgtagtctcagccatctttgcttttatttcaggaatcatcaagtatggggagagaacatgggcactcaagagtgcgagccagaaatcccttagacgctcaaccgatggaggagtagtaggtcaatttcctgaactagaagactatcaagagttgggatacaaaactatggtcatgtttgctctgtctagctcaccagttgtgagaaacctacttgttggacgcaagattgatcaaatggaagaaagggtacgtcatgcattttcaggtcgactgtatagtcaagtttcagaaaacgcgcaacttgtgttcaagattctagagatcgagctgggaatgatgtatgacaacctctacactaaggcgagagtgattcgtacatggactggcgccatactccgattcatcacctgcatctccctgatggttgcatttgtgctctttctgacagggaacaagaagtggcaccatagcagagttgatgttgccataacctatgcattgttcattggagcactctgtttggaggtctgtgcgatcttcttcatggtgatgatgtcgccatggacatgggcatccttgcaatattggaagtaccataggctcgcagatgcagcttggtatgttttcaagagcctacagacggagtctatgtcatggtggtcgaattccttggggcaatacaatttcctcagttcctgcttctctgacaatgtgtttgggaaggtgatgagccttgttggagcaaaggaattttggaggaactttcggtactctcagcgtgtgggcgtcaaagcagagatgaagaagctcgtctttgaagccaagtgccttgccgagatcttcggtgcaagccagacatcaagtgtcgatgcggatccaaattcaggcgtcggttcagcactggacataatcctgcgggaacagttcgaggtggccatcctctcgctacacgtctacaccgacatattcttgcaccgatgcatgaatcccacaagtgctgatagctgcgacgctaccagggagagacggcatctgatggatgcgtgcaggacaatatctgagtacatgtgctacctattggtcgtccatcctgaaatgcttcctgtcagtggcagtgtgcgtgatgttctagataaggcttcagaaaccgttgccaaggtcagctctggagctgctgcaagcaagggcagagtcagtgtcgtcctggagaaactggctacagaccgtgacctgaatgacttgtctgatcccatcaccctcgctgggtttgtcttcaggggccacaaggaagaggctgtgcattgtcatgaatcactgcaagttcttgcgcgcgcgtgggttggggttctcctctatgcagccggcaagtcccgtggcgagaaccatgcaaggcagctcagcatgggtggggagtttctcagttttgtgtggctgcacatggcgcattgttcactaggagacatgggcacatttgaggttgagctagttcgaccgagcgcggtgaatgagggcgggcgtaagatgtttgtatggggctatcagcgtcctcggtgacacaccaccct

SEQ ID NO: 16687 - DNA, 9301 bp, Oryza sativa
aatcaaaccaattaagaattcatattctcccatcgaaccccccctttctttataaagggaaactcatggacgttttatcaaccataaaaaaaatatcattatggttgtcaaatgatcatggtttttccctttataaagtatggaatgaatttcaaaattcatattaacgaagggtggataattccaatggaaaatcaaaaaattcaaaaggatgtaaatgtaagttctcaagactaccttacattccacttgattaacgtagaacccaaaatgcaagaactagttgcagcagaaactaaaaaagccagggcaaaacttcaacgagaaatcgtagccattattaaaaatgctggatatcatcgtgaagcgacgcaaatgaaagctatgtttaatctgtaatttctctcatcatttacttcaaaaaaactccctttatctatttggataaaaggagtttttttgttaagcgcaaatagttttttgaatataaagattttttaaaaaaagattatttataactaacacttgtttaataatgttaatctattataaaaaagggtgataatttgtcaaaaaactcctataaatatttaaaatatgtagcattacttcttgtcatatttcaattactgtatttaggaattcccgattctgtgaagcctgtgttggtttatgagtacattatatttttcggattagcttatttatttgctattcttcaagatttttttaatccaaggaaaaaaacagatctattattacgtgtagctatcatcatcagtttaattgtcttggctattacatctatctactataaagccacgttctcaattgctttttctgtaataatgtttattgcgttcagtttttcattatatgtaacaattaagctaaacaaaaaaaacaagcaaaaggattaataccttttgcttgttttttaaaattaatggtacgaatattttgtttgtgttgagtaagtaatattgttaccactcgcacctacatactccactaagtctgtagttgttaaaatgtgagtaccattacgcttcgcacaatcgtttaaaacggattgtaactggtttttattcggattttttaagaacattgcaacaaatccagttatcgtaataccaaagccaacaacttccaaaacttttgccatttttggtgcaatatatttagcaaaagccgttgctactaaggctacgcccaccgaagcaatgcctaaccctaaatcatctggactgattttactgttttctttgtgtgccgcagcgaggaaactttgtactgttacaacctctgtttctcgtcttaccacttttgatgttgccattatatatatcccccctatgttgtatgaatttgttagagttgaacaacctaacactctataaaggggactttcaatttgatttaacaactttttttaaaaaaagttttattcacgttcatacattttaggtttacataacattagaaaaaggcaggaacagctaaaatcaatgctgttcctgcctaggcggagccaagtatttcggtgtccccataaaaaagtacatttctacaggttttctatacaaacatttattcgtttctatatgttttctacatagagtatccagtcattctagttctttcaatcgtctcataatagttgcttcagaaacatctagtattcgcgcaatttctcgattacttttcccagtatcctttaaatgcatcaatttcaattcattgatggttaatttaggacgaccatttggatttccaccttgccatttctcatcatttttttcatctttattatttttaaaaaatctttttagcaatactctccctccactaagtgcgtcttaactctaaattttaagttttgacgcacaaaatatcaaccttcagatattttgtaggactcaataatatctaaaagattagggaattcaaatattcaacaagaaaaaaggaaatggagagtgcaattgtttagaagttgcaaacaaaacagatgaatcagtatagaagtaacctggttatttttgagtggtaaatggcctgattttagcgaaaaatcgtaggaagaaaacaggaagaacataacaaatgttctttagaaaaaaggaaatacagggaagaaaataggaagaatcgcactttttcatggggacaccgaaatactaggctctgcctagtctatcaccccaagtgatagcagatttcccttatgctctttcagtaaatagcgttattctaggagcaacttttgatgacagagatataatcaagctatttaccactcaaaaataatcttgctacttctatgttgattcatcttcagtagcatctaagcgtttttgtttttgtcatagataaaaatacacgccaaaagaaaacctttaccaaaactctcaataatggtaacattagtaaaaaaaagaggtttttatgttgaaaaaaatagtaagtctgcttgcttttcctatttttgcactaggctttttatctactgcacctagtgcgtttgcagaaactgatgagttaggttatgaatatacaacgaaaaaagcaagtgaaatcgattttgcagacggagacttttacatagtattactttcaggtgatgccaatagtgaagacgctacttatgctgtatatgaaaacagtgaagtagaaaagtatgaagaagatttacttgctgatggacaattggataatcatgaaacccaaaatctattaaactctgtaacacctttcgcatccctacctaccaaattttctgaatactatagtggttctcaatggatttcaagagatgagggaccatctttatctcttaaccctttaaaaccagcatatgactcacccccaggaatggcacaagcacatttacaaaaatacagatgggatgtagtctactctaaacatagtggagatgcaaaatggaataatacagccagtatgaaagcacaattacattgtcatgctgatacaattaaaggtttaaaaaatccttggaatatagaaccttggcgtacaacaaccaattatcatgaagtagttgcaaaagcttgtaatccgaaaaataagtaaaaaaaaaagcctaattcttttgaaaagaactgggctttttttaactttttcaaaaccactaaatttatgtgaactttttcagacgtgttgtataaataaatccatttaatatacatagtaacaaaataattataaacataattaaagaaatactatcttcaccctcacttatttcgtcgcctacatagccggctattattacagtaatagctgaaactgcaatagttactaaagaaaataaacctaatgtaataccattaataatttgggtagattttttttgtacaaaaataaaaaacgtaattaaaagtgatgaaatggtgaaaatagcaagaataatgtgtataaaatcataaatttgtaaacttaccataaaattacctcctttccaaatattataacgttttatggtgttttaaagtttctccattttgaaccatagacagatatcagttggatacgtgcaaaaccacacatggaacagccgcaaaacacaatacatcttttctccaaaagcaaaccatacaaagaacccccctctaccttgtgcagaaggtaaaagggggttacgtaccctagtataccattccattaccacgatagcccaaaattttatacatgccccatacataataagttgacataataaccaaaaaaggcagtaacgatgaagggcaaacccttgtcgttactgccttttcatttaaatcacaaattattgtatatgcagcattttatacatggttgatttaacagcattttggctaataaaccaccattgtaacatgcataaaatactgtataaagttactctttttatttattttgagttacttattttatttaaagttactctttttatttattttgagttacttattttatttaaagttaccctttttatttattttgagttacttatttagactctgtgtatcttcgttcaaagtttttcaaattatttcacgtaaaaaaagcgagcgatttttctctgcctttgcatcaaattgttcccaatcatccttcgtgagtgttagagagacttttttagtgatccctatacttggacgtcccacagatcttttcttactaaataaagccattttacaggattcacaatacgtcactggtacatcattaacataaataattgcgacattcatgccactaccacaacgttcgcagacagactctttacgtttattcatataatcacccctttaagttactcttaattctatattttgagtaacttaaaattattccttatatccagccttaaatttactcacccatgtagcgcatagccaaagcccatcgattcttgccatgccctaattctgaatgaatttgatccattgctctttttgctgttgtatacagttgcttatcacgctcacttaaaatgccatagtctgcagcacgtcccatttttctattttctaacacacggttcatcatctgtttctgttgattgttcattattcgattcattcgattacgagcataggtatgtctaaaaccatgacaaccacgtccagcttgttctactccactctttttacatgctacgtttaccccatctcttaccgtagagtaagatacgttcactatccgttcttctggaggtttgtcagctatccaactttctagtttcttttctaagtgttgcggcacattaagttgtcggaaacgccccccctttgttattcctgaaccattagaaatcgccaaacaccagccagtgcctttgtcattgggaataaaatgttctactcgtacattgacagcctctttcacacgcaaacccatttcatgcattaaatcaactgcctttgtgacctcctcagagcaattctcccgaattaattgcacttcattttccgtataagaacgatttttagcatcagagcctgtcagaggcttttctaagcgcctttccggacaaaaccttattgaagtaaagagatgatccgaaaaacgcttagaacgctctttaaaccctttttctaataaccgaagagatgtttcaacatttactcgatgtccttgagaaacgcccttttcactcaaatgggcaaggtatgatacataatgcctttcattcagttcacagatagactttattccatgttcactacggcaccatttcacaaaattttgagcatcagacatcgtgttggtcatctgctttatagagtgaataccactagttcctgcttttttcgcatcacgttttgattcaccaattttatctattgtctgcagtgactcttttacctcacgaacaatggatgtgcgtcctcgtctcgccattgtactcctccttttcttctcacttcaaagtccgtttgccctagctttgctcgggcgctccaccttaggagatccgttgtctacgccaacagacctcctaaggtgtcggatgcatttgtgctccgatatgtattcgattatcaatgtgcatacttcaactttccgcgctttgttatcggagtgcgccatataatctccgcccgtttttgcgctgggagcgcaaatggatttgctagcaaatccactatggcagcttaacgctgcaagcaatctacggattgctctttttacaatcacgttgtgatggccctttttctacatcctcctcctttttttgttttttctttttcatttttagacgcaaaaaaaagcacgtctgcttaccctccttgtggtagtgacctacttatccttaaaaatatttaatttttttgtattagccgattgctctaatggggtgtactctcccaaatacaaaatcattcttcccgtttttttattattcagggcatatttcaccctacccattcttacagcaacctgaattactgtttcaattcagcccaaaagctcgtcattgttcactcaacttcctcaccgtatggttgggaagaaaaaataaaataattatatgcttttagcctagcagaatcatcaataaaataaaagcatttcatttttgtagagcgaagacattttataggacctatgagaccaatcgaaagatcatttattgggtaatggttcatctcgattggtctcagaaattgaaaaaaccctcaaatgaaacaattaatttaaaaaaatgaacaacaaactagaggttcggtattaaccaatcctcttttaattaaatactacttaacatagccaatattcgctcacgttcttgtgcaaagcaggctttcttttcttctgttaattcttcttcttgttcatgacgagtcgcaaaccatgcaggcacgacttctacttttctagttttctctttttctggttctgcagatgaattcgaaaccgttaaatcgttgattttgttgcgaataaccgcacttaataaagctaatcgatttgttttgacgtattgatcgttcgctgaaatggctgcatctaatgattgatacataatcgtttctaattgcacgtgagacagggttaacttgtcctctgctttaatcttttttaatgaaccataaataacccctataaatgatttaaagccttctaaagagcctgtacgggcttgatagagattttttaaacgattataaagattatttttcttatcagacgactgcttagtagacgtctttatatcttttattattttaatttggttattatagttaaaatctgaatttgggccatttaacgttgatataacagcgttttgagccaaatcctgatgtttattttgatgtttatttggttgtttaaattcatctttaacgatggcaatttcataagaattaagatgataaacttcacttaaaatgctttcaaaattcacatgttgcacgtccaagatgacacgacaaccactattcgttttccctgatctgtttctagacaagataaatagcttggattgctccatatacttaaaagctgttgaaattgtatttaatccaacctctaatttttcgctcagatgctctcggcttactttgataataccgttatttgtaagatcataaatcattttttctaacactctatgtactttcccaccaggataaattccttgggttgctagtacttcttctaattgctgcaggcgttcttctttgagttgtcgattccctttttgattgccgtatgtaataaatgtttggactgcttggtttggtgtagtttttagtttatttttcatggtagttgctccttttttgaagcaaaaaagcgtttcacatcgtgtcttctgacgatgcaaaacgctttagattataaaataatcctcaatgacatagtaattaactgttgaccattattaaaattcttaatagaatgacctatagatactttgtatctctataacaattaaaaacagtcatttcacgataagctgcatcgtatctgtatcatacgataaagcgattaacaaaggacggcaatccgatgttagtcactgtggaatggcttttttacgttcgatttagttattttcaccatacgctaaagttagcaacttgtaaatatattctatgactattagtttctattagtttattgaatagagccatgacgcttgaaaaattctagtagtgcaacctcgactaactgcgatttttttatatttaactcatctgcgacacgatctacttctgccactaactcctctgaaatgtaatacgttttattttttctacttctcgtatttaatttcgcaatctcattaaaaattggtaactgttcatgtggctcctcttgctgaatgcgttcttgaatcatcttttttaacacatgaaactcgttttctgacaggccaatggcattcagaacctctaggtcttgctgtctattagtttctattagttcattattaggagtagtgacggctacctctttattagtttctattagttcattattagtttttattagctctttattaacttctattagttttctattcactttaggagtttgccttggtgatactgcttttaactgtgccaatgcttcattaaaagtcatatctttatccggaaaattagcgtcacgttgccatttatgttgcgatttattatagacgggccctaatgaattaaatacttctcgtatggttgtatcacgtgtatttaaaacctttctaagctcttttaacgattttttactcgcaataagctcagaaacgttgttgtcttttgtcagctcccacatactattcactctcctaatagtttctaatatattagtttatattagttaactaataatactattacttttctccaggtaactgtacaaatgctgcccatttccggagaaaaaagagtggagcgtttttatataattttttcattttcaataagttcgaagaacgaaggtacttttctaaattgttttgttttaacaaccctaatgatcattaacgaaatttcctgttccaaatccatcctattttgaaaactggtctgatgtaaaactgatttaattttaggctgcaacatatctagaacctcctgttggaatgccgtacttcttaattcacttaattcatttattggcatcaacatcacctcgattttttggaatactcctgcctaattttttgaaaagcctggtttttagctttattgacagcttgttttgaaatacctagtttttttgaaatttcttcttccgttagattatctacaaaaatagaatgcagaatatatttcttttttggtcctaatttcgaaacaatattataaagttgcttgtcctcgaaaattacttccaaatgagcgaagtcagaatgtatccattcagaatcatcatcaatactttcatctggaattaaatcgatgaatttgttctcaccctcattaatgtcattatctaatgttaactgattaacttggttaatatgacggatttgtttgtcatatctttgagattcaaaatacaaaacatgggaaaaataactaagtaattgaatttttctaacgtggattttgaataatttttcaatagtgtctctcgtatgagtggtaggattctctaaataacttttataaagcttacttactttttcatcttctaaaaaagattttaatagacgattttgaaccaaaaaaatcaactcctatataaaaacagaaacatatgttctattttatagcaaaaaaaagagaaattacatccatcattgtgttcattttacatttcaacatcgcaaaatagc

SEQ ID NO: 16688 - DNA, 1745 bp, Oryza sativa
cagatgaaaaagtacggccaaaagatttttctatgtaatgttaataataaataaagaagtatttattggtaaaacttgttaatattgttataaaaatgtattgaagttggttgttgcgcaatttcatatgttaagtgagataatattttgtaccttattcgacgtattagtactcggataatttatataggcctatcgcagtctaggtcgtagaaacattatatggacttaaacaaggagaattatgtaacatgaagaaatagtagtacaatttgaacatgatacaactatttgcattgcggttacatagatgatattagattcgaactaggagggaggtagtgcaatagttgaacacaacgacgatgtagtaatgggacaaggaaacatgacagtagaaatttcaatatgccaagttgtccgataatagctaacccctacgtgaggatccctctcctctctcaaaccgcgctttagtaaccctgtattgctctggtagttcaagctgcacaacacggctaggtggagttagaacccttctggtgtctatccattctctgtattgacatctccttggtggttcctgggaggaaagaatagatgtaaagcaagcaaagttagtaaatgttgtgagaaaataaggaatcatgtaatcaaaatattcttaccatgaaatcgtcgtcaagaatatttggacaaacaaagaaccttcgacccaatgttgtaggatttatggaacgaagaacctgacaacgatcaccacacctgcatcttggacgggcatcccatgaagggagtgccgtagttagcacccgccagtcgctctgttgttcacgacattgtcgttcataagccgcttttctctgtaagtattgctcagtactttcggatgcgaaataccagcgaccttcttgtaaacaagtggttaggtcaagaacgggattttctgtatcgacccactcgatgtatgcgcaagccgtagtgcgggtctgccgaatagagtagtgttacgaagaataaagcgattgcccatacggaatgaataagcatatgcagataataaaatacctcacggtcatagttagggcacctaaaaaagcgccttcctcgaatatcaggattcctcgaagccattagttagcatcgatcaccgcataggcagagaggacgctggcaccaaggtggtagtaggtatacacaagaatcgctacgccagtttggatcctcaacaccccggcgtctagccattgacgaaagctggtcggatttgtaatgaagcaagtggggaagagagtactgaatgtgactgagttctgaaagattgtgaggcctcactcgttaaggcgacttatatagacgcaaaaaatcgagtgatacccttgacatgtgaacgtggtggggtatggtgggtacgcctgattggcgccgaaagatacatgcatgatcggcgccgaaagttacattggtcgtatgtgccaaatggcgggcaaatactcgtatcacacgcgaataaaggaggctgcatcggtgcggcagaaagtagtcgtgcatgcgccgaaaggtatcgtgcatgcgccgaaaggtatcgtgcacatataacaacaacgtagtcattacacaagcatacagtactggaaagtgaagcaagtaaacaaaaagaagactgctctactggccctgccccgcgccgcgaccacgcttggtcctccgggcctgtgctcgcacgtggtcctgggagtaggtga

SEQ ID NO: 16689 - DNA, 5819 bp, Oryza sativa
acttgtgtgcgttaggactctcactggtgatgtttgaaatatatgaagatgaagatgaagatgaagtccttgcaacgagaaagccgttaacgtcttcttttttgcgaggtttttttttttgaaacaggaaagcaacgcttcaccccttctccattatcggaaaaggaacagtgacaattcattatacgagctactaagaaaaaaaaaacaaatgcaggggaatggaaccccaccaagcattgtcatcatctcttgaataaacctttttccttggcaaactaatggatctagactatcacaaagatctactgaaaactaagtactcattgaactactagtgaaatctgggatttcagcttccataaagcagcaggggttcttgatcactccatcatgtgcgtcaggcatcttcaagtcttcctgtcccaaccttccaaccgtgcttcgagttgtagacatcatttgccacaccggccccttagcagctccaccccccagagtaagcttcttgtgtttggtccctgtttctgtaacaccacccaggagacaatcaaagagcagatataatgtcccacagaactgctgccaccccaacagcaaccatgcttttcatggacaatacaggaacagctgttctattgtttcatcagcctgacaaaatagacacattctaaacttctaacacctttttaggttaaaagcaccaaaaaggtgttaaaagtttagaattgacccaaatcaaaagcactattaactagtacattccatacaaactttgccaagggacaatacaggaacagctgttctattgtttcatcagcctgacaaaatagacacattttatctcttcctttccaccctctcttaagcaaattatctttggtggagacacttttattcagagtcagccaaataaataccacttttgcaggaattttgaatttccagattttttcctattagggcactttatttgttgaatctgcagcgctctatagaaagatttcacaaaaaagccttttcttcctatccagttcccagaccaaactatctttctgattattcaaagtgatgttcatgaaattctttttcaaattttgctaggaaatttatttttttccctccatctttcttctaaaactcagcacatccaacgttctctcgaaacttttgctactgtgacattcttagtcatagccacattatacaggttagcatatttaacagcaaaaggttccttcccgttccatctgtactcccgaaagagagtgttttctccattaccaatttcttttgaacaggattttaagaaatcatctctcacttgcattaaaccctgccaaaagatagaatcaccattgctgagttttttttttttgtgtctcaatgttgtgtgatataaatattttgctttaaacaaatcctaccatgacccttcttcagtctcaagtttccaaagccatttaccaagtagtgatttattcattagttccaaatcaaggattcctagtccattcaggtcttgaggtttacacattttcggccattgaactaaatgctactttttaagggcatccacaatgttggtaaaaagttagccttaagcaattaatgttgtacagtaaaacaccttaagcattgtgcaagcacaccataagaaccatagagcaaaaagaagccttaagcttacggtgcggcaacaagctaataaaatatgcagtgaacagaagatggaagacttttcattgcgccaagtgtttcacgaaaggagtgagtagtgatattttttcccctcgatgggacctagtgggccccaccttattttctctccgtgacacaagcattgtaggcatggaaacaactgctgcttactgtggtgggtcccactcttatgtttcatgtaacctttaacattggcgttgccctaatgccatgatcttcctgccttagaaacctatacctgaactagtcaatttttttcttaaccccttgaggtagaagataaaaggacatcataaaagtgggaatactactcagactagaatttaattattagtgtgagtctcccacaatagcaagtagtttccccttccaacaaccaagtctaccttccactttatttttagtggatttccaatccttattatgttttcttttgcaagtatccctaagtattcttttgcaagccattagcataagtttagttgacttttaattattacaaacttaaaaaatagatttatttgatattttaaagtaacttttatatagaaagtccttataagaaacacattgtttaacggtttaaaaaacgtgctaataaaaactaaggtaaaatatgtatcttaattaaaaaagaacgggcctagtcatacgcacgctagtttcaacggtaccccccccccccctcttataaatacttcgtatttacttggacaagatttaaatttttataactagtttattagaataaatataaaaataagttcacgatattatcatactagttaatttcaaggtaaatctatgtgttatattttttttacttagcatttgataagttatcgacagtcaaaatttttaaaagtttgtttttactagagggagtagtagtactttgttaaacagtaactaattattggattctgcgtttaatccggtattatatacaatacagagaaagtagttaagagtctccagtagacattccaagttccaactccaaggaactggatcttttcatcaatcatcaatgccacacgccagtagggtacgccgatcaaaagcctatacaagactgcaacaaattaagttggtgatgcaactaacaaacaatcacaagcaagaaatcttacggtgaataatttccaagtgaatgagagcgataagaaagagggattttcttgattcgcacggtgatggcaaaatggcaattcctttcttgatggctggtagacttcatggattgaggcatcgagctgatgcagctgggcctacattgcccccatttaggcctagtcatcgaggggtcgcaggcctccattttcgctgggctggtaaccaggctctgctagctctggcacattttgttgggaataagtatactttaactctctcaattatagctccaatctgtttcgtaccccttaaccgcaatgttagatatcttgaccctcatctattaaaacatgtgcaaaatgattccctcggtgattttcgctgtggcatccacatatcgcatcgacttagtctttatgatatgatgtgacattacagtaacaaaaatagtaaaaataatgcatgggacctacgggtcagtgaccactacttttcatctttcctcccctttctcctccctctccctccacctcttctctctttctcactctctgtgctgaaatcattcaggcaaggagaggcaggagaggatgacagtgacgacgccgacgagctcaagcaggggacggcggtcgaccacttaggcaggccaagagctgggcagcatcatggccctaggcggagccgtctcccattcccgagcagcgatgctggctaaggaggccaccttcgcctcctgggtcgtgggcggcgcagactaacgctgactaggaagaaggtactcaggttgaggagggagctgacgagggtgcgatggtggtgctggaggtagtcaaaggatactatgtcggggatgagatggaactggagatggatgttgggcgccgctcctcctctccattgataggagacaagaaagaagcttatgccaccgacggcatcgattgcctaccttcggcaccccctctttgttgtcgtttgtctccccaaccaccaccaactggtcttcccttgttgtcatcctctcccacctcttcttctccacctccccgcggggatcccatccttctcgtcgcttccgagggctctccaaccattgtcgcctcactttcctcgagcacgctagcaagctttgccctcattcaggtggaggtgggagggtgccgtggggagatccgagaggacgccgtgggcggggaatgctgcccaagggtgagactgacgacgccttgcgctagacgcctagacttgagctccctgtcgtcgtcttcccctgcctccccgcttggttgattccaatcgcctcccactcttctttcgctagccgccgcatctagtcgtaccgatgcttgtcatgtctccgtcatcccggccagagagagagaggtggagggagagagtgaagagaaatgggaagaaaagaggaaagcaagttgtaaatgttcagtaggtcccacgcattattattggtttttttaattgtaatgtcacgtcggatcacatgacaccacgtcattgaaaaccacctcaaaacccccaccagccatcaggggagtaatttggaatcggtttttaatagttattgaggtcaagatatttggtactgtagttggggatatgaatcagactggagctataattaagggagtcaaatgaacttattccttttgttggagctctctcaccctttcggcccaacgattcgacagcggacaatgcacatagcccaactcctccttgtcgcaggcgttttgtttggtcagttttgctaaaaattgtacagaacttgccaatattttggtagtggtaagatttgccgttgcaaaatttttagtaaggtgtgattgtttggtctggcaccatttttttttgtatttgtttgagccctttgtttggttttcttgccaaaacattggcatagccatttttattaagtagcaaattaaatactatcctaatttattgatattaatcaattttttggcacggatagctggggcataaccaaacaagcttatctgatttacgctaataagatgatatgttacaatatgataaaataggtttctctaatcgccgtgttaagtaaatgtttttaagcctaccgagcaacaagccacaaattatatttatttataagaaaaaaaaacctagattcatgcatcagttgtggtcggatagctacttttcccgttcttttttttccccaacggtcgaaccattgccgacgttttatatagagaagttgtcccatttcaaaaaagaaaatgagaccaaactttacagtacatagttaattagagaaaattgtgcgaaaaccacaactaaaacaaacagaaactgataaacctaaactacaacccaggttcaatacttagcaaacgctattcaccacaagatttgcaaaaccaagtagtaagctagaagatcaaataagccccacccccccccccggcgcacgagcagatatatagtgttaattatcatcatcacaccattgttgatgtaaaaacacgaggcctgggagatgcacttaactccagtgcaggtccaaaagcttgcatttaggtgtgtgatcgtgccagttgatttgatcctgcaagtaacaagaaataaagacaaaaaaaaccgcggttaaatccataaacgatagccgatcggctagttgccgatgacatatcatttatttttgagccgatgtcatatgtgaatcgatcggcaatcatgaataaataagaaataactaaatctatcggctgtagatattaacaatatataatctttatgtcgatatatacttaaatcaagtgattgggatagatcggtcaccatgctgagacagtataaatcacttagatcgaaatatatattaacaacaagattatatatgttcatagcatagccgatcagatagatctagcatgtatcggctaatactccgatactactctatattaagatattaaagcaagtggaatata

SEQ ID NO: 16690 - DNA, 5587 bp, Oryza sativa
attttttttcttttttttttagatgtgaatctgtgatgtatttttgtgtgagatgtgaatctgtgatgaattttttagaatcctgtgatgtaatttttttaagagtttgtgatatatttggagatgatttgtttgaggatttggagatgttctgtaatatgtgatgatttggatatgggatgggattgtgtgaaatcaatattcaatattaaaagcagaaaaaaaagaaaaaatatctttcgtcccggttggtgttatcaaccgggactaaagatgctcccatctttagtcccggttggtaacaccaaccgggactaaagattgatttttagtcccggttatttgaaccgggactaaagatagcgatctttagtcccggattcgtagtcccggttggaaaaccgggactacaggggggttatgaaccgggactagaaagcatttctccaccagtgtaaatatacttaaatgcaacaagatcttaatataaagggcatatttaacatgtcaatcaagcatataggataaaagtagttaaatcaggtaagatcggctgaaaccccgattctacactaatcgacaaccaaaagcaggctagagattgagattctaatcacgacttataagatcaaactcaactgatgcagctacaagtatgaaaagaagaacaatatctagacaatcaagccgctggttatttcatagagtggtggatatcctatataatttaagtcaacgttggtatttaacctgatcggctgccttctagtagcagacgttagccgattggaggttaaataatgatattgccagagattatacagaatatatgataactcgacaaattacataaacaagattagagtatcataaagatggaagcactaatcccgagaacgcaagtcgccataacaagttttacctcttagttgaagatcgaaaccgatgcagctcaacccgaaagcaagaactcgtcgaaacaaaacgaaagtaaaagggtggcgatgcgccgaaattgtattgaatgtgtgttattgtattacatggggctcggggtctatttatacccgagattacaaaatatgtccgtgtcggacacgactcttctctctaacaaactccaagataccataagtctttgcggcagacttttgcctaaacatatctctaaagaaattacatgaaatatcctaattaatagatacaattgccttctcaggactcaatccatgcacggcaatatcctcatgaagcatattaactcaacccgacaacatgtaccacgtcacattgtcggtatcggctgaatcggccaacctagtccgactcgaactctgccgatcctagtcatagccgattcggactttagccgatcctcgctctgtttccggaacaatttccatcttgaattctgcttcgatcctatcttcatctctgatacttggattaccaaatttggtcgttaacaaccatcatgtgcgaacaccagggttaggaaagccctgtcgactaacaagcttgctacccagccctagagaaaaactcaaagggtaaggtcctacttgagtcattgttgccaagcacgcacctgttggaaatttagtcataattaggtatattttaatccaataattcggcatatttgccaagctcgcaagcgaaccgtttcccatctacaaggaggaacctctcccgacctgataagaagaaaacagggaaatgtcagcacacacatgaatattagcaccagtataaacccaccaatcaagtgagtgaaaaacagagaaaactgtaggtaaaaatttaccataccccaatgtttctccgccctcgctaataaccatgtttgcagacttcttgtccttacgctcaggacaattcttgacccaatgcccaggcttaccgcacacaaagcagtcgctctttgcctttcccttgcctttcttcttaaaattagttgtagccttgggtttgacgtcaggtttgactttcttcttgttgttgtaggatgcatgagggttcgtcttttgcaccaaattggcggtagaacctccctcgatcactttgccccgattgtcctttgccctccccttctcctcaacacccaaaaagccaatgaggtcagtaacactgaacccttgtcttttatgttttagagaagtagcaaagtccgaacaagaaggtggcaatttggcaataatgccttccgccacaaacttgtccggcaactcgcagttgttattctcaagttcctttgccagcatctgaatctcatgagcctattctactacagtatggtcatcgaccatcttgtagtcatagaactgctccatgatatatagctcgctgccggcatcggaaagtccgaacttggcctcaagagcatcccacatgttcttccccaaaggcatgtgcatatagacgtccactatgttatcggtgagcacactgatcaatgctccacagaacaagcaatccgcagcctcgaacttagcctcctcctcaggcgagagaggcggtttgggcatcttgccccgtgaaacaaataagcattgcattgccgtcaaccacaatagtacacgtgctttccatcttttataatttgaaccatcgaaagcgtctggttttagtgatgcagcaaatccaactactgaaaaagacctatcaagtttttggattgttgaaaatttcatcataattcggcatattttaattcaaaatattaaaacaataaacatgacatttgcaatatgagtagatctagtgacagtgctagatgtaaaaaacttgagcatgcttaatataaaataagcatcaacatttacagagtaacgcaatgctaccattgtgaagaatattagcaaagaaacatctaatagaatcgggagaatgaaagtataccccgagaacgtcccaccgctagattttgagacagtattgcctccattgatgtcgttcacctcctagtatccaatatccgtcgacatgttggtgaaggcaccgatgcagcagcagtagccgcgaagaacaggagcagtcgtgcttgaagcgctacccaaaaacttgatcgcccgcctacccgtgcaggttctcaagcggacgaagttccggaggcacctgctcgtcccgtacacctatgcaagcaggtgaagagaaccggggaaggattctgcaacacatgaacagaggaggaggaactcgaagtgcaagaaacatcaggaagaacggagcttctattcgtctgttgtccgtctgtggagtttatatgcgagcacgggagtaacgtgcagatcatcaaccgcggtgtttaatttggtaaccgacgcgctcgttaatatggaatcaattcacggcgtttaattccgtaaacgacggaatcaattcatgacatttaattctgtaactgacgcattcgttaatacagaatcaattctccgtgtttattaccgtctgctacaaaacgagagagagcagcagcagcagcagccgcttgcctgcctcgcctcgccccgccacgccgcgcgcgtggttgttcgcccaccatctcaaccggtcaacagagactcttcattagctccgtatttaagttgatacctcttcacttagattttcaagatgatattattacccataacacttaatgtgggacaataaaatttattaggatttaattgggtctagcccattaatctcctgcatggcagctccatttttactcaaagtaaaatttttactctacatatgtaaaatctaagagtaaaaagtgtactaggggtaaggtgaacgtaacctagaggtcaatttttcgatcgtatggtagttccatgtttacactacattattatgtggtttacactgtattttcaataataaaacaagaaacttatgacatcagtaatactacggggtggagcctttggtcagtagatgcagcgaatcgttgctagaacagtgcacaattatgaatttggtcaattagaattctcagcatgtgaaatgcatgcatatcaagtgatacactaatcagtgcagcgagatataaggtacaccgataattgggactaactgtttgattcacatctagactgatcatctacagtgttgtagacaagccagatcaaacttaattagctagtaatatatatgttctgggatatattcacccacttccatctctcaaatgccacacatatgacatatctgtaagaactaacaaagtgacatatacacctctacaaaattcaaattctaactagattcttttcagcgaagtacgggtcgagtgtagacttcaattttttcgggtagatagaccataaataacatcatttgttttttttcctccctccgttcctttatacttgtcaccaaatactattcacatttaaactctaaacatttatattttttgcagaaattttctaaatatctaaaaagatttcatattatcaaagaatacttcctccctcgcacattacttgtcattctgggttgtatagcattgattaagatttgggaaaaaaaagattatagtgccttttactaaataatttacggttaggaaaattaggatggaaagatggttgagggcatgatagagagaaatttacatgaaatgtgattgatgagataaatagtactccggtaattgagtgttctaaaagttacaacttacaagtaatttccgataacttttaaaatttacgaaaacaactattttagaactgagagagcattacatactaaggctgagttcgtttgagtgagttcccaactcactcccctcgttttccgtgtgcacgatttttcaaattgctaaacggtgtgttttttaaaaaaaaaaattctatacgaaagatgcttaaaaatcatattgatctaattaatcacgctctaatggattgatctgttttctgtgcgggagagatttgctcccagctataagtaacgaacacagcctaaacatattaaattttcttcataagtatgggtcaaaggtgacaattacttcctccacctaatataaagaattttggattgatgtgacacttcctattactaagaatctggacaagagcctgtccagattcacaatactaaaaagtgttacatctctctaaaatctcttatattttgggatggataaagtatccaagaactggggtagtttttttagcacgttctatatatttgagaagtgagagtgaaacattcagcgtccttttccaacggagcggctgcacatcacgacaggaggattgatggacagagaggacgggaagcaaggtctttcccacgaaaaagatctctgaaagaggagctcaggctgctcagccaataaaccaatgttgcggtcatcacgtgtccaagtgttgctgtcgtacacataccttctatgcgtgtatttcttttcgtccttagaactgttattcttccatacatactagcaatagggctaaaacttctagtcgccatatatttgtatcctggtatatccgtgagtaatatctttactcagggcgtcaggtctaccattgtatgaaaggatatttactattaagcactaccgtgtttgcattatatatat

SEQ ID NO: 16691 - DNA, 29055 bp, Oryza sativa
taattaggattaactgatccctgtcaaacaagcacatatgaaacaaggaaatgcttaattattccaaaaaaagataaaatccttagatgattctgccaaataaacaaaccccaaatctagcaagcaaagcaatctgacaccaagatcagcccaagagcaaatcagaccgggttaattttccccttccccctcctccccatagaagatcaatttggtggtcgaatcttagagctcttgtcgatctctctcataagcgagtaaggtatgacggcagccaacatggtgggcatttggtatggtgatctgaaacgagaagactctcaagcaaccgaacattttaatgttgaatcacaagggttaggaagggtgtacgcaccgtccgttctaaatctccatcaaacatacgagatctgccattaggtgtctagccgcatccacatagggctcaaatattcgttaattggtgctacctatgatttgagatggatatggtatggctatatgatgtcattatttgtattacttttaatttagacatataaaccccaaccctatgaactttacaataccatttaaattacatcataagatagtttggacggtggttttgcatattttgatgcttaaacagacagttttaagtaaagaatatacatatgtactacctccgtttcaaaatgtttgacgccgttgactttttaagcacatgtttgaccgttcgtcttattcaaaaaatttaaatagttattaatttttttcctatcatttgattcattgttaaatatatttttatgtaggcatataattttacatatttcacaaaagtttttgaataagacgaacagtcaaacatgtgctaaaaagtcaacggtatcaaacattttgaaacggagggagtatatatcatcaatctttagttcttaatttatgctccataaaaatgtcatactagctggtatttgtttttaactgagagcaaacatagggtaaaaatatgaatttaagtgaagatttttaatatatatgtctaataatttaacatatataaaatttagataaaaaaccattttgcaaaaccattttacatggtcatataaatggtattataaaatttaggagctagatgtccagttttaaaatttaggatactgtgatgtgagagtagctcatggttaggttccttctggtggaaccagcccaccaaggttcaggttctagacttggcatagatatgtcggcccaacaatcttccgaaggtgctcatagaaggtatggtgtgtgtacgttcataggggtaagtgtgcatgtgttgtgagcatctgcgtttgtactaatttcgaaattcgagaaaaaattgaattgtcgcccatgattcttattggccatgatgattctgatatccgaaaatgctctcagcagcctccaagtgccaattcctgaaattctgaaagattttacacatgttctaaacttctgaagttctggaggggaataagagattattgtttacttctgaaagtcatgtaactgatggtgaaaaatacaacacagagtatagtataatagtatattgttttaataaaacagagtatataggtttgatgttcatcgtgtgttcattcagtttcaaaattatgtcgagatgtgtttagtggaaatagcttccttttctcaacattgtcagcatccttctggtgttttacacttgtcaggacccaaagtttagaaatggaaaacattaggagtcatcaggattcagagaagttcagaaattttttttgtaacagagtgaagtctgcaggcattgtattggttgagtaatttcacttgtaggacatcttacggccgaggggacaaggaagaccatagagatcgtgcggctggagttcttttcagtaatcactgttattaatcatttgtcttttactttttaggcgcaagattataattatgaatagaatttacttcttgttaaatgtgattatgctgttaacactttaaataggggcaatttcgttcttacctctacttttatggctaatattggttttgcccttattctttagggttttcgtttttgccccagtttatttgttttgaaacgaaactaagttttacccctactttaaatgggcatgttaacggtgttaaatctttgaaaaaaagacatccatactatcagtgtgttgttgcacatgttccccctttttttcattagttctatatttaccctatagctgcatcttgcaattttcgtaaatcaaaaacttttacaaatataacaattttgaataatatcaaaaaatattgtttcaaaatttgacacacaaatgtgataaatctagataaatgtcgaacaaaaaatgacaaaatttggcgaaaaaaaagaagggttatatagcaagctacaagtcgtcgctgcctcctggccgggccagtgggccgttgctgccgtcaaccctggccgggccaccgccatcgattcctctccaagttgagttgccaccgccgcctcctccccacgttgagctgccgccgtcgccccctggccgggccgccaccgtcaccttctccccatgccgagtcgccaccgccgcctcctcccagcgtcgagctgccaccgtcgtcacccgctggctgggctgccgccgtcgcctcctctccgtgctgagctactgccgcctgactgggatgtcgtcgtcgcctcttcactctcgcagagtcgctgctgccgcctccaagctccctgcccgccaccaccttcaagcctcctctcagccgccacctaaccccctccccatcgtcgcctccaagcctcctcacccacgccgccacgccctctccccatgcagggcaggaggggtctgcgccgaggcgccacctgctgatgcctgctcaccgccacccgccgacgcccgctcatcaccgcctgctgcgctacccgatgccgctggatggggttttcgtgagaggctggaatagtttcccctattagatattttcttttctttctctatttatttaataccataagtccagtcccactcacttccgtctaaaccaggggcaaacggctctttcggtttaaaaacgtgggggcaaaaacgaaaaccctaaaatgtaggggcaaaatcaatattggacttcaaaactaaggtagaaaccttatggtgtttcgagaatagtttcaaaaattgaattatcgttcatgattcttattggcaatgatgattctgatttctgaaaggtgaaaaatgctctccgcagcctccaattgccaattcttgaacttctgaaggattttacaaatgtcatgttcttctgattcttcagaagaggaataaagctgaggaacacaggggtaactaaggaaggaaaacagagtattgtttacttctgaaaaccatgaagatgaaggtgaaaaaacagagtaacacgattttaatgaaacagagtacctctccgagaacatatagatttgatgttgtcatgttgagcgtgtgtttaatcaatttcgaaatgtttcaagattttgtgttttgataataatattttctcttgttctcaaccttgtcagcagccttatggtgttatagcattgtcaggccccaaagttcagaaatggaaaccattcagagtcaccagaattcagaaaagtacacaacattcttgtaacagagtgaagtctgcaagcattgtaccagttcagcaatttaacttcaaagacatctgacgtccgagaggacaaggaagagatgccatagagatagagatcgtgctgctggagttctgcctggaatagttcttttcagtaatcactgctattaatcatttgcctcttacatttttggcgcaagattaaaaaattatgaacagagtttacttctgattaaatgtgatgatactgtaaacacttgaaattatgttaatgtaatgaagcaactatgtatgacaaacacgaaatttcaaatagacaggttacaattttttcatgaaaacttttgtcgatgttgacaaatagcgagggacctgaaaaaccggaagtatcagaactgaaaaactggccgattgctttgccgtcggcgaggccgcggcacgtggaggtcgccaacgccgaggagtcgatgggccttacagtgacggcataaatccgattgatcttcgcccatctaacaaaatctcagcctgcctccgatgcatggaagcccattaaaaaaaataggaatccaccaacacacatccactccccacttgcgctccttgcggcgccgtcgtcggcggcgccgccccgccatcgatggacctagcagcggcgggggatggtgcgtttcgtcgccgtcgtggggtcgagcagggagtggaagcggacctccattgttagcgcaatcgtctccgaggtctcgggcgacgagcagttcgatctatttgtgaccgagaaataggagctcgaaaagccatggcggcgctgtcgagcaatgcccccaaccctggctctctccggccgcaaggtagcctttccttcgacctgagcttatttcccttggggccttgctcgattgtgctgcacctccttagatattcccatgcataatcccttttctctctttccgctaaattgtactgactgatctgcttgtgctagttggtactgctactgacgatgttggaataccatagctgtaataatgccttaagtttgtcattgaattaagctattagtgtgtggcatcttctgcatctgatgttcaatttcctcaggtagcagctatcatgtcatctgaagttcagtttgcaaaagatgaggagaataaacttgatgcaagtcacttggcacaagtgctgctaagcaagggatacgaggaacactgcagtcagcccagtacaatgtatagccatttttttttactggaattagatgttggaagcatggtcatctcatctggctaggatctacaggactccaatactgcacatatatgatccaggaaccagcactgaatcgaagcaggcctccaattgtacactcctctccaaggtctctggctggttgtcgggcaactcccccaatcccgaaaccctctccctgttactccccttccatttcagcttaaaatgggagaacctggcgttactagattgtgcacacgtaatgttaaattcggtaatatctcatatataacataatcctttttctctctgctgaatacttgaatttggtaatgtttaaattacttcaatattgattattctgctgatgccaactggtactgaactactgatcattttggaagccatgactgttttttttttttgcaaagataaaaaatggcaggagctcttcctattcaattaagaagaatagaaagaagcatacatagaactatatatgatcactttccttagatacattctatcaggacccaatttaggtatccatggaatagtcttctatcttctttgcactgtccctctcacaatgcatactaccaatcttttttggacagattgtggaagacaatttgccatgtatgaatgaagaattgacactgtttggctaagtgagtcatagtctcattctccatgatacacaaagcgagcaagatgagttacatggccatcccatgagggatgaggccatgacggtaatgcctcagttttattagtgaattgaattagtgtgggtaccggttcttctgcctgagatgttcaggttgttcagatactaataattatctttttagtttactttgttacccttaatttgcgtttatgcttgtttaattgtagatagtacttcagtttgcagaagatgatcagatcaaacttgttgtaagttactcgacacaagtgccgctgacaagaaagtagagagtaaagaaacaggccagacgggagagtgtactccagtacggtgtaaagccaccgttgggcgctggagatgacacatcttgctggactggagatgatccatttgcagaagtggagatgacacatcttgctggagatggcctgtacacaagaagcctactgagtttttagaaaattgtggcgtggtgtaatattttgctgctcgcttcagattgcatttaatcagatgcaaaggaatcatattgttaatcggctgtgcaggaatctgtctcttgttatattggagcctgcaaaaggtggttgtaaagtcttggggatagcattttttgttttgtacaaccttcagtaaaatatgtaagatgtaattgtcagtatacatcctgatacggtggtacctgacataaattaggggaacagcagctattttgtatcagctggcatgtcggtttctgtaatttgatgcaagaaaagtgccagggtgccagtgggcagtggcagtcatgttatacagtgcaagtaacaggacatgatgtgaaatgggttgttctatgttctctaagcttgtatcatgcatgtgccatcccatccactgaggtcaaagttcttttgtgttgagtgataactgatgatgagctgttgcatgttatcactttcagtcaataattcagtaacaatggtgcattgtcataagcattgctcatggtgaatctgaaattgctcagtctggagcctgttgccaaatcttgaagtagtgtgacaaatcaatgagcttcattaaaagtgcaccactaaagaagtgtgacaaatcaatgaactgaataaggaatatattcattgaagttgaacagcaaccttgccatccatggcgcccagccgcccagcacttggcttcctctccaaccgtgcatctttgctccaatcccccaattgctctcacctgacaacaccaccgcatcgacgacggccacaagctcgcaatcacacgcacaaatcacaacacaacaaggaagagatcagacataaaaaaaagttgattattttattattgcaaaatcaatgattaaatacaacaatgtaactaatgaataatgattaatttctattctacaatgaataattagctttacagctgcaactacagtactacactaaacgtacaactacaaatctaattatctatctacaaatcacagagatgggaaaagtcttcgactttgattagagacttggactcccatgccgttgcttgttgctgttcaagcgctggatttcttcttcttgttgcagaggcgctcgtgcaccaccccgcgcagatcatcgtcgatcttctcccagacggcggccggcagcgtggcgcaatctgtccacagcccgggatgcacgtacgcctggcgacacagggtgtgggccatcgagttgccctcccgatatatgtgtcgcacctcgacgtccgcgaagcagcggagcaggtccaggatttcctcgtgcatcgccgccgggatcctcgtctgcgtctcctcgccgcggatgagctgaaccagcaccaggtcgtcgccctcgacgacaagccgctcgacgaagcacgccagcgcgagcctcagcccccggatcatcgcacgggcctccaccacgccaaccgtccagtgctccgtgatctccgcgaaggcgagcaccacgccaccgtcgcagccgcggatcacgccgccgatgctcgctcgccgggatccgtcgtcatacacgctgccatcaaagttgagtttgcaccacccccccggcggcgcccaccatctgacgatcacccggctcggcttaaatggcggcgaggacggggacagcggagtggagcagcggggaaccggtggtggcgaaggaaagatcgacggcaagaaagccaaaccaccgccgccgccgcgaccgtcatcagggacccggagcctcccgccgtccacgcacatcctctgcccctcgacactgctcctctgccgctttccgttccccttcttggccaagaagaaggcctcgtcgccgcggccgtgatccgcgagaagattccacggcggcggcgcgctcaggggatccgcctcgaggatgtcgccgccgagcgggaggggctggccctggaggcgccggagcaggcagcggccgacgagctcgtcgtcgctgggatcgagcttgaggcccgggaggagcccatccgcgccagccgcagccgccgccatcgccaccggatcgcctgaggatttctagggttttggtggagagaaagcgtgggcgcgtgggtgagaggagatgatcagatgaggagaggaagcgtgcgtgtggatcgtctgagcgaggcgggatttgaacttatagaaggcggtgacgtcagcgcgagtcagcgttgtctgcacgcgctcttcctcccgcaggagcaacggttgagggtcgtttaacgttattgacttcgaatttggcacttgtttcgatttagttccaaattccaaaaatttgagctatcgctctattgctcatgctatgtatttttactgctcatggtgaattgatgattctaaaactatgtgcagcctccaggtgcaaatccctgaatttttcattttttgaaggattttggcattttccccatgtcttggacttctgaaggatttacctgagggacattgggttaactaaatggaggaaagcagggtattgtttacttctaaaaacaggggaactgaaggggaagaacaaataacagagtatatttgatgattttttttttgggaatatctcttcaagaatatacagatttgatgttgagagtgtgttcgttcaatttcaaaaatatttccagatgttgtgtttgagaataggttttcttgttctcaacattgtcagcagttttctttgttttacccttgtcaggaggacccattgttcagaaatggaaatattcatccgtcagaaattcagaattcagagaagttcagaaatattttgtatgggttgagggaacattgtagttgtaaacctgaaagtgttctgtttagagcctgtcgtcaattcttgaagagttatatccatgctgagtaaacctgaaggagcaaaacatgctagagttctttattttcaattcaagtagcacaatgttgtgctatcactgtcaggacaatgggccactgaactaactgtttgcttcagaatagtgtaagtattaacaactgtactctgttctcttgggattagttttaggatatttgtgactttccaatcatatagagttagcacttcattgaacgaaaggaaaattttcattgaatatgtacgactcaagaagtttgacaaagcaatgaattaaatagggaatatatttcgttgaacaggaatataagatttcagtgtaacagtgtttatgagcagtcggtacagataatataagcttacaatagtgtcagttacattgaatccaaccaatcaacagcaatctcagataataaatcatgttttacatacgcttaattacatgtaattcaactaatcaaccggccattccaggacaaaactatactatgtctcgcttctgcattgccagtctaacactacagactgctacagagcacaatgttcagtgctgatatcttgctatcttcaggacactagcctgccgacagatagatcaaacagctgagagcctcatcaatgctatctggagattcaaaactagacaacgccggtgcttcatcatagcttcaggcatcaaccagtaaagaggaataagcatcatcagaacttttttgtgatgacaaaagaagagtttcattctcaagaggctccatcaaacacatcgcaaagccacagcaagagaggtttccattccagtgtcagatcgatacaaatttcatacacaagaggattccatttcagaatccagatcgacacatatttcatacaccagaaaggcagaaaaatacttcttcattaacttccggattgatacagatttcgtacaccacaaaggttggaaaagacttctttattattttccagattgatatagatttcatacaacagaaagatagaaaaaaggacatcattaacatttctttatctacttccaataagatggaaattcaagacagggattgataatttgacagagctaacagttgctaaacatcctatgagtaaaactggtgtttttttcactctactcatggccgctgatcgaactcttccaacgccggctgcatcttctccacccttgcctcgtctgatcgaactcttccaacgccaactgcatcttctccacccttgccacctgcaaacaactcgtagacaacaagcagcaaaagaaaatacattatgtaaataattgaaccagtggatgcagaaatcgtggacctagttggcgacaactgatggcggcggcaaggaggcccagacgcggcggcggtcgtcctccgcttctccctccacagcttctgccgccgtcctcttcctaccaccaccgccgccgccgcatctcccgcttggacgcggccctcgctccaggacacggcagaaccagtcgaactcgtcagcactgacgaacaggcggtaatcgatggcaatgaggaagcgccgttcgaggccggccatctccctcgcgcggatcgccgcatccgagctggtctcgaacaccacagtccacctcgtcgggagcctgtcgatgggcccaccaaacttggcgcccacgaagatcgcgacggcgacgaggcggtgcgcggtggaaggatcgacgaggatccccgcctcccgcgcggcgccgctgcgtatgaaccggaacaggtagatcccggcgagcacgtagcacgcgtcctggatctcgatcacgtggcggacgctctcccgctggatgaaggtgtggatgcgctccaggaacacaccgatccggacgatgggcgtcgtgccgccgcggaaggcgcggatgaggtcggagtcggcgtcggcgtcggcggcggcggcgtggcggagggcttcggcctccacgagcgcggcgaggagggaaagggatcgagggatcccgcgctcgtcgtcgcggaggacggcgtgatcgccgttgtcgggtgccacggcgtctgcagcggccatggcggcggaagggtctcgcggaaagggacggatcaagattgctagggtttggcgcgcgggaggggattagggggtttcaggctggaggatttgatagaagaaaggaggatcgtgcgcatacagtacttttatacgtatcattatagatgcccaaatgggccgcccagcccgccacgacccaggcacgaccgggcctggccgaggtcagtcgggcgtgctgtgtcggaaaaagtacaccgaaggtccctcaacttgtgatcaagttacgaaatcgtcctcgaaccgcaaaaccggatatatgatatccctcaacttacaaaaccgttcactttagattcttaggtggttttcatctcgattttatctgacgtggcagctgagttagcgtgggacccatgttggccccaatgtcagggtgtccatgtcaccccctctctctttccctcttctctcccttccccctctctctctctcacctctctgcgcaggcgtcggcgggcggcgacgggcaaagcagcagtggtaagggcagcaacgacgtcatccacggccggccgcggcggcgccgccttcgcctgcgccgtgacggggcgtaagaggtcgatgaagacgacccgagaaggcgggtgagcacgcgacggccgacgaaggggagcggagcggccgcgagcgtgcagcgggcgggcgggcggtggagcagaatgtctgcagcggcaggcgagcgcgcggccagtggagcggagcggcggttgaagcaaagccggcccctttttggtggagcagggtcgtgagcgcgcggcggcaggtgaagtggagcagaacggcggcgggcaagccagccgccggaccttttcctctccgagcacatgaccatgccaacggtgcagaacgcggtggcgaagaagcccatgactagctacatctccatcactagcgcatacgtgacggtgcggccgccgccgacggcgtgcttgtaggcgagctcgacaagcgataggatgagtccgtgcgtacagagtggcgacgccgagggtgaggaagaagcccatccagtaattcccggtggtcaccctagcgcgtcgtcgtcgtcgggtctgaacttttcctttcctgccctactcaacaacactgaactctgaatctctctctctctttctgcttgatctgctgctgctaccaccacttcctatagatggccaaaaggcccgcatggcccggcccggcccaggcacggcccaccagccatcgggccagcacggcccgatcggcacttcatgccggcccatgggctgcgcctcccgcccaagcacggcccaccagccatcgggccgtgtcgggccggcccgaaggcgcgagtggcccatcgtgccattttctaaataagtctattttttgtccctcctctttgggctgtgacatatatatagcgaaaataagtttattttctgtccctcctctttgggctgtgacatatatatagtgaaaataagtctattttccatccctcctctttgggctgacatatatatagctaaaataagtctattttacatccctattctttcgaccgtggcatacaatatgtctatttttactcctcattgtttatgtctcgggcctggcctgtggcccatcgtgccgtgccggtggagaggcccaggcacggcccggtggtcgggccgggccggtacgggcccgacccctgacgggccgtgccgtgcttgggccgggccaaaacgccgtgccgtcgggcctcgggccttttggccatctataccacttcccaacgtctccagcgtgctcaccgtcgatagcagcagccctagcttccccgcgcagtagatctccacccgcgtgttgcccccctccttcctttccacctctaactgcacctcacaaactccattaatcccatcatcctcctcattatctagtaacagcaacaacaattaatggatgcagctatgtactttgggtgtgttcctggccagcatctcattggggttgagctccctgaagacgctgagcaccccgggcatctcctgctgctccggccggcctcgacgcgccccgccacgcctcgccttgccggtctagagaagactgagagagagtaggaagaaagagaagaggggaaaagagaggtgatgacgtgtcaccttgacatgtgggacccatgcaggcccacgcttactcagctgccacgtcggacaaaaccggggtaaaaaccgcctaaggacccaaagtgatccggttttgtaaattgagggatgatatatatccggttttgcggttcaaggacgatttcgtaactcgatgacaagttgagggaccttcggtgtactttttcctgctgtgtctgcccacaggctgcagccatggtccatgcacggcccaataagtatcgggccgtgccgggccggcccgaaggcacaacagcccattgtgcttctctataaataagtctaattcatctcccttatctctttggaataagtccactttaactctcttaaaagtgacccaaatctaatgcatgaccctgaaccacaaaatcagatatcttgacccctaaactgttaaaactggtacaatttaactccctcggcggttttggtgagcagtttcgctgacgtggagcaccacgtggtgatgttgacctggtcttcgtcctacgtggcattgacgtggcatttacgtgtcattaaaatttaaaaaatatatgggcccacttgtcattcacacaaaaaaaaattatgggacccactaaccggtggggccccacatgtcagtatatcacttcctcatcctcccgacctccccctctctctcccttatctctcactcccttttttgttcatgagccccagctcgccgtgccccatgccgtcgtcgtcgagcagtcagctctccagcatcgagaacgccggcgcgggcccggcgccgccggtggccatcttgctcacttgatccgtagcagagcccatcttatccatcctagaaaacaaagccaacgcttcctggtagcgtccaactcgatgatagcaagcaaccatgcttgatgagcatattgtgtctgggcaagtaatcccatcaagcaccttgcgagcattgggcacatcaccacatttggcatacatgtccaccaacgccgcttcgcagaaggcactggaactgaacccgctctttgaccacattgcaatgcacctgccttgccgtaagcaagaacacccagcctggcggcgccaccaccgctctggctcgccgacgcggacgccgcgccctagccggagcactgtggctgatgctgcgtcgtcgccatcgtggaggtcgaccccgacgcctcggggcccttgacgccgtcgccgccgcccggccgcatcaagccctgcagcagacgcgtgatgttgtccgcgctcgacgcgtacgccgccgccgagcctgatgtcgtcgccccggcgccgcgcacgcgggctccgttttggccgtcggagaggggtcgaggtcgagcgagagcgcgtcgcgcagcgcctgccgcgccgtgtggatgtccgtctgcagccgccgctcccactgccccttaggtgcggcggtgaccttcatgcttttcccgcagccatcgccgcccgctgccgccactatggacgccgccgccgttgtcgccgccgctgccgccggcgaccccagcttgccgaatggggagggagagagaaggggaggatgaagaagggagaaagaagtgggtcctacaatttttttttaatgacaaatgggctcaacatattttttttaattctaatgacaccacgcgccgcgtcacgtcaacaccatgtaggacgaagaccaagtcaacatcgccatgtaacgtgccacgtcagcaaaactgctcaccaaaaccgccgagggagtcaaattgtaccgattttaagagtttagaggttaagatatctagttttacgatttagggttatggattagattcacgtcacttttaagggagtcaaagtggacttattccgtgtcttatatggctgcaacaagtctattttgtatccctcatttctttggacaatgtcttataaggctgcattaagtctattttttggtccctcaactatttttctttgatcatgccgtgccgttgcttagattacacggatcctattctccgtgtaatatgaacttcgggaaaaaattatcttgcctactttgtgaatgttatgtgcttgcccttgtgcttttcaataccctacatggtttagtatgtatcatgttgattggataggcctaaaattccatcagatttgaagttgtcattcaaatttgcttgaacaccggaagttctttgtcaataaccctagaagttcctggttacctgagctgccagtaagttacagaccctattgaaattaacttctacgattgtttttagtatttttcaaaaacgcctattcacctctcactaggtgacatctacgagctttcacgctgcaccgaatgctcgaccccgatcagatccgggcggggatgccagatctagccgcacgggcatcggatctgatcgaggcggtgccaaatccaccgacaccatgccggagctcgctggcggcttcgtaagctccacatcgtccctcccgcgccagagacaaagggtcgtcggtttttagccctgccactgccatcccgacttgccactcagttttctaggcgacgagctctagcggtggcgaggtggggagaagggtgagggtggcggtggggatagctagggtttcgccccgacccacccgcgtgttttctagttttcaaatgtaaatatcctagtattacaggagtaatggagaactgctagctctgttttgcagctgctagtgctcgcatgttggtatcttcaacgcttatcttttgctatcttcaggacacgagcctaccggctttggtgaagtcgattcagctaagcacctcatcaattccctctgtaaatcagacaacaccggcgattcgcagatgctgcaccagatgactcgtgaagatcttgttcatattcctctggatgagagacgaacaggtcgggcaagtcgaagattttgttcatattcctttgcccaattggcagtcagccagtgcccccctgccacgcgagcggagacgcacgcagcgagtactcgatcggccgccgcgcgaaccgaggaccccacgaagatctgctgccttttccaccggctttggacggtagaacgcgtacgttcggcggggccggccgtccagtgtgcgctgtctcgcctcgcgcgttccagctgcttcattaaacttagtactagatatataccggttaatgaactaaattctgctgttattttagtttaaaactatgtaattgtttaatattttactaattgtagttattgggcccttttttagccatcgggctgttcttttgggccaaaaggtcaatggcaaacccgctcggtgggtccaggctgcccacgagctgtccgacgtcgtctccttccgtaccacttcacaccacgctgagtcgctgaccgtcttttgttatcctacctggccaccacaggtgatcgaccggtgcccgcgttaactccgaaccaccctttcggctcgccgtaccccgatcgtcaacgaaccgcgaaaataccgcgtcaatccttcgagctacctaaagatagtagcctgtgtctgcccattcaaaggttgccggtgccgcgcgcattccctccttttgttcagttgcacagataaaaacggacacggtcacgcgtacacacacgccacggccccattcccctcctttccagttcgatcgagccaacgatttcacgatttcccaaccgtgcggcgtgcgcgcacccggggcacgatcgtgcgcggctgcgcgcgcgcgggccggccaattggcaggcagccgctagctccccgcgcggtagcggagacgtgtacgcagcgagcgcgcgcgcgggcggtgcggctcagccggccggagtgtggcggccggccccgcgccttttccaccggctaatttggaccaacgcgtggaacgcgatacgtttgtacaccggtgacttccagtgtgcgcggctcttctctcgtctcgcacgtccagtcgtccacctgcttcccttgacctttttgcttgcgtgcccaccgactcctacacgtgggacccccggccggtagtcaaacactagtagaagacgcgagtgtgttttgctgttaaagcctccaattaacttcttttttgtggggggagacagcacggttatcttgttttcctccgaaagttaggcacgctctttctgagcaaataatcccgaaatggaaggaggctgctacaaaaatccccacacatgtcccaattggcccagactcaacgaactcatgcatgcagaaatataatactccctccagtatactacaacatcctcaagcaagcaaccaaagtctacagtccacaagtccatagtccataagtccacagagatagccatcgatcacatgatgatgatatcgttaacaagtcaatacgtgagaacattccgacccccttccacctcagcctcctcctttgaccctctccactactccacacaccacactcgccaccaccaccaccgctatatatatatgagccaacgcgcgccatctccacccaaccaaaccatctgctcgaactcctcctcctcctcctcctcacgcaagcttcctctcgatcgtcttcgttttcttggtcgtcgtcgtcgtcgtcgtcgtcgcaggcgaaactatggcatcccggagcagcagcagccggagccgtgccgtcgccatgtggctcgtggcgctcatggtggtcttcctggtcgccggaccgcagccggcgtccgcggcgcggccgctccggccggccggctggaacgcgcctagcatcgacggggagggccactacgcgtccggcgtcgtcgacaagtacgcgccgcttctgctctccatgctgccgaggggccccgtgacgccgtccggccccagcggcggcaccaacggcgacggcaactgaggaatggaagccatggaaaagcgcccgattggagatcgaggtgcagagggagatctgctggttcaattcataaatcatagatgccacggataccagcctttttcttaatttctttctttattttttttttcgtgatgtacaaaatatatagaaaattggtagaatacacatactcatagtcatagggcagggtgtatatatacgatatatatactgttatacatattcttttgtttgtcaattgtcatagtatattttgctgtgacaccgttatataaaagagggtttacgtttaatgagaagatcacagtaaatatacgtacgtgccagtgttcaccgtgccatgaattttttgtctctgtctgtacctgtgaatctgttattaaaatatccaattgtgtacattatttatgtctcgaactggcaagcagtatcaactatcaagagcacaagtcgatcgtgtgggcttgagccatatgccggtgagaatcatgtagtttgcagaggttgagagagggtacgtatggaggattggaggcgatcagagaggaagaattcggaagatttaatttcagactaaaatggagttgaatttggggaggagagatgaaaaggaaggaggctgttcgcctttgatctcatctgttcgttgaattgttcgcctagtgttgatggctcctttagaccttggctccttctgtgtgggagcttcttcttttatttttaaaaaaactcatcatttatttaatataggaggttacatacaacgtacataagtgaacgtcacatatcaaagatagagatcttaatttgcctacactagaacaggtagattcacatacaacataattgttgaaagacccctcaaaaataaacaagttacactgatgttctgaaaataagcaaagaaagaactccaaaagaaaatcgaaaagcaatctagtccttgcttcacttcttccaatccgatgaccaagacgatgaagctgacggtgatgacaacgaggaggttgactgcagaagataccatcgtgccacaaacccaacaggggcctctcacaagtggtggttgaagtgaacacgataaaaaagagatcagtctaacctagaaaaatgcaccgccagagacaaggaagtacaccaaatcgacaatagcaaactcaccgaagatgatttgaacggctagcgacacctcgtcactgtgggggaagatgacctccaaccaaaggacatatatgctatgtgttgacccaaaaccagtgaagaacctggtagtgtccttttggatggcgcaagccagagcaagctctcgatttggagctcaagccatctatggaagcaggcagccaagacgaaaaagatggatgttggcatcttcattgagctattcaagaaatgggaagaagaaaacctagtacaagatactcgatttacaacatgataaatctaagtacaggataaacccaacggctcaccggaacccccccccctccctttccctcgcctgtgaccgctcaccgacagagagaggataagttcaagccctgtcttgtataggagctacagctctcttttttctttaaagaggagctacagctaatactattctctatatattaaaatacttattattataatgtttaatgttgttttgaaataatcatcactgtcacattccaaaacacttttgattaaaatctttcctcactaccccttgtcattttgtcaaaatatccacacctcactataatccatacccttagccgaagaaagtactattatacttatgtagttaggctgcgttcttttataagtaaaatgcatatttttatcttgattttcattaacacatattttaaattgttaaacagtgtgtttcgtgctaaaatcttttattagaagttactttaaaatatcaaataaatttatttttaaagttgtaataattaaaactcaatcaatcatgcacttatgactttttttttgttttgcatgctactataacttaatctcattcaacagttcttaatagagatacctcggtaatttactatagcttttaagctttatattttgtttgaatgtagttagaacaataaataatttgaaaaggagggagtacgtcggatgggccagtcgagtcatcaattctacatggttcaatctttttcgctggaacactgcaggcagcccagcagacaaaggatgcaagtatggcctggtttagttcccattttttttttaaacttccaactttttcatcacatcaaaattttcctacacacgcaaacttccaactttttcgtcacatcgttccaatttcaatcaaactactaattttagcgtgaactaaacacaccctatgtgacgttaggaagctctgccggcggcaccagggagtgctctcgctcaagatgttagcagcgcacctacctcccctgtcccctcctctgttttgaaaatggaagagtacaattagcaaaatttgaaatgtttttggaaaacttgacttcattcgcaacctccaatcaagtagtcttagaccctatttagatgggactaaaacttttaagtcccggtcacatcggatgtttggacactaattataaatattaaacgtagactattaataaaacccatccataatcttggactaattcacgagacgaatctattgagcctaattaattcatgattagcctatgtgatgctacagtaaacattctctaattatagattaattaggcttaaaaaatttgtctggcaaattagctttcatttatataattagttttgtaagtagtctatatttaacactctaaattaatgtctaaatacagagattaaagttaaatctctggatccaaacaccaccttacttgtttggtcaatttgcaacaggagtgattaattaacttgcacttatcttattatagagtactccctttatgttaataatatttgtattttggacaaaattgatgttaaattttaatttttttactataaataatttctaaaatatttgtcataaaagtatgggaaccatatacataaattagtgttaaaatattttgatacaattatatatttgttgatatttctatatatgttataaaaagtagttatcaaagttgtctttttaaaaccatatccttatctaaaatgataattattactaacctagaggcaatactaattgcagtgctgtccacctatattaatctaaccattttattaaactaaaccgacaggacaactatcaattattattattccaactaacgccaaaataaaaagttagcacttccttgttgtaccataaggagcacccaaattatcacatctataccacatctgttatttcgccttagtatttaccattattaatcatttttattgattacattttagaggcgaatgacaaagttatccctagcattccctttaaatcttctgaagatgaagataaagattaagtatttcacgtaaaacaaggtggtaataacgtgtgattaattgagttttaattattacaaacttgaaaaatggattaatatgatattttagagcaactttcatatagaaagttttcgcacggaatgtatcgtttaatagtttgaaaagcatgccacgagaatctaaaatttcatcctgcctctacataagaaacgaacggggcctcactttccatcctcctctgtcacactcttttgctctgatgttgatcctggctgtcgtctctccctgtgcgtctggctactggcatcaccacacttccctagtactgtataattaaaattgcatatatttgtttatttaaggatggaggagacggatgaagagttttaggtcaatggtgtcactgtcaactctcatcaacaatcatgtcttcaagtgaaccattaatgcatatcgacagtaaaaaaaaataaatgagaaattaagttttcttttaaaaaatcgtttcatcgtatcaataccatttgtctaattggtaaattaaattgtaaagcactacattaaaattagtgctacataaacatgtgtatatagcaacatcactatttttttaagggtgaaccttacactgtggaaggagattaggggcttgtttgatgaaacttttagcagctgcaacttctttggaatcaaaagatctcaagaagttgtaactccaataaatgaactagaagccttctccacgtattctgatggttagcagcacccagcctgctatgcaccataacaaagaacatccctcgagggcacaaaatatatagaaatagtgccaaaccaaagcaaagtacttcatattagagaaattgatcaagtgcccaactcaacggataggtgggactaaaatactcgcttatccattctactgaaatctttctgggcacgctggatttggaatgaacacaaaaatgcatccttcttctgggacagtcagctcggagtacactgggattccctagtagcatttctccctgacctgcagaatcttacgacaattaaggtgggagatgttaggcacacttctttttggcatgatctttggtaccgggagaacaccatggctgaaaattatggcccctctactcgcactctgtggacaaacatgctttcagtgtagcaggcgatgtctaggaagttgagaaatcaatttgtgtcaaggctctcgatgatggctgaagatcagttgctccaactagggcttttactccaagatcagatcttgacatcacaattagatatcagggacatgaatggagcaacaggtctgctgcagaccaaacaaatttactacgccgtgtgcgatgacatagacctgtgcagctgtgcaacaactggaagttcatttgggagaataaagcaccttcgaaagtgcagctcttcgcatggctcctagccaaggaaagactccctaccaagctaaacctcaacaagaagaaaatagtacaattgccactatgtgacctttgcaatggggcagatgagacagtttaacacattatgtatccagtgcccctttacaattgctctctgtagactgatcagtgttcagatcaacattttgactgtcaagaacatggcggatttgctgctcccactgcaaattccgatcaaacactactgggtcttcttccttctatgcttttggggcctttggaaccatcgacatgatgtggtactccgtggaaaaataacatatctacgcaggttgatcgtgaggtgcatcgacgacgctactctttggactgagcggctaatcgtggaggatatgaatgctttttcagcttggaaagaaatcatctcttcctccctttgatctcttgatttgtaatgaaacctgaactttacctcccttgcaatgaaaatacaggtgaggcagttctccccccggtgaactttcttaaaaaagataaaaaaaaataaagatacaaattggatatggaattgggggctccgacgtgtaaggaaatacaaacctagctacttccatgactgtgtttcactttatcacatgttgaaacaagacgacgtcagtctagacttgaatcaaatagcttgagttttagacttccaatagctaatttgttagctgttgtcgggctatccatgtccaaatgggctagcttgtctagctaaagtgtaaagcaatttatagactagtgtcacaaggaaagacttgttggtgtcactcgtgggactatctacttgggccaaggcagaagttattggtgtcttatatatgacacatgcccttgtatattggatctcacctttgactcacaacctgtaactgcccacgggctcaagatgctctattgcctctaatttttagaccaggtgtatggatgaaaatggtacggaaatttttttgaccataccgatgccgttttcattaaaaaaaatcgatatcatttttgattgtttctgactgtaaaatttagttttctaatgtttgtatgtgtcatattgaagttgctactaaatatatagttaaattcataaatgtagaaccgtttctataagactaataaaaattgtatcgtttccttgttcccccattcaatccttgcatgttgggcatcacaaaattgacaacactgccagctttatgcagctgcacaacaacagcttcatggtgcaatttctctttttttcagatcatagtactccctgagttgagaacttgtcttgccaattattgttttgaacatcaaaagaggcaacactattaaagtctgatgcaaagtagagtggagatatagctagccctatccaggtaggcatagcataatctttgctggagtcctggagctagcgcaatagagcttgcactagccagttcatgcaccttcctgtacttaacgaaatacccggatggatgcaccttactgtttgttacgcgaggcagatgatgggacatccagacagacagctgagagaacatctttaacaaaccatcgcccctccatttatatctgtgctagtgactaaaattaattaaaggcaaaaatttacggacataaatcaaatttatgttcattttctaaaatattattaacatatccatacattgtaacggactagacccatataattgagtcgattaggaatggactggagggtgaattgagaataaagcactggatcatgcaattattgcgcacactatatatgtgggaagcagcatacaaacaggttgcatgagcagtgagaagagatggaagtacgacgactcaacttttataatagtaaagatactaaaaagttaaaaatatccaggtgttggatataggtataccaagcgcattttttttctttcgcgggagaacaatatgcacactctgcctatgacattagttaatgatattaattcccatagtttcatggagtgatatcagcaatgttccctatcaataaagggaaatttcactatgcgtggtagttcgaaaggagcggaatattccccaactttgctgtaaagttgtagctaggttttaaaaggaaaagacccatgagatcataagggtgctctaaaaaaggcagggtaatgagtaggacagagtagtagagataggtttaacataacgaaagtgcaaacctggcactattctttagcaccgtacaagttcgcgagcccagaacacaaccaatgcataagtttctaaagtctaaacaatcatatcgctttctttccctttgtacatacaacaatcaaggcaatgcatatacaatttggcccaaattaacttgatttatctgggcaactttgacaagtaaaaaacctttgtgctgttttccatgtgtgtaccatttgtatttcttaaatgctaaagaaatttgccctgatcattgcaaccgcaactacattagtacaattgctatgatgatgatgctgaggccggtacaggcttaattgggtcctttcttggtgtcacaatctgcagagtgtttcagagcaactcaccatttcatcattgttcatcagctcagaaattcttctgctatactcacccacttgccaatttgccattgccaacaccttacaaagagaggcactcctccattgcaatgctccatggtagctagctagctgcacaccacaaggcttagaaagagtgtgtgagtgagagactgagagatgagcagccatgagaggttcaggctgtcccatctcatgccaaactcatggttctacaagctgagggacatgaagaggcccaggccaacatcaagccggatgatcaccgcagcagatcatgcagcaagaagctccaggagatcgtcgtcgtcgtcaagcagcatccaccactactacctccatggacatggaaccaccactcccaagcctctcccgttgtcaccgccgcgacgatcctactacccctacctggaacgagccaagcagatgccactgatggagaaggaatctcagctcatctcccactcccctctccaccaaagaatccccgccacagccattcccggagaccaccacgacggcgagtttcaagacttgcagctacgtcctatacgcacgaggccaccgtcggcggcggcggcgtcggccgagccgaggaggacggcgagcgggagcggcacgtgcccgagctcgccgaggatgaggagcaggaggctgcacgttctcggcggctgcgagtgtagggctggtagtggtcgccggaggagcggcggcggtgggttcgcggtggtgaaggcgtcggcggagccggcgagggacttccgggagagcatggtggagatggtggtcgggaacgggatgcggtcgccggaggatttgctggagctgctcgagtgctacctgtcgctcaacgcgcgggagcaccacggcgtgatcatggaggcgttcaggggcgtctgggttgagatcgtcgctgatgctgattgttgcgttgggttgtgagctatattgattctgtttttgtatagttggattgatcgaatcgattgagctgtaaatggatatattgtgccgttaatttttggtgttaatgaatcaagctggcatatgtacaatgttttgtcctgtaattaaatcgaggtattcaagggctatgcagggaaactctagacttcacgcttagttttgacagttagccatgccaaattaaacgaccgaattttttttccaaacaaattcttcaaatagctgcataatcataagcttgggaaattcacaaagaatacatgtcgctgatgattatttgtttgtgaacagtgactcgtgagaacaacgtagctacgtagctatgcgggacggatccgttagtaaggtaagacgtttgtggtgactttgttaatcttaaaatagggtgtgtttataaaaatgagtctgcgtgtatgcgtgtatatatatgagtatacatgttttcaaaatatctatggaagccatcgtttgacttattttaagcatataagcgcaacagcatatttacaaacaaaaaataatttttaaataaaacttttatatacgtgttcttagcgatctaaaagaaaaggctgaaaaataaacttcgatgaaaaaaaccttaaaatcaacttcaagtttaaggttaaaaatttaaattttggctgataagcataaacataaacataagtaaaaaagatgagtctgtatgtctttgacactagattgattggacaaccaagtacaattggtaccggcttggtatgggtttatcaaccaacacggtactggacacgttctttgccattggctttatgtaaggaggggtgaaatattagagataatcccttatatgccattgaaaattggtctgatcccttatatgtcactaaaaattggctcttcccttatatgccattggtctaaatttgcgcatcctctcatgctactaccgtcagttgaccgtgtgttgaacgttagctttcaagtaaaaaagacatatttgccctctctgagttgttaggcatgccctataatcaaaagggtaaatatgccttttttccttaagaattaacggtcaatacacagtcaactgacgggagtgacatgagagggtgtgcaaatttggattaatggcatataagggaagagccaattttcaatggcatataaaaggatcagaccaattttcagtggcatataagggattctctcgaaatattaagttggatatggatattgtcagataacaaatcacttatcctgtaacatattctatattattttcttcaaaatggattcatgaacgaatatccatttgtattttcaattgatagatattaaatatagacaaacaattaaagtgttaaaagagattcatcaaggaaaaaatatacgatattatcaagttaatcaatcttttattatggttgttggtgaatttataatatatttttaagtatgtttcataatatgggacataccggctataaaactcttattgtattttaacccatatttcttaacggattcggattaaaactcggataataacgaatatcctactttctcttctatattattttccttagagttggatcaggtgggtggtcaagaaatatccgttccgttttcgatcctgtaatggtaaatttgtgcctgttcttttctccaacaaagttagataaacttttggatgctcgtggcatgcttttcaaactgctaaacgatatatttcgtgcgaaaactttctatatgaaagttattctaaaatataagattaatccatttttcaagtttgtaataattcaaactcaattaatcacacgttattatcacctcgttttgcgtaaaacacttaatctttatcttcatcttcaggagattcaaacacctatattttccattttagcctcctttaactgcgacgttggtctcgcaagagtcccactgccgaacccagctacgtgtcgcccaacgcctctacctagtctctagatttttcacttttgatgctttaaaaaacttattctacaaataaaccccttaaaaacttattttaggaatgaacccttttcacggcgcattaacaacattggcgtcgtcctccttcaaataagtgacttagcatttagtgagggcaaggggaaccgtggcaacgtcattagcgttgtcacgttggaccatgacgctgttaatattagcgtcatcaaaatgatcaatttcttcgaataagtttttaggtatctattcgtggaataattagttttctaattggataaaaggtgaaaaatccacgccagttcctcctccctttctccaagcgccaccgaccaccgcccctcgccaggaatgtcaccgccaccgacaaggacgaggcaccgcgggaggatctccggcccgaatctcgccgtgcgccccaactttaggccagcggcagatctggtcccgctggatccggcctccgtagtccacagcctcgccgcggacggcatctcctcgccggagtcgctctcgttgctccctcaccagccgccaccctgcagcgcttccccccaacatcgacagcaacaaagctccctga

SEQ ID NO: 16692 - DNA, 14280 bp, Oryza sativa
aagctgttttgatctgtctgtccgcaggttaagtgtccagaagatagcaagatatcagcactgaacattgtgctttgcagcagtctatagtggcagactagcagtgcacaagcgagatatggtactatacttttgtcctggaatggccggttgattagttgaattgattgtaattaagcgtatgtaaaatatgtgatttattatctgagattgctgttgattggttagattcaatgtaactagcactattgtaagcttatgttatctgtactgaaagctaataaatactgttacactgaaatcttatattccttggaatggccggttgattagttgaattgcatgtaattaagcgtatgtaaaacatatgatttattatctgagattactgttgattggttggattgaatgcaactggcactattgtaagcttatattatctgtaccgaatgctcataaatactgttacactgaaatcttatattcctgttcaacgaatacattccctattcgattcattgcttttgtcaaacttcttgagtcgtacacattcaatgaaaaattttctttcgttcaatgaagtgctaactctctatgattggaaagtcacaaatatcccaaaactaatcgcaagagaacagagtacagttgttaatactgatatggtactagttagttcagtggcccagtgtcctgatagcacaacattgcgctatttgaattgaaaatgagggactctagcatattatgatccttcaggtttacttaacatggatataattcttcaagattcaagatttgataacagggtccaatcagagcactttcagacttccagtgttgccatgagcaatgcttataagcgtgcacccttgttactgaattattcactgaagtgctgacatacaacagaaggcttatcatcaaatcattttagacttaatggatgacacatcatatgagccctgaaaatacagaacaaaaatcacatcctcttacttgcactgaagtttccaaatgccacctataagacgaatgccacttcaccctggcactttttttgcatcaaattacaaaacaaacatgctaacagctgaaaaacagacccgcagtttccccattattatgcaagatagtaggatatgtactgacaagtacatcttagattatatttacatgtctgtcctgaagacgaacagaatgattccttcaaaactgattcattgcaaaaatgaagtcaagtgcacttgctgcttgttgcaacagatatgagcagaagtccggtggtggtggatcctaggcaggtgaactctccagtctgcttctctggccatagtagctaaaagagtggtgctaaactattggcaagagtggaaactgttgcggttaagaaattgcctcgtacctcttgctaccagcgcacttgttccgtgtgacttccaccaagtttcatatcccattatgtattacaaactgaagtagtatttacaattgaacaaacataaaagcaaattaagagtaagcaaatcgacagaaaaacgttattactatatgaaaaagctgatcatctcaagcagaaaaaagtcatatcctcactggccattagttcgattcactgacaaaactgaggtcatcggatagctcatatagaaaatatttaagcattatagcgctttcaggttcatgtccacagtttaaaattttattgtgagaaaacaaaaaaatcctaagacttcttggttcatcagatgtccttaaatcaagaattttattgtgagaaaacaaaaaaaatcctaaaacaaaaaaatttaatgtttctcagattccccgctatttgtcaacatcaataaaaatttaagaaaaaaatgtaatatgcctgtttgagatttcttggttcgattatgaattgtaatctcacgcatataccataaaatatatgattaatgtatacagtgattaccgacaagaactacacacaatctctaggccatctcttccttgtcctcttgttcatcagatgtcctaaagtgaaattgctcaaccggtacagtgctggcagccttcactatgttacgaaaatctttctgaactctgaattctgatgagtgtgaatggtttcaaatttctaaattttgtgtcctacaggtgccttcgggcttcactctattacaaaagtatttctgaacttctctgaattctgatggctgagtatttccatttcagaacaggacgcgagtaaaatcattcagaactgtagggtagcacttcactcttgtttatcttctccgaacagccagcacggcactccaggtctgtcatgaaacggctgttttgctttgatctgagatatataattgaattctttttgggacaattccgagggtaggatagggcctaatggagccaaacggttggattcatcccttgttgcttcattacaataacccttatttaaagtgttaacagcatcatcacatttaacaagaagtaaattctattcataattttaatcttgcgcctaaaaagtagaagacaaatgattaataacagtgattactgaaaagaactccagcagcacggtctctatggcatgtcttccttgtcccctcggcagtaagatgtcctacaagtgaaattactcaaccagtacaatgcctgcagacttcacggtgttacaaaaaaattttctgaacttctctgaatcctgatgagtgatgactcctaatgttttccatttctgaactttggggtcctgacaagtgtaaaacaccagaaggatgctgacaatgttgagaaaaggaagctatttcccctaagaacatctttgacataatttcgaaactgaatgaacacacgatcaacatcaaatctacatactctattttattaaaaccatctattatactatactctgtgttgtatttttcaccatcagttacatgattttcagaagtaaacaatactcattttccatccttcagttaccccagtgtccccaggccttaggtttattcccctccaaaacttcagaagttcagcacatgtgtaaaatctttcagaatttcaggaattggcacttggaggctgcggagagcattttcagatatcagaatcatcatggccaaagaatcatgagcgataattcaatttctgctcgaatttcgaaattaatccgaacaagttccaaaatcaagtcatttgccgttaaacctgaaccattgctcgcgcgtggtggcaacgcagtctcacgctgacgtcaccgccttccatcaattcaaatcccgccgccttaccaaggggatccacgcgcaccgctctttctttcgctcctcgtctcctctcgcccacgcttccttccccccaaaaccctagaaatcctcaggcgccgcgcgcgatccagacagcaatggcggcggcggatgggctcctcccgggcctcaagttcgatcccagcgaccacgacctcgtcggaaggtacctgctccggcgcctccagggccagcccctcccgctcgacggcgtcatcctcgaggcggatcccctgagcgcgccgccgtggaagcttctcgcggatcacggccgcggcgacgaggccttcttcttcgcggaggcgcatgccaagaatgggaaggggaagcggcagaagcgcaccgttgagggcggcggattctggcaggggcagcccacgtgcgttgacggcgagaggctttgcgtccccgacgacggcgtcggcagcggcggcggcggcggcggcttgcagatcgcgtggcgcaagtacgtgctcagcttcttcgcgaacggagagaggggcaagttcggatgggtgatgcacgagtacccggtgacggcgccggatggcctcgcctcgtcccaattgcggctgtatcgcgtccgattcagcggctacggcaagaagcgcaagaggaagccccaatgtccgggagcccacggcgacgacgacggcgagctacaatgcgcgccgcccccgcgccccatggcgaagacggctctgctcgaggagcgtgggccactgccccatcccgttcttggccctgcatcggtggtggatcagtgcaccgatcagggctcatccggcgtgatcgacgattcttcgctggtgtttcgtgatcttcccgacctgattgacctgccagttgcggaggaagcagatgccagccatggtgcagagactgctctgctcaacgagcacctgccgctgccgccgccacagttgttcgttccccctactgcagtgccgctggacctcgccgatgactctaatggcgccgatcagaactcctatggcatgatgggcgacgatcagctgctgcttcctgaccttcccgggacaatcaatgacgacatgccagacctgttcgtctcccaagcagaggaagccagtgcagtgcccgcgatcagctaccactcgtcgggcttcatgggcaacgaggttgcggcattgtctgattttgagttgccggagagctattcctcatctgatgccatggacggcgaggcgctggcattgtcgaattacgagtttccagagagcttcgaggaggatctgagctgcatcgacttcgccactgccaacgcgagcagcctcggcttcccaatggacggataccccatggacgagctgttcgatgatatgcctgaccagggctcttccggcgcgatggacgattcatcggtggtgttccgtgatcttcccggcctgatcaacctgccagccgcagaggaagcagatgccatcggcgatgcagagactgctctgctcagggatctcgccgatgactctaatggcaccgatcgaaactcctatggcgtgatgggcgacgatcaggatcggctgctgcttcctgaaattcctcggagaatcgacatgcccgacttgttcgtctctcaagcagaggaagccggtctcggtggcggtgcagcgctggactcctcatcgggcgccatggacggcgaggcgctggcattgtccgactttgagtttcccgagagcgtcgaggaggtgctgagctgcatggacttcagcacggtcgacatgagcttcttggacgtccccattgacgagctgctagatgatctgcccgcagactgagactaggcgtcatggagttggcaagtgatcaacagatattgcccttgtagttgcaggaagagatttcttcagagattttcttctctagtgcagaggcgagatgttcaggagttttgtccaggaacaacttgtatttattactagttgattagctgattgaatgtaattaagcatatgcggaacatgtgatttattagttgaggtatttgttgattagttgaattcaatgtaagtaacattattgtaagtaatatcactattcaatgaatatataatccttattcaattcattgctttgtcaaactttgggtggtgtatattcaataaagttgtttcttccacatttcatgatgtggaaagacagaacagaacagaacagagtacaacattgtgctgtttgaaatgaaaacaagtatcttcatccttcaggtttaatcagcattggtataatccttcaagaatggacagcaggctccaaaaacatcattttcagatttaacatgagcaatgcttatgaccatgcaccattgttactgaattattgactgaaagtgataacatgtaacagctcatcatcagttcatcactcaacacaaaagattttttaccacagtggatgacacatgatataagctcagagaacatagaacagccatttcagataacatgagtgccactggcaccctgtcacttttcttgcatcaatttacagaacatgctagcagctgcaaaacagcgctgcagctccctaattcatgtcaagtaccaggatgtatacttacaattacatcttacattacatgaaaatgcatcctggcccgaagctacctgtctgtgagcggttgatcttcatcaccagggattggaaagtcaacattaatccagctcctcatcaaccgccaaaccgcgattgtaaaattacaggccacgaacaggtggtggcagtcctcattatctcgctggcagagtggacagacttcatcgtggggccagtttctcttcgccagattgtctgccgttaggcatcttcctttcagggctagtcacatgaaaaaacagactctcaatggtgctctggagtctggagtgcctcagcatctctccataagggcagtcctctttggccatgaagaaaagatcatatgccgaggcagccgagaattgccctatctccagtcagtttcaatctgattgcatctgcattaggctgtagagccacatcatgaacctcgtcccaaagctgaaagaagtcacccaaggcttcattgaacaaggaaccctgcaaatctcgcacccatctatgattaaccatggcctgggcgaccgacaacctggagtgtcctacataggagtacaggataggccacctccaggcgaagcaaccatttcccgtccaatttgtcgtccagtatctgttatcagctccatcaccgatgatatattcagccactgatctgaaaatgccatctacatcatctcccatccgatatgccaccatggtccagggcctctccttctgtgctcaaccgattaacagtatgattcctttgaaactgattaactgcaatctaaagcgagcagcaaaatactacactgccacaattttctaaaaactcagttgggttattgtctacaagccaactccagcaagatgtgtcacctccacttacgcaaacgggtcatatatgtcctagagtttcgacgagcctagccagcagttgttttacattgtactggggtactctccagtccagccttgtttctctactctctactatcttgccagcagcacttgtgccgagtgacttacaccaagtttgatatgaacatcttctgcaaactgaagtactatctacagaatacaattaaagaaacattaaagcagattgatggtaacaatgtaaattaaaaaaaaatattagtctctgaacaaactgagcatcttaggcagaagaagccataccctcaaaattcaattcactgataaaaatgaggttaaccttcatgggatggccatgtaattcatcttgctcacttgtggatcatggaggatgagactacaatccatttagccaaaaagtgtaaattcttcattcatacatggaaaattggttgctcatgatttggccttgatggatagattcaactggcacaatctgtccaaaaaagaaatggcattatacactgggaggggggcaatccaaggagatagaagactaatccatggatacctataattatgtcctgataaaatgtatctaagaaaatgaatcataactagttctagcaattttattactgttagttgtggcatccatttcatccaaattgtaactgagaacctctatgagtgcttctttctattcttcttaattgaataagcagaaattcttgactgtaaattttatctttggagaagattacagccatggtttccaaaatgataagttgttcagtactaacaggcatcagcagagttaattaatattgaagtaatttgaacatcaccaaattcaagtattcaacagagagaagaggatcatgtatgagataatactgaagtcaacatgagtagtgcacaatctaggaaggtaaggtcttcccatggtaaactgagatggaagggaagctaacagccagaaagctccaggatattggggtcggattgctcaacaagccatcggagaccttgtagaggcctgtgccactggagacctgcttccagtcagtgctggctcctggatcatatatgcagagcggttatacatataattccagcagtggctgtacatcgtactgggttactcaccctccaatgtacctcgcgccccttgttagcatcatttgtgccaagtgacttcgaccaagtttaatcttttcatcttttgcaaaatgaagtactacctagaaatctaaaattaaacaaacatgaaagcaaagttatctgaagaaactaaacatcacatgcagaagatgccccaccccattagtgattagtccaattcaatgataaaactgaggcactacatttatggttttccaacatcgtcaggacctgcaccaattagcatcagcagattcgttagactcgttaaagtgaggccaaattcagcagagagaaaaagatcacgcatggaggaactagtgcacaatcgagcaaggcctccatggtaataaataggggaggttaccttgctgtgacgccggggttggggggcattgctcgttcgcccacgggttccgccatggctgttcgagctccaatttctcggtcacaaatagatcgaagcgcttgtcgcccgagaccttggagacgactgcggcaatggagatccgcttccaggccgtgcccccccacgacggcgacaaagcacaccattcccgccgccgatatgtcgatgtgccgcgggtcgtggctcctcgccggaccatgctggagccctcccagcgactcagggagatcggagatggagtggtgcggcggacgacggcgcggcggccactggccggtggggagtagtccaaacagagaacagacaggctgagattctgtttatgtgggctcggcacgatttgattaggagaaagtccattattagtcatttaactataaaaaaacgtccaaatatcctctgaactttaaatgaaagcacattcagtattctaatgtttcttaaggaaacatagtacaaacatagatactcacaacacacgtacaattacccttataaatgtacacacatcataccccttacgagtatctccgaaaaactattaggccgacatattgtctcaaatctagatcctgaatctgggtgggctaggaaccagaagaaacagtatactaaattttaaaaccagacaccctaaactttataataccattcatatgacccctaaaatggttttttatctaatttgtaaaacgttaaattattagacatatatgttaaaaatcttcacttaaatacttttttttaccctatgtttgctctcacttgaaaacgaataccaactagtatgatatttttatggagcataaattaagaactaaagattgatgatatatatatatatatatatatgttatattctttattcaaaaactgtctgtttaagcatcaaaatatgcaaaaccaccgtccaaaaccatcttatgatgtaatttaaacggtattgtaaagttcatagggttggggattataagtctatttaaaagtaatataaataatagagaaaaatacaaattactcctgaacaattgcgacagtatgaattaccccaccgaaccacaaaaccagatatatcacaccctcaactattaatactggacatataacccccctcaacattgtttttgaccggttttgacttcaacttgtacacgtggcgccaacgtggcaatccagttagaaaataaataaataacccctgggcccacctgtcataaccctttatcaacccaaccccccctctctctcgccgtctcgcacacacgctaggacgaccggctgcggaggaggcgcacacgctcgggcggccggcggcagaggcggagctcgcccgggagtccggcggcggaggcggagattgcccaagtggtgggctgctgaggtggaactcgcccgggcggccggtggcggaggcggaggtgagtggtggcggaggcggtggtgagcagtggcggtgttggtgctgcgcacgatagagtactcacgctctgaggaagctggaggccctcctcgccgcgtccaccgcctgcccttcccaccgcgcccaccagccaccctcccccgccgagaccttgtctgtccagaccaccgccgacgtcgccgccttctctgcctggactgctgccgctgccttctccgccccgaccactgtcgctgcactgcaggaaaggggagggagtcggaacagaaggaaaggggaaagggatgagcggcggtcatcggcactcctatgcagctccatctcgtgcatcgccgtcgtggacacggccatcgacaccctcgccacttcgctgccctcctcacccaccacgacgccctcagcctccagtgcgactccctcagcggcgacgccgtgctcccgtcgcgccagtcgcccgctctccgccacgcccgccacccgccgcgcccatctccggccacctagtcgtcgctcccagcgacatctgaaagagacagacgttgagaggaagggaaaggggaaagagagaggtgggtcccaccatgttttatttgttttggctgacaagtgggtcccatatcttttttatttgttttgctgactagagtgccatgtatgcatccacgtaggatcaaaactgccctggatcgacctagggggtaattcatccggtttgtaaagtttagggttaaaaataaatggtattggagtttaggggggtaactcaaacgaccgcgatttttcagggggcaattcatactttttcctaaataataacatcatatagccataccatatccatctcaaatcacaggtagcaccaattaacgaatatttgagccctacgtgggtgcggctagagacacaatggcagatctggtatgtttgagggagatttagaacgaacggtgtgtacacccttcctaacccttgtgattcaaccttaaaatgctcggttgctttagagtcttctcgcttcatatcaccgtaccaaacgcccaccttgttggctgccgtcataccttactcgcttacaagagagatcgacaagagctctaagattcgaccaccaaatcaatcttctatggggaggagggggggagagtgaagatgcacttaaacccctagtgggttttggtgattaatgacaaggtggttaaaggggactaacgtgtttatcaagtttattcacaggagtttagtcccaaagcaagttgtgatggctaagaatgcaaggagaccccccaatttgaatgttcctaagtgcgaaaaacatcgaaggtgattagactaggtttttctctttcgaaattgagtttaggaaaaacagtactattaagaggggtttcaagtgtggttccagggtatacaaagtgctcttagtcatatccatgagtctaaaggtttttggaactttctttttttttcttggaaatgattttcctcgggacagagagggctactcggaggttctggccggaacttccgggcaccgaagtttagctagatttttcctaagtgctaaccggaagttcctggcacttttgcccggaacctcctggcaggtttccagttcaatcttgtgagtaacggctagatgacgtcacctagccgttatatatatggatttcgtccccaggtcaccctttggccattccacttcagttctttcatgttctagggttttctagccactcccaagcttcctttgcttcctccactcaaatctatagcctatcttgggagattgagagattagattagagtgtaggagtgttttggagatggcttgaaaattatgttttgttgagcactttggatactttgtgggctgtcacttgggcttattactcttggagatcttcttctagatggttaggtgttgcccgtgagcttccaaagatcttgtggatgtccctggaaagtttgtgaaggatttcctcaccttcgcaaggaaacgaggtaagtgagtaaagattcttgtgctgagttttcagaggttgtcctaggtagagcaacttacacttgtggtcttttctagaaggaattgtgagttggatcttggtggtcactcaattctagaaaatgacctagaagtgttgagttgaaggctgtggacttcttctgggatctttgcataagtgaggcaaggggttaatcgagacccggctctttgagcacctctacggagagtaggatccgtgtgatccgaacttcgggaaaaaatcgcctttgtctctctcgtgcatgatctgtgtttgaatctgctggtatcttgtgatttacatcttgtgcaaccttgtgcctgattgtctatagctaggacctgttttgcttccccaaattttgattttctctgttgcccgaaagttcctggctcaagaactccggaagttccgggctgctcatctctgccaggaagttccggtgttcttcaccaggaggttccgggcactgttaatttaaccgctgcgattgttgagaaaatttcaggaaagcctattcaccccccctctaggctacatctctacgcgttcaattggtatcaaagcaaggtgctcttgattcaagcttcaccgctttgagcgatccacgatgttggacttagggggaaaggacggggaaattggaaatgaagatggagcgagcagcaagggaactccatctcccaagggagccactataccttttgattacaggaaacttaccattccctctcacaactttgtctccgtaccttccgggcgtgctcctcaatttgatgggacacattacgccgcttggaagcacaagatgaagttgcatctaatctctttgcatccaagtatttggaaagttgtgtgtacaggtattgacgtacctcatgaggacatggagctcacttcggagaaagaacaactcatccaccgcaatgctcaagcttccaatgcaattctctccgccttgagtccggaggaattcgacaaggttgatggactagaggaggccaaggagatatgagatactttgcaattggctcatgagggatcacccgccgttcgtgaggcaaagattgaattattggaaggaaggctaggaagatttgtgatggatgacaacgagacaccacaagagatgtatgataggatgatgatccttgtcaacaagattaaaggacttgggagtgaggacatgacaaatcactttgttgtcaagagacttctccgtgcttttggtccaagaaatcccactcttgtttcaatgatacacgaaaggaaagacttcaagaggctcaccccaagtgacattcttggaagaattgtgtctcataagatgcaagaagaggaagctcgtgaagtgagacaaatggtgaagaatgccgccatgatcaaaaatcaagaagttgctttgaaggcaaaacaagaagaagagtcaagtggtgaagaaagtgaagatgaagaaatggcttttattgtcaagagattcaagcactttcttcgcaagagtggctatggcaaagggaggaaggttgatgacaagggaaagaggcaatcaaagagagcgtgcttcaattgtggcgaatttggccatttcattgccgattgtcccaagtcaaatgaagctaaggctaagggaggcaagaagaagctggaacgtgctcatgtggcggaggcacacatggcggaagtgtggtactccggagatgaagaagatcccgaagtcaagcccaagcccaagtcaaaagacaaggttgaaggagaaggtggtgttgctactgtcaccttcaagtcatcctcttcaagcaaggagcgtctcttcaacaacttgagtgatgacgacgacgactcctaccactactcttgcttcatggcccaaggccgcaaggtgatgactcaaaagccctctcacacttctcttgatgttgagtctagtgatgaggaaagtgataatgaattagatgatgtgcttaagagctttagcaaacccgctatgcaacacttggctaagttaatgagagctttggatagtacagaacaattactcgtaagacaagaagaattgcttattcttgagaagaaaagaaatcttgccttagaggagagcttagctaaagaaagtgctaaaaataaacaactagctaatgagcttaattttgctaatggttctttagctagccttagagatgtcaatgagactcttcaagagaaatttgcttgtttagacaaaagtcataaagttcaaattgacactctttggaatagtacctctcaaccaaatgtggtttctaattcctctaacccttctactagcaatggttgtgctaggtgttacaatattgatttgaactcttatgctactaatattgtggagatgcaagctcttaagaaagagaatgaaaggttgggcacattggtgaaatatggatgcatgaagacataccattcaaaagatgccctttacaagaccatcaccgctcatcctaacaaggatggacacgg

SEQ ID NO: 16693 - DNA, 20043 bp, Oryza sativa
  unsure (1)..(20043): unsure at all n locations
gagcataatgctagaaggttctggcaagatggtctttactatgattcatatgtaattttcaaaaattcagagggcaaagtggttgcttattttaatgggaattacaatgatgaatatcgcacttgtgtgtgggtgccaaaggctttggtaactaacatcaagggacccaaacttagacaaatttgggttcctaaatcccaagcttgatttcttttgtaggcatactcctccggtggttcaagttgggttgtggacagtggttgcaccaatcatatgactggagagaggagtatgtttacaagtcttgatgaggagaacggaactcgtgagaatattgtgtttggagatgatggtaaaggaaaggtaatgagtctaggtaaaattgccatctccaataatcaatctctctctaatgttcttcttgtcaattcattaagctacaatttattatccgtttctcaattatgtaagttgggttacaattgcttgtttaccgatgaggatgtgaccgtctttagaagggatgactcctccgtagcattcaaaggcaagttaaagggtgatctctatcttgtcgatttcgatgtggatagagtgaatccggaagcttgtttgattgctaaatcctccatgggttggctatggcatcgtagactagcccatgttggaatgcggaatttggcaactcttctaaagggggaacacatcctcaggctcactaatgtcacatttgagaaagatcgtgtgtgtagtgcttgccaggccgggaaacaagttgggaatccacatcctatcaagaacatcatgactacaacacgtcctcttgagcttctacatatggatttattcgggcccatggtgtacataagtattggaggtaacaagtatgattttttcattgttgatgatttttcccgcttcacttgggtgtattttctccatgacaagagtgaggctcaagatgtcttcaagcgcttcgccaagcaagcccaaaacctctatgatctcaccatcaagagggtgcgaagcgacaatggaggagaattcaagaacactcaagtggaggaattccttgatgaagtgggaatcaagcatgagttctccgccccatatgatcctcctcaaaatggcattgttgagaggaagaaccgaactcttattgaagccgcaagatcaatgcttgatgagtacaagacttcggatattttttgggcggaggccgtgagtaccgcatgtcatgccatcaaccgcttgtacctccacaagatcttaaagaaaacttcatatgagctcttgagtggtaagaaacctaatgtttcatattttcgtgtctttgggagcaaatgctttattttgagtaagagacctcgctcatctaagttttcacctaaggtggatgagggattcttacttggctatgaatcaaatgcacatgcctatcgtgtcttcaacaaaacctccggtattgttgaagtcactagggatgtgacatttgatgaatctaatggcttccaaggagagcaagttgttgtacatgttgtaagtgacgtggatccaagtcaagctataggtactaaggctattggagacatacgaccagtcgagacgcaggatgaccaagaagacagggatcaaccttcgtcatcgacatccaatagccctaaattgagtcaagtgtcagtcgacccggaagttccgggaccagatggtcggaacctccggacctctccaggccaggaagttccgggtccatctgccaggaagttccgggcagaggacagtcaaggcgtgcctatggcacaagtggatgggattgatgccgagggcactgtagagcatcctgatcaggctcaggtcccctcggtgcaccatccaagaatacatcacactgtccaaagagatcatcccgtcgacaacatacttggtgacataagaaagggggtaactactcgttctcgtgtcgctagcttttgtcaacactattcgtttgtctcttctttggaatcaaccagggttgaagatgcacttggtgatccggattgggtgatggctatgtaagaggaattgaataacttcactcgcaatcaagtatggacgttggtggagagatccaaccaaaatgtcatcggcactaagtggatcttccgcaacaagcaagatgaacatggagtggttgtaaggaacaaagcccggttagttgcgcaagggttcacccaagtcgagggtctcgattttggtgaaaccttcgcacccgttgctcgccttgagtcaattcgaatccttttagcctatgccgctcaccataatttcaggttattccaaatggatgtcaagagtgcctttctcaatggacctatctcggagttggtctttgtggagcaaccaccggggttcgaggatccaaagttgccaaatcatgtgtacaagctccacaaggcgctctacgggctcaaacaagcccctagggcttggtatgaatgtctccgagattttcttttgaaaaatggttttgaaattggaaaggcggatactactctcttcactaaaaaatttaagagtgatttattcatatgccaaatttatgtcgatgacataatatttggttctactaatgcctctttttgtgaagaatttagtagtatcatgactaaaaggttcgagatgtctatgatgggtgagttgaccttcttccttgggctacaagtgaaacaagctcaagagggtactttcatctctcaaaccaagtacgtgaaggacattctcaagaagtttgggatggaagatgccaaacccatcaagacgcccatgcctactaatggccacctagacctcgacgataatggtaaatgtgtggaccaaaaggtatatcgctccatgataggatccttgctttacttatgtgcatctcgtcccgatatcatgtttagtgtatgcatgtgtgctcgctttcaagcggagcctaaagagtgccatttgattgccgtcaagagaattctaagatatttagtccatactcctaatcttggcttgtggtatcctaagggttgtgactttgagcttttgggctattctgattcggattacgccgggtgtaaggttgatagaaaaagcacaaccgggacttgccaatttcttgggcggtcccttgtttcttggtcctccaagtagcaaaattccattgctttatccaccgccgaagccgaatatgtcgccgccggttcttgttgtgcccaactcctttggatgaaacaaaccctaaaagactttggctacaacttcaccaagatctcactcctatgtgacaatgagagtgccatcaaaatagccaataatcccgttcaacattctcgaaccaaacacatagatattcgccaccactttttgagagatcatgagaccaaaggagacatatgccttacccatgtgagaaccgagacccaattagccgacattttcaccaagcctttagatgagaaaagattttgcgagcttaggagtgagctcaatatcttagattctcgcatcattaggtgatgggtgattggctaatttatagtcaaacatatgtcactaaaatgtaaattagaaaaaaatgagcttttgtgtcttgagatcacttcttgtatagaagatggtcttgataccaggaataaagcttaaacattccccttttatccaaaaacccttttgtgaaaatttttgcaaaatcctttgtgtgccttttattgcgaaaatttgggttttatttccttcttgtgatgtattgtgaccatagttatgtaatgttatttgttggctggtcatatacatcataagtctcttcatgtccatagttcctaattttccttcgttgaattctcatcacctccttgtttttgggcctgactgccctttatctgtctggccggaagttccgggcctccctgtccagaacctccgggtgtcggggagtttttactctcagggggagttagaaaccctagtctctctcctcatttctactccctccccgacgccagccctagccgccgctacagtgcccctagtggcgatttccttttccacccgtgaaaatttgattcttcttcgtggaatcaaccacattggtggctaggaggatcttcccgcgatagttctgcgatttcctctctcaaggtagcactttttgattccctctctcggttcattgtgtttttatcccgatctctaaatctgtgaacctagggagaaaaccacttggatagtcttgtttctgctaccttgtagatcactgatctataggatttgttcacatgcactagctatttttgagaccactgttctttatttttgccggccggaagttccggtgttcttacacccggaacctccgggcgctgtccagccagccagccactcttgattctctcatttttttacctaactactgcactccaatttattgattcctgttgcagtaagcactataacttgtgagaaaagatagaaagtttctcaggatgtgtccggtgatgagagtcctcctattcgttttcctcgtggtcgtttgggaaaagagaaagtggttgaaggtggcagtggcagcggcactcgtacctctcccaggtttagaaggcaaaccagcaatcgcccagttcaaattcgagatgttgacagtggtcagggtagtgatgctccttcttcaagaggtcgtgggagaggtggtggtcgctcttctggggctggaagggcttctcatgatttccctgttgggtctcgtgagaatctcgttcggctctacaagactattggttttgacaccactcctatgcaccacattgggagacccaagtccaactaccttcatcagcttgccaagtgccgaaggggccgattgattgatccagagacacagcctgaggagtcacaggatccacgtttcagaaccttaactcagttggattggtacaactcagtgattatggctagagacaatctagtggttgagatgaagtggattgattggacttacatgaggaagaaaaacaatgaagtgttcaatcaagcaatgcaagtttgccacaacaagaatcttggggatattcttgccttggagtatgattggaatgaggaggtcattgcacagttctatgcgacagctttctttggttctacaaggaagggaactccttatgtaaaatggatgactgagggtgttaggcacaagatttccatagcacagtttgctgagatattgggcttggaggatgaggatctcaataggcctaatattcatagtgaagcacccctccccttgatcaagaccaagttcatgtatactaagaatgctcctagaacttgtatgggacctactcatggtttgcatccaaactacaaggtgttgtactccatctttcgttggtctttgcttccaaaggttggagatgccactgctttgccttccaaacatgctcatcttctcagtcgcatgcgctacaatcagcctcctttcagtgtgaagttgatttggtatgagattgccaacaccattcttgagcctaagcgaggttgcatctatgctccattcattatgaagatgattgagtcagtcaccggggtgttctacatcaaagatgggcgccacaatccttttcgtcctcgtgttccaccatcctcttcttcagtggcacctagatccatcccctctacctcggctggtccttcttctagtgctccaccgccatcctcgagctcttctcccatcaagaaggcacttcaggcaatcttctgtatgtgtgctaagactgcaaagaaagtgaagaagatagaaaggcgtcagaaggaagatagaagagaggctgggaaagaagtgtcagatgattctgaagatgaggtctatgtggatccttttgaggcttatgaggcagcccgtaatgttgccggtgaaggtccatccacctatttcaatgaagagtcttcccaatcagatgatgatgatgatgatgatgatgatgaggatgacattgacgcagctgctgagtatgttcctactgatgttgaggaagctgttgacaccgctgcacaatccgatgagtctcatctctccggcgataccgagattgttccctcagatggagatggagatgagtgatcctcttcttctcttcatggtttcttgctttttggtgccttgatgccaaagggggagaaattgtgaattgaagggggtcatttaatcattttttgctgccttgactgttgtctagtcatttggccggaagttccgggtcctgtgatccggaagttccggccaggcagattccctccctattatctatctctctatggacatgtaatcatattctctattggttggaagtaatgactgttagatgctttatcatcctttatgtcagcaagttagaccatatggatgttgcattttgatgtgatgatgtaatcttttcatctttttgagtgattgccatgtcatctagtttttcaatttgcatcactctttatttaagctctctcatctgcatcttatttgtttaaggatagtgtgaagttacctttgagctttccttcgtttttatgcatattgtatttcatctcattttattatatgcatatctttagggggagcttcatacttctctcatcattccaaatttaaattctattatctttttgtgtgctttaaccatgttgtcatcaatcaccaaaaagggggagattgaagatgcacttaaacccctagtgggttttggtgattaatgacaaggtggttaaaggggactaacgtgtttatcaagtttattcacaggagtttagtcccaaagcaagttgtgatggctaagaatgcaaggagaccccccaatttgaatgttcctaagtgcgaaaaacatcgaaggtgattagactaggtttttctctttcgaaattgagtttaggaaaaaccgtactattaagaggggtttcaagtgtggttccagggtatacaaagtgctcttagtcatatccatgagtctaaaggtttttggaactttctttttttttcttggaaatgattttccccgggacagagaggcctatccggaggttctggccggaacctctggacaccaaagtttattttctccccgggacagagagggctacccggaggttctggccggaacttccgggcaccgaagtttagctagatttttcctaagtgctgcccggaagttcctggcacttttgcccggaacctcctagcaggtttccagttcaatcttgtgagtaacggctagatgacgtcacctagccattatatatatggattttgtccctaggtcaccctttggccattccacttcagttctttcatgttctagggttttctagccactcccaagcttcctttgcttcctccactcaaatctacagcctatcttatagattgagagattagattagagtgtaggagtgttttggagatggcttgaagattatgtttgtttgagcactttggatactttgtgggctgtcacttgggcttattactcttggagatcttcttctagatggttaggtgttgcccgtgagcttccaaagatcttgtggatgtcccgggaaagtttgtgaaggatttcctcaccttcgcaaggaaacgaggtaagtgagtaaagattcttgtgctgagttttcagaggttgtcctaggtagagcaacttgcacttgtggtcttttctagaaggaattgtgagttggatcttggtggtcactcaattctagaaaatgacctagaagtgttgagttgaaggctgtggacttcttctgggatctttgcataagtgaggcaaggggttaatcgagacccggctctttgagcacctcaacagagagtaggatccgtgtgatccgaacttcgggaaaaaatcgcctttgtctctcttgtgcatgatctgtgtttgaatctgctggtatcttgtgatttacatcttgtgcaaccttgtgcctgattgtctatagctaggacctgttttgcttccccaaattttgattttctctgttgcccgaaagttcctggctcaagaactccggaagttccgggctgctcatctctgccaggaagtttcggtgttcttcaccaggaggttccgggcactgttaatttaaccgctgcgattgttgagaaaatttcagggaagcctattcacccccctctaggctacatctctgcgcgttcagagaggagaattaaccatgtctgatttcttcttgggctgatcttggtgccagattgatttgctggggattgttttttttggcaaaatcatgtaaggattttatgttcttttggaataattaagcatttccttgtttcatatgtgcttgtttgacatggagtttatcttaataagcatgtcaagagattgaaggttcaactagatttgtttgggattttagtagcagaacggagcttgaaagtccccctttttttttgacaaattggcccttatgaaaaacttattgcgaaactaacccgcacaaaaaacttcaaccaaaaataggtcgcgggctcagcgccaagcaccctggcgctgaggttggccacatccgcaccaaccgcttcggcgctgagctgagcactgccagtgtggcagcccagccgctcccccacacggacgtggcagcgacctcagcgctaggcccgttggcgctgagctagcggcatatatgtcgtggccgggccgccccagcccgaccctaccttttttttcccagagaagctagggttcttcgccccccgcgtcgccctctctcctcccctccaaaaataccctcaaatccacctcaaatcgaggctatttagtgggcattgctttggatattggtttgcaaggtaaatcccctccaaaaaccctaatttccccaatgtttccctcattttttagagtattttggttgaaatcgtgggttgttaaatattgctcggggtgtggtgttgattagggaatatgggtaagggtgcaacgttatagttgtatattgatgttagtatagaggattcatattgtttttgtaagttatgcactattttgctaagggtgaagttgagatggatgtgtagagccgttgtattgtgaatattttggggattcatattgattaatgttgatattgaatggcatagatcgtaggaacattgtgaccggtggttagtcgttagaatttcaaaaatcttttccttaggtctggggtacccatgtcatgtttctatttttatagtgacatatattgatttacttaaacgtcgtaggaatggctgaggattagctcgtcaagtcatcgaatttttcagaaacaccactcacctctagataattaggtatgccacgtcatttgttttttttccaaaaaacccccctgcacttcctattaattgtgcgcccgttcccgccgctatcgtctgttcgatcacgcgcgagggactatctggctgtccacgtgtcccagcgtggctgctcttccaccatcgtgagatcattggatcaggaacggatgccctggatttgccaagaaccctagccacctcagcctccttccctcgacctcgcgcggctctcttctcgctcgccccgcctcgccctcctctcctcacgcgtgtcgcctcctcactctcctctcgccgccggtgcatgttggtatttcttacgatcacagacaaaatctgcaagcgcacggatataccgatgtagcacttcccctatggagtattccaagggtatcgaatccaagggaacgtgtgtggtcagatctttctccggttcatccaaggacaccaagcaaatgataggccaggatagagaggatttactagtgagaaacagtgtctagggaaagcttaactttaatcctaatgcaatacttcaggcactggcaacccgttgttcccagatgttgctctactacgtacccggacagggaagacttaagtaatctcgagggctgtcactacctctacacccacctcaaacgtactatgggatacgcagcaattactagataacaattacctaaacaccacgtctaagcaattactatctactttagtgtttataactcaccaaagtaatcactatattttagttgattatagtgaacaataatcccgtatgctatttaggaactaaccaagagataattcccacaagataaatctaaattactcaagaagaatattatattaaattcagagtaataaacagaataaaagaaataggagaagattaccgacaactccggaattcttccgactccttctactctactctcgtcctattctagtatacaatatagtacaatagagcctcttataattcagctcaagcttggaagtaagtgatatgatgtctttatataggggtaggtatgacggttggcgaaggggaaatgtccgaagtgccccacaaccgccatcagggagtgatctgggacgtccatgccaaaccccaggatcaacggtgatcagggaggttcggccgaaccaggccgaacctaggctgggccctcctggcctggccttcggtcagtggactccctgaaccttcctctatccatttctcggaattttgggttaattcattgatgtttcgatgaagttcataactcatccttgtatggatacatatttctcctcactttagtctgattttcctcccaacttcaaggtttatcacctacatacaaatatacaccaatactatggaatatgtgagattaagcacctatcactatgttggatgttttattatccaaactttatgcaaatgttggcggtatagaatcgatatttaacagccgccaacagtgcaccgccccctctttccccagtcaggctgtctcatctgccagcgggaaggccgggggtgttgaatccggcgaccccctcctcttcgcaggcggatccggctgcccggacgaaagtgtcgtgagccaccgctatcatcttctccaccccgcttggtgtagtgccagatccgctgggaggctgtcgatccggcgcttggtctcccctcgatggatccggccgctcagtgccttggaagcgagggagcaagccactgccaccaccatcttctcctctccttctccgcacgtccaactcccctctctccctctcagcctacctcctctgctcgcgtgcgccgtcgccgccgcatctcccttctcctctaccatgctgctaccaccgcttcttctcaatgagccgccgaatctccaagaaagaaggcaagggccgccgaatccggtgaccccagtctcctcgctgncggatctggcgtcaagaaaagtacaaagtcgtcggcgccttttctcctctttcatccctgccacgccattgcctccttctccgttaacttctccaccacgatcagtgcgttgcgcgcggccatgccctgttctcttcattcctcgcgcacaccgtcaccgccgtaacatcaccgtccttctcgtccctcgcgccctcctccagcctaacatgacttggtttgccagcgcatacgagcggacaggaganatcgatataagtcacaacctaaaaaggagagaggacaactagacttatttaaaaaaaaaaaagcactacaggctgtcgtattcccgtgccttcggggtggcccagcacggcccgaccggccgacccttattgggttgcgcctgagccgtaaggggagcacgtgggctgggcccgaccgatctcgggtcgtggcggactgggcggcccattagaaaagtacagtatgcgcacgattttttttcggttttagatttttttttaatatttacagaaataatctatcgaccaaaaaaattgcagaaatagcccctgccgcccacctctggggcggcaagctgacgtggcaaacgggggaggaacgggcggtgacggagggagggttttttcaggaaaacccttgccgccctctgatggggcggcaaggggcccgaatgcaaaaaagccagtcggggccggctattttgcaggcggccccttgccgccctctggccgggcggcaggcctcgctgcctataaaaggcctgctgcccagcccccagccctcattcttctctcctcaattccagtgaaaaaaaaagaagagaggggaggagaagagaagaaggggcgaagccctgccggattcagacgccgatttcaggtaatattcatagatcctatatgtgactattgagttaaatagtgtgtattctttaaaaatttgtttgaataaatacattatatttttagggttttagttgtactaatctagaagtgcgtattgtagatatcggtaactacgtagatctgctagtttggaattaatacattaccgttgcattggcttacacaaaaagatattacgttgtagatgtttattgcatgaaagagtaatatgatctagttatttcgttgacagatatgtcgaacaaacaaatattccaagtttaccatggatgtcacgtcctgataaattcatcccgaaataaaaatcattctctaaaaggaataatagaattaattaaaattcgaaaagaaattggcaatcactaaaatacatacaagaaaaattcgaatgtggttcggagaatttttgttaaattctccgtggtctaacaagagccctcaaattttacttgaattttcagagcgccggaaataattattaagcaacaaaaacaattatcaaagtttactaaaaagaaaaactaaaaataaatcctccttcctcctttgggccaagcccagccaaagtctccctctcctccctctctttccctcctctcccaggcctctcctctccctcccggcccactcttcccctccccctctcggcccactccctcctcccactccctcctgggctgcctctccctcctctcctcctgggccggccgcccggcccaagccgcgcccaagccaggccgagccgagccagccgtgcacacgcgcgccgcgcgtgcgctgactgcgcgcccgaccgcgtggggcccacgcgccggtcgtctccttcctcccgcccggctcctctcactcccgtgaaaccctagctcgctccctcctccaaatccgcctcattcaaaccggggattcccaaattaagtgggggttttaatccccattaattcctcttcaattccccccaattttccccttgaatggcgcccccaatcgtcgggaacggacgcgtctttcccggccgccttccatggccgccggccgtgtttcccgtcgccgttccgccctctcccatgcccggcttgcttccctccgctataaaatggaaccccctccgtgcgttctctcgttttagccccttcccgagctcccccgtggccgcaccacctctccctgccttctccttctctctctccggtgccggccgggcttcagccgcctttccctcctcgcccgagcgccgtccggtcgcgccgtcaccgcccttggcctcgcagctgcctcctctccccctgtcagccctccgtttcacgcggaaatcaccggagacgtgtcctcgccggcaaaacagtggcgttgccgccactgtactgcctccagccacccctgccgcgccgctcaggtgcgggccggctgcgccgtctcctccctcggcgtcgccgcgtcgacctccaccccggcctgccctcggtttcaccggaacgccgtcgcccacgtcggtctcgccctccgcctcgccggagttcctccggcagccccgtccgccgtgcctgtgcgccggccgacgtcgccatctccacctccagcatcgcagcggcaaggtcgccctcggcctcgcctcccctccatccgaaccctgccggtgttcgttatcgtcgtctccgttcgtcctcgtcgacgactcctccggtcggtcgttcctcctcgccggctcgtcgtctcgctgcgccgcctccgttgtcggattcgcagcggcgtgttccacgccgtcctcgtcttcgtgcagccgctgtaggctgcccacgtcgcctcctcgccggccccggtcgtcgtcgtcgtcgccctctcgtcgttcccggtcatcgtggcgttcgtccctccgtcaagccgttctcgttcgtcgtcctcgcttcgtcaagtgccgcagccccatcatcgtcttcgtcctcgcctccgcgttgtcaagcctcgtgccggccgagtctcgccttcgttcaaggatcgccgccgaagtcgttccctcgccgtccgtctccgccgcgcccgttcgtcgttgtctttcccatgcctcgtcgcatggtggtaaggatctctcctctcgctgccccgtcctcgtcctttcggtgtcgcccgtgcccgttgtgcggttgtcgaccccggtacccgtgtaccggtgtcggtagtcgttcgcttgtgcgtgtggtgaccgtgttagtgtgcacgctcggtagccacgtggtttccacgtgtgcagcccatgcggtgtctagtggagtccgtttgtcggccactcgcctcggttcacacgcgggatccgcttccgtcgacccgtggactgtctctgtgtactcggtctaccgtggtcccttaggttgacatgtggggtccgcatgtcaacggcgcagccttcctgtcttttccaggctagcgcttacacatgttttatagttgcaaagcttaattataataatccgcaaatctccatataacagcattaaacttcggatgatcatatcttggtcatacgaactctgaatcgacccgttcaagtctcctaatgtttgttataacctaaagaaccgtgtgctttctttttatgtattgttatcgcttctttataggcttgtagctttgcttgtgtgcttcgcgtagcttctgtcgttccggaggttccagaagcgtggttcgcggtcgtcgccgaaggttcggaaggccgttctctcggagcaaggcaagtcacatcatccttgagcatattgaatcccagtttataaaattattttgatttaaattaatgcattatcgctttatttaaattcctgcgttatcactgttttatttagccatgcctatttacctttgttatgaccttattattattgctattgttattattaccttgttcaccctagaataaacaaaaccccaactagtggacactctattcatggttccactagtatgaatttaggtagatgcttcgctgtttaattaggcaacattaggtggttttataactttagacttggggaattctcatatcacttggatactatggaatggttggcttattgtggaattggacatacccctctcttcctctttcaaagcccctaaaacctgtttttcggtggggtttgggtgcatgctagttgtgggaagtagcaccccggccactataaggattaagctcgggcctctgttgcaaagcactaccgtacttccacatgtctagtgggtaaggcttagtttgtggctcagtctggttataaacaaaagtacacggatggagatggacgaagtcgggggtcgatggacatctctaggacaaatgaaggctacacgagctgcggcccggtagtcgagatgtcatggcacagggccggtgtcctgctgctagggggctcaatcctgcctgcctgtcccgggggttccggccgtaggtagggttgggtcggtactcttgtttatggctaggatgggttgggaactatgtcacgtcttccgtccgtataccgtggtggtatgtggcacgtggttacacgtgaggaagatgtgtcttgtgggtaaagatgtacacctctgatcagagtataatctattcgaatagccgcgccctcggttatgggcaagccgagcaatgtacccaagtcagtgttttaattcttaaaatttgcttaacaactaaaatgtggaatagttggcctgggttggcttgggacgagctgggacccagggtcgggttgccagttcggtctgaatcatcgtaggccttgggttaaggcaggttcgtgcgggttcacgaccttgattaataatactgtgtagctttaggatcgtctttttaaaatggctttgggcaactaagtgacttttaaatgctgtttactgcaaaacttaacccctattattaaccccttgtacccccttgcattaatcatgcatctgccggtgtgacttgctgagtactgtggttgtactcattcttgctcaatctttcccccccttcagtaagagaagcttcggagaagatgtcttaggtggagtcctggcttataccccagttgagcacctgtgaagatggagccgtaggcccgcaagtccgctgctgtttatttttgtttgtcaggcctgaagtgcctttgtaataatgtatatattatcgatatattaaagatgtgccttttgtatcatgtttgtttggtgtaccccggcttttcctgggacggggattaatacactagcgttcgggaaaaggcaattttctcgatcgcgacaatggaccaggaaacgtccgttacgggccaactggggtagatctgtcagattttattgtatcagaaaggggaattgatagaccggctgagaggagtgtaccttctataaaaggatggttaatgaggggcttgagagttgatccacagacaagtgacataacaatcaatgttatagtaagtcgggcaactgagggtttttattgggaactaatgccagttcaaaactctcgagtgtggagatggtatttggaaaatgcattgcaacgcgggtggcctctagctttggttccgtttgttcacccgaaggatccaggtgtgcagatgaacatggatgatggcgagggaccaagtgctgaagtaaacgagacttctgtggaggaggtcaacgcacgagaggacgggggcgtagtagctccagtgggcattcaaccaggtggagtggccgacgagggggagactgtcggtgccattgtggatgaaatggagagggaggattctaacaacgagcgtgtagaggaaggtgattcgtcagatgatgagatggatattaatccagcagaatgggctagtgaggatttttctggactgatcgtctctgaagaggatagtgtgagatgggagtacaaagaaaatgaggttattcagggagcgatttatagtagagcagaagatatgaaggaggcggtaaaacattttgcagtgtcacttcatagagagtttagggttgccaagtcgaaccggtcgcaatatgaagttcggtgtgttaaggaaaaagatggttgtccctggagagtgcacgcgtataaggggaaatggaaggattattggacagtgtcagttgttaccaagcagacatgttttctacctggtgttcagaaataccacaggaacattacatgtgcatttgttgcatctgagatgtatgcgcatgtcatcgataatctcacatatgaaccaaggtcaataatccgacacatcgaagagacatacaagtatactattagctatgccaaggcctggagggccaaacagaaaataatagagatgagatttggaacttacgaagcctcgtatgacaatttgccacgcctgcttggtgttatcgaggaaagaaaccctgggagctcttacgaagtgaagaaattcccctcaattgaacatcctggcaagagtgtgctgcaaagggcattcttagctctacatgcatgcaagatggcattcgtgaactgtcgtcctgttctctgcattgataggacattcttgacaggaaagtatcggggccagatactaacagcaataggggtagatgggaacaatcaggtattgcccttggcatttgcttttgttgagagtgagaataccgacagctggtactggttcctgaaattggttaaaacaaaagttgttggtatgaggccaaatgtatgcctgatacatgataggcacgctggcattctgcgagcgataggagagttgcagtttgggagtatggaacgaggataccccggtgtttgggaagatgtacagagtaggtggtgcatgagacatatgggagctaatttcttcaagcaattcaagaacaaggagctcatgaacatgttcaagaggctgtgcaatcagaaccaggagaaaaaattcaatgagctttggaagagattagatgagttgacagccaaatgcagtgatcagcgtgcagcggctccatcgaccgccgttgctgaccctcctcaagctcttggacctctcctaacggatagtccaacattggttagaagaactggattggagattcggaaattttctcagtggattctgcatgaaccaaaagagaaatgggccaaggcgtatgacacaggtggtgctagatatggaataatgacaacaaatttggcagaagtttacaactgggtgatgcgcggtgtctgtggactgccactagttggcatagtggagttcattttacatgggacatgcaggtattttagggatcggatccaggcagttcttccctctatgccgaacaacagcattttgtttggagctttcaggcagaaaaagctagaggagttgcgtaaaaaggccatgaaacatcgagctctagtgcaaggtacccaacagcacaggtttgagatactatgtcaagataaggcaggcaggggtatctaccgcaagagagtgaagcaggagtatgttctcaaagacgacggcacatgtcattgctcttgtgcaaagccgaagctgctccacaggccatgcacccatgtcattgctgccgcagcggagtgtggcataccagatacagtatatgtgtcacagtacttcagtaagcaagcaatatatcatacatggagcggtgagatttatgggttcggcatagctggggagttcacagagactaacgatgaagtactcaatattcctgacccatcgaagctccgaagcaaggctggaaggagaaggactcgtcgcatccgcaacgatatggacgagtcggaggctggcagggtgaagcgttgcagcaaatgcgatgaacatgggcacacctacaagcattgtcaaagacaaggagaaaccaagtgcggcggagccaggactatcaggatcaacagcagatggagctcgccctacgggtgaaggcactacctccactcgaccacgtcctaggcgtcgtcgtgccacgtctggatacgtggtgtagttcttatgttctatgtcggcatgtggatttgcttgtaattcgtttcgaacttatcgatgtgtttatgtttcgtcgtgtaatgtcagacttcggcatgtcatgtctttaggtctcgtgatgtaacgtcggactaaggcgcctaacgtctttatgtatgctgatgtatgtcggacttcgacacgtaatgttatgttatattattgaactctacatatatgttaaattgcacgtcatcgttatgtaccattagtaacgtttgctatatttaaatagcctgtactcttgttgtacataattaacgcgtatgattttattactatttcataattttgcaagttatcttttgttttacattactattttttgaattgttctaacacgaaacactatatttttcagagatagcacgtcaggatacacctcagttgttggacccggcgatagatcaccgacaccggtctcaccttactgcggtgcagggggctcagcttgggacgtttcgggcacggacgtgcggtgagctactcacggttcacgacgccgcggtaggcgaggtgcctcagtggagctggggttccgcgttgttggcggctctgtaccgtgcactttgtgagtcttgcacgaagacggatcccagcgcgacctttggtgggtgccctctctttctttctatctgggcagctgagaggattgcgatcggccgcccttgaggtggaccagcacgcgtacgaggagtcactgtacgaggagcgaccagaggtcgactaccctacgatgggtactctgtggtgccgtcgtcaggtacgttgcatcgatcttatcgtattgttaagttaattgctaagttcattgtacatcacatc

SEQ ID NO: 16694 - DNA, 15792 bp, Oryza sativa
  unsure (1)..(15792): unsure at all n locations
cggaatgcataacagacggtacagtagttcatcacctcattatggaaaatcaagacaactttcttaatgttgtatcttgatgtgcattcttttgaatctaggcttatttttatgcagttaaatttatgatttatactcctccaagttccatcagcccgctttgtataatattatgctttagatgggattagaggcctttcaaaggcagaaagagaaattatgctcctccagttggcctaggcttcaactctgggtttttatttctattgctggtcattcatacacaagatttcatgagcccacagttcaccttttggtcctacctcatttatcagcataggcgatagtagttgatgattatataccatttcccagactattccgaaagagcctaatgttggggatatttcaaggatgctaattgttgtaatgggtgcaagccatgttattaatgggtcatgaggaattagtctctgaccaaagtatctaaaaaatgctaagaaagaccaatttgtggtgctacttgatcccaagaaacaaggtgtacaggaagggaatgtgaaatcggtttctcactttttatggtagtcagtatctaaatcttacagtagaaaccaccttgaccgtgctgaaatggcatgagttattgaggctgctggtagaacacttgaaactttgcctcatttttgctgcttgatcttcatttcagccaattgcttgttagctatttagcttcatgttgcgattcatgttttgagcagcatttgtaaaatcatttatttaagaaagtggccatggacaagctcttttagatattgctaccttactatctttgggagagaaaaatgttgaatgaacattactagccatgatttggcaagaggccttcagattacgtgactattttgtattgatttgtacttgtgctattttgcttttcaagccaattacttctagaaatggatcactgagcctgtacacatgacacaataagagctaagcttttagcattctctgaaccctgactgcgacatagggtggctaatgaaatatgatcattagtaaatatgctgagtgcaataaactcttttccatgtaggcaaaaattttcttgtttgtaaaaattgtcatgtgcctagagctgagctctcttccgtggccaagatgtttctatagtttagtaagtggtatttcttggtagacgtttggctaatggaactcatgttctcagatattccaagatcttcagaagggaatagatcttggtgtagtctctccttagatgctacagatgttttttttaccttgagaaatgccctgttagggcatgtttaatggtagagacgagtatggtctcttaagcaatacaagattatttagagaccgtatctttacaatagtagagacgacaaagtctctaatcattaactcaaaaaatattccttttgttaatattctttccatttttttaccctcatgcaaccatatttccattttatattgattaagagtcgttgttaagctgttgttatgcatgacaacgatattttgtctctcctctttctctttcttccatgtcaacaagtattccaaattaacatcactaagagaccactattgacaaccattgtacatgcccttagtgcttcacagtttccaggtaagaaaatattcttttttttcccttcttagtgcttatcaattcttagtcttatgaataattctgttttaaacatagttatcctataattttgaggcagaatatacatacacttcatttcaataaaccaaatttcttagcggttgtgcaaaagattgctgggcagaccccaaattctcttctttttattatatatggctctcttgttcttctacattgataaacacacttttcagacaagttcttttgctcatggttttgcatactgcagatatccatagaagcaattgaagatttacaagtaaaacatgctttccataataacgcaaaatgttcctattattctggtgtgggtgtctgatgaaaggctttccttggaagtgcaactgtaggtacctatttctctcctttttttgtgagattacaaagtgccagacagacgcatatttctgcacatagttgtgtattcttgaacataggtctaggcttggtcagtattggatataattacatggtctgttttgtcacttccatggtataattgttttcttcaacttcctttttttttccaagcttagcaaaccttgtgacacaaggccacactaaactgcattagtgacatattatattaataaagacaaatatgtatatacacatgccactttgcgtttaggatgacagttttgtcaggtgttttgttacatagcaaagatttaattttttttattttatatttggctagccgtttgcgctttttcttacataaagtgttagtaggattaactaattaaattcataaaacactgtttgccacaatcatatatggtggcactctctattttccaatttagttagcataatgaaatgctcataattaatcctgtgctgaactaaattactatttgttagattactagccgttatttatgtatgcctgtttggttgttttattcacaaatctgtctcaattctctctttatttaatggaactgttctgacagtgcatgcatttcttattattcaggatggtgttcttcttgggatgaaatatcaaaacatatttttgatttgctttagctatgatacttcagcaagactcctggctgccttatctttttatataattgtcttgagcagttgtccctcaggtttttgcatagcttgtaggaacaagagtagagccatggaggcataatagcttgaagtaattatggttaatgtgcttacttaaaaaaggtgtttaatgttaacattgaattctgaaaacttgaagcagatttttctaagtgtacctggatgtttcttaagacatcggtttcttttgctatggtgctcctcgggagtatatacagccacaaaatcaaatgaactatatgcaggcggcgcgtcggggcttccctgacttccagcactcctttctaactagatgcgtacaggcggcacgctccaacctttagtcggttatattaaaacctactgggaattggcgagctgagagcgattcggagcggcgtgttcgcacacggaggcattcacgtcgcccgcgagcgctgggaggcgggcggaattcgcgccccctcgtgcgtccgcgccgtgcagctcccagccgtccgattcgtcgcagcgacggctgagatcgatcatcgtcgcgagtgcggtggtaatttttcaaaaaacccctccgttgcattgataatgtgttttagatcccaagtcatacggtgcgacgttgtggtcttttacgtataagacctccataaccaagaaaatcttacataaagaagagagaaatctaaaaataggaccgcactctgaaaaacgagcatcaaagggcttttctgaaaaccaatatatacctataccccttcccctgaaaccctagaatcattgctttccttcccctctccgccccatcgacgccctgcgccgccgctccattctccggcgccaatcctcgccctgacaccgccgcaccccgctgcccgtcctccattacctctctctcctcttgccgctggttcctctgagctcaagctcgatggtgagaggccgactccgtccgtcggcgacgagtcagtcgatccggctttcaatcgggttagatctccgtcctctgcatcacctcgtcgtcgatttacctgtctccacaatccaagcccattctgccttcagatctggtgactctgccttgcaattggctgaaatgaagatcaagcagcaaaaatgaggcaaagtttcaagtgttctaccagcagcctcaataactcatgccatttcagcacggtcaaggtggtttctactgtaagatttagatactgactaccataaaaagtgagaaaccgatttcacattcccttcctgtacaccttgtttcttgggatcaagtagcaccacaaattggtctttcttagcattttttagatactttggtcagagactaattcctcatgacccattaataacatggcttgcacccattacaacaattagcatccttgaaatatccccaacattaggctctttcggaatagtctgggaaatggtatataatcatcaactactatcgcctatgctgataaatgaggtaggaccaaaaggtgaactgtgggctcatgaaatcttgtgtatgaatgaccagcaatagaaataaaaacccagagttgaagcctaggccaactggaggagcataatttctctttctgcctttgaaaggcctctaatcccatctaaagcataatattatacaaagcgggctgatggaacttggaggagtataaatcataaatttaactgcataaaaataagcctagattcaaaagaatgcacatcaagatacaacattaagaaagttgtcttgattttccataatgaggttattcccctagttcgtggtaagctgtatgggtaattaatcgtggcaagtaaattatatgcagcaagctgcaaagaggttaactcatgtggtgcggcaaaaaaattgagatgtaaaccatggaatctagtttcaatatccaagacacatgtattgaacaccttgcatgactgctagagagcattgtttcgtacaatataaccaatcacacgtcaacgaattcatgatttgactaaagattattttatgtacattttgagaaatatcagaaactttttaatgcaaattgctagaggaatatcagaaaaagaatgaaataataaatagtgtcgagcactcaagccttggataacatttatcaccagcaactcaattgtgattcaaatagcagaaaaattcaatcttcaaattatgtcctaaataactgtccctatttaggacaaaaaccagcagcgatgtgtagtgcaaagtttatgaatcctagctaaaatagtcctacaacacatttacctgtccaaccaaaatagtgcattcaaaagccatggtttgcagagcaatagagcatcaaaatgcacaaaatatactaaacatttgaagattagcacaacaacaactaatcacaataaatctgagttagcacatggaatttaaaacaacataaaaggaaatattttttctatggaaaggaaggtcaaaatcaactgcctcacaaactaagtgtgcacaaaggaaaagaaaaaacaataccatatgcaacaaggagttctggatcaccatatatatcaacaaggacctacatggttttgtccatgagtcacaaaggattacactaaacatctcaatcctcttgtagaacaggcaaaatatataagaaaccttgggctctacttcttgcgtgttaagagtatggaaacctagtgaatgtggaaacctacaacagtaaatgctgaggaaggaagtagaacaggtcatggacgactatcacataacatgatctaccaaaaaaatacttttttttcctatatcaagaacagatgctagaggagatgattggactgaattgattcgtacctagatggcagcgacattggtggggaagccatagatgcagatcaccatcctggggttgaccccatgcacagaagagaccaaacctgcatcagtaagaaatttccattcctaattaaacccacaaggcaggagctgtagcacgcctcgaaacacaactgaattaaagataactgaatggagagggcaatgcaagataaacctataatatgaagtaattggttctatccacttcaagaaagaaatagaagaaaattaaaggatggtggaagaaaaataacatctctgaaccaatcttatctgctctgcctgctagacatcacttaggccaaggcctgttgcatgccacatgaaccacatccaacattttcttacattgccaaccacatgccaggcaggcatacatgatgagaattgaaagagaaaaaagttgggcttaaatcaggtcacaaacctcaaattgaatgagaaaattcaaattagatcgcctcactaaaaaaagtagaaggatacctataacttctcatcaagtaccagaatgctaaatgataatctctgaataaatgagcatcaatcatagcaggcagcctgttgcattcatattctgctttctacagtggattaagctcacccactataaattaacctgcttctctgcatttttagatggtgtgccaaagtgagtagaggtagcagctatagtggatggtttttcaacgacaataatctaatccttaagaagactcctgaaatatataaataagtaaggcacatatatgaaagtaaaactctcaaacatttagtaatatcattatatataaaaatatgctactcgttaaccactgaatgtgttggcttgcaaagccagtttttttggatgggaccaagggctaaaacaattagtcaatttaataacaacccaacagcatcatcacattttttattctgtgcaaacaaaatagtgttcatttgtcaaaactattgggtacttggttttaagtttctgaaatagatcatgagtgtgcaaattgtgaatatttaaataaccgcaacattcagttcacatatatacctctttgcatggaacaccaaaagatagcattttcatagaacatgaatacatatagagaaatattctagaagcattaaatctaaaacacataacaaaatactgctaaccaaaaatttaatactttaataaaaaaacaaggttaatacggatggaagcctttggaaatgaaaaaaaaaaacagttgcctgtgtatatataagtttcaagcggcaaaaataaattaagtttatgcactacatttagcgaaaactttgctgcaaacagctacaattaaaatgactggtactcaggtttcagcatcaagtagcaccgtttgcacctctttgcaatgttgctatttccttcagcagattattaaacagcggcataaccactgcacccctactttctttgaatattttttagagtatagctaccacacagtgaatatatatgctgataactaaatggcttgtattaagacttgtaccaagatttttctggtctgaaatgtgtagaattcacccagacaaaaagtgagatttctgcatcagaagagatctagctaaggtttgcacttcagtgactggaaactaatcccacatatcatttgaatgtgcaggcaacattcacaacaaactatcgagaaacagtaatggataaagaatttaatagagtcaaaaggaccaaaagttgaaaataataccagcaattatattgttttgtttatgtagcaacatcatccatggtagatgcagattcctactgctcgagcacctcacgtatgcagtgactttaagccctgagagagtgcaaataaccattagatgttattatgatacaataaatcatctattccattgaaaaagatacagtaaatcatctcccaattagtgaacaaggtaacctttggaagattatttgggtgacatattgcattaagatcaaatttgctgtcactaagtagctgtgccaaaatttcagtgagttagcatttatgatgatagatcaggatgtcccccattgtgccaaagacataaataaagatcggcaatcgaactttcttagttgaaattatcatattcatcggctactgatctaatacaggaaagtggcaagtctgctcgcacttgaagctcaacgtctagtggagatggatgaggccttaccgatcatgcaccttgacaaatatcctaagctggagaaacctatcgatggagatcctgtgcttggtggcgtactcatcaagcacacactccttcatggccgcagcggccaccggcggcggcgtagacacacacaactccagtgtgtacttcgcgagcggcctacagaacaagtgaaacactgatgacagcaacacaaaaatgaatcacatagctaaggtcggcggattagggacctgactgcaggcacaatcatcgcaacgcgcgtgctgttgcggatcccggaagttggttgtgttcccctttaatctctctttacatttttgtgaacattgcagctagatttctgctctaaaaaccaaaaactactcatttttgtaaataaaacagagaggatacaatataaatttctaaactactctaaaatttagatgcaaagaaactcaattttcagatgccacattagttgcaaaaaaaacgttgagatgtaaacctgagtgaatgatgtgcatatcgggagcaggcacagcggtcacggtactacgaactgtgcagcaaaccgacgttgctccggctggatacatgagcagattacagcacccagagcagacgagctggctttgggcccctgaaattgcacaatcatggctcttcagagttcagagactgactgaatgtcacatttcagcagctagcattttcattttcagaggacaaaagcattctccatgcattattttcatttcagacaacagaacacagtagtaaaaaaaacttccattttctcaacagggagttctctctaaactttcaggatttctatgagcacaataaactgcaacctctgaaccaggaagagtaacatcttattcaagaaaaaccaccctaacttaacacagaattccacagtgtcgcgcccgccagcctaacttaacagcgcggttagtcgacgcgcttgacaccgacatcgtctaagctatccaccctaacgtcctatgtgccattcctatactaaccacctcgttgaaaaccagttgtggaccctcagatattcgacgtttcgccgaaacaaccgctgcttcgtggcctacggtaagtaatttctagaaaaatctctgggggtccaactctccaaatccagtctctcttctgtgaggcccgtggttctgaagccgtcaaaaaaaacctagctcgattccatgaccggaaggcaaaattatcaaggttttaatttgcacagaattctccatctgcattccacactgtcgcgcccgccagcctaccttaacggcgcggttagtcgacgcgcttgacaccgacatcgtctatgctatccaccctaacgtcctatgtgccatctatatactaaccacctcgttgaatacccgttgtggaccctcagatattcgacgtttcgccgaataaaccgctgcttcgtggcctatggtaagtaatttctagaaaaatctttgggggcccaactctccaaatccagtctctcttcggtgaggcctgtgattctgaagccgtcaaaaaaaacctagctcgattccatgaccgaaaggcaaagttatcaaggttttaatttgcacagaattctccatctgcattccaaagtgtcgcgcccgccagcctaacttaacggcgcggttagtcgacgcgcttgacaccgacatcgtctaagctatccaccctaacgtcctatgtgccatcccaatactaaccacctcgttgaaaaccagttgcggaccctcagatattcgacgtttcgccgaaacaaccgcggcttcgtggcctatggtaagtaatttctagaaaaatctctgggggtccaactctccaaatccagtctctcttcggtgaggcccgtgattctgcagccatcaaaaaaaacctagctcgatttcatgaccggaaggcaaagttatcaaggttttaatttgcacagaattctccatctgtattccagtgtcgtgcccgccagccttccttaacggcgcggttagtcgacgcgcttgataccgacatcgtctaagctatccaccctaacgtcctatgtgccatcactatactaaccacctcgttgaaaaccagttgtggaccctcagatatttgacgttttgccgaaacaaccgctgcttcgtggcctatggtaagtaatttctagaataatctctaggggtccaactctgcaaatccagtctctcttcggtgaggcccgtgattctaaagccgtcaaaaaaaaccttgctcgattccatgaccggaaggcaaagttatcaaggttttaatttgcacagaattctccatctgcattccgcagtgtcgcgcccgccagcctaacataacggcgcggttactcgacgcgctggacacgacatcgtctaagctatccaccctattgtcctatgtgccatccctatactaaccacctcgttaaaaaaccagttgtggaccctcagatattcgacgtttcgccgaaacaaccgctgcatggtggcctatggtaagtaatttctagaataatatctggggggggtccaactctccaaatctagtctctctagggtgaggcctgtggttctgaaaccgtaaaaaaaacctagctcgattccatgaccggaaggcaaagttatcaaggttttaatttgcacagaattctccatctgcattccacagtgtcgcgcccgccagcctacctcaacggctgtcccaccgtagcgcacctgcctcgctcaggggtgaaccatctatgcagggatactgcctccgctcggctatctaatccgctaggtctatacccatacgagaagtgcggttgtacgggggtcgtttcatgcttaacttcatggctcggtccttaattgaccggggacggtactagccttttccagataccacccaaatcctccgtccgccccagtcgaaaacagttgtttagttttatttctcctttcgcaaatcatgtcatcaatatcgtggcaatgtggtgctcatgtctctacatgccgcatctcaattaccttcccaaaggtaattgcccaagcatatagtatttgataaatatgagtatgcatgattctagaatagcatttctaagcatttgtcatagttgactagggactcatacgtaaacatggttacgaaggaataaggggtaaacaataatcaaggcatggcataatcgcaagtaggatgttcaccattgcatgcaattttatttgtaaacaaacaatttcgcaattgggatcaacatgttcaaggaatagtgatgacttgcctgctcagaatagtccttattcttgatacaatcttgatcaaccttcacctcctgtaagctgcatacgttgcctcacgactaaccgatatacaaattctataatatgcgagaaaaaccaatattcaaacaacaatcaaatatgtacaaacaaaatatagttgttggggttgctcatactactcgtgtttgctaatggattctaatcaaactaagaactaaggtttcttaatctttatgttgtcatggtggtctatataggagctaaccaatgtagggcctgtttggcacagctccagctccaactccacccctcctggagctggagctcagccaaacagttttagctccaccaaaactaggagtggagttgggtggagctctctcacaaaatgtaatagagttgtggagctgggtttaggcagctccacaactccactccagactcaacttctggagttatatttaggagttggagctgtgccaaacaggcccgtagtatgaatgagatacgtatctggctactatgtggtttagtctagcaaatggctattcatgcgtctatctaaatagaatggttatacactagaggttctgttgccggatggatttggattggttaaataattactgtgaatcatttgtattattattttattgatggaggctttattttaattatgtacatattttacttgtaaaaataaattataaaggttaacaattacccatgctttgtatgttagaattgtttaggttaatcttattatggttacggactatcccatcacataattttacaatgaataatcctaatttacaattatattaggtcaagatttataattagtattttatccactatagatgtttgtcatagactcattagtttactatacacaaaagggtaggtttttgatataccgtacatctaaattgggatgtacaatgtatgtgtgtgcaacaatatttaatcattggatcatttactgaatagttgctatttactagaagctatacgatatatgtgattaagatagctctgttttgttaactaatggatgtcaatcgaactatatatattccacttcacatgacattataccaactaacttttaagtggtccaattacaactagctcagttattattcttcttagacaagttgaaggttcatctaagtgtgtttatattttagttacaaagtatgaggctaaacttatgtaaataatttataagtcataggtttagttatatttggacatagactaataaatggcactaatatttcctatgctttaattaatttgaaacaatgctcctagttagtttacataggttttatagtgagaaagcatgttaaagacaattatttgacatctactttatagtacaatatcaattttattattagcacatttttaagttaactattatgcatcatcttgatattaattattaataattataaatatattttattaaatagtgaattatataccattggaaagcttgtgaatttaggttcaagtttcactcaaatcggagctaaaatgaataagttatgctagtgtaaagattcaaatttgaattaattctaataattgcgaaatggtactgttcctaattcatttatttttaatacaaccttatccacaggctatagtgactgacaggtggggtcttcctattttcttttcttttattttatttttctttctaaaggaatcatatgggcaaatgacaggtgggcccgactcctttgactagggtcaaaccggccattaaacccggtagggcccgcatgtcatagactcgggattataaaacctcaataattagatttttaaccacccggacccacatgtaatagactcaactaataaagattaagatggggattactattcactaaacacgtggggcccactctaatctttcctctcctttctcttttctctctctctgctatctctttgcttcctcccacggctcggctggaattggcgggcggcgcggcgcggcgtcaagcggtgggggaggggaaggctcaccggaccgatggcggggtcgacggagatgcggcggcggggtcgacgtcggagcacggcgcggcgacgaggcacagcgcagcggcggggcgcgtcggctcagcggcggcggtggcttccgaagaggcggcgacgccggggacgggaaagagaggggaaagggaggggaggtggtcagggtggtgtgggaagtaatgggcggcaagggggaggggtttatataggtggaaggggcgggcagtgcttaatgacgacggcgacgcggcacggcggcgtggggcgcgacggcgacgggacggcgataggtgacatcgtgcagcggcgcggggctcggggcacggcagcggcacatggcgacggacgagcggcgcgcaacagagagaggcgacggcgacgggcgacagtgacgcgcacggcgcggtaggggcgcggagcacgaggcgggggcgacggcggcagcgcgcgcggaggggaggggctcgagacaacgcaacagacgacggggatgcgatggagtgcggcgcggcgacaggacggcgcgcggcagtggagtcaacgggacggcgatggcgcgcggcggggtggagactcggcgcggcatcggcggcacggggctcgaagcggcgaggggacgggcgcgcgacgacgggatgggcaatgcgacggcgagacggggctcgaggcgatggcggcacgcgcggcgcggcagcgggatggcgacggcgacggcgcggcagcggcggcgcgcagctcggagcggcgacgcgacgggcgggcggcgcggcgcggggctcggcgcggcttggcggggctcggcgcgacttggcggggctcggcgcgacggcgacaggcgacgcgacagcgacgcggcgcgggcgcgaggtggcgatgggacggcgcagtgtggcagaggagggggaagggctaggggaccacatcaagcagatggcgtgcaatgaatagtgacggcagtgaataaaaaaaagaatttaggtttttggttggttttaaaaattgagaataatagctatttgaatttatattttcaccaacgcatttgagtgacattattaagtgttcaaatgtgaattttatttaaagttaatgttgtccaatacttaatactcgtatttattatagtctttgtaatttcctaatgagacaattacagagaggcagtgatattatacactctatttatttatgtgagtgaattttatgcgaagatggttgcgttaaatattgatttaaatattccagcaaaacactcttttatagatgggatcctggtaacgatgtgatcattatttcgtgtgaacaaattattctatctaattgcaatgtatgagctaaccttgttcttttaaaattggttttacctctatatggatccttataatttaatattcgtggttcaatacaaattatgtaacatctaattaattattcccagtaaaactattctatagatagagttccatttatttgaacgattatcatttcctaagtgtctatatttcatggcacgcatcacaaggttcaattatttaatgtttgatccataaattaaattagtaattaacattccctttgtctggctttgtttcctggtgctctaattattcgtagggttaacaattaaatattctcgtaaatttatctattacttaaattttagatccttactttactttccttgtgatcatttacggtttggcaagcaataatattcataacaaccatcatgatgcaaatgttttaaaaagttctaaattttagtgatttttattgtcttgaattttcaggatgttacatgacgctcgtgattctgcagccgtcaaaaaaaacctagttcgattccatgaccggaaggcaaagttatcaaggttttaatttgcacacaattctccatctgcattccacagtgtcatgcccgccagcctaccaaacggcgcggttagtcgacgcgcatgacaccgacatcgtctaagctatccaccctaacatcctatgtgccatccctatactaaccaccacgttgaaaaccagttgtggaccctcaaatattcgacgtttcgtcgaaacaaccgctgcttcatggcctatggtaagtaatatctagaaaaatctctgggggtccaactctccaaatccagtctctcttgggtgaggcccgtgattctgaagccgtcaataaaaacctagctcgattccatgaccggaaggcaaagttatcaaggttttaatttgcacagaattctccatctacattccacagtgtcgcgcccgccagcctaacttaacggcgcggttagtcgacgtgcttgacaccaacatcgtctaagctatcgaccctaacgtcctatgtgccatctctatactaaccacctcgctgaaaccagttgtgaaccctcagatattcgacgtttcgccgaataaaccgctgcttcttggcctatggtaattaatttctagaaaaatctctgggggtccaactctcaaaatctagtctctctagggtgaggcccgtgattctggggccatcaaaaaaaacctagctcgatccatgaacggaggcgaaatatcaacgttttagtttgacagaatcatcatctacatccacagngggcggcccgcaactaacctaa

SEQ ID NO: 16695 - DNA, 710 bp, Oryza sativa
  unsure (1)..(710): unsure at all n locations
catgggnnggtgatgtgctnctactgcaagtcgttcatcacaactggttttcaacgaggtggttagtatagggatggcacataggatgttagggtggattgcttagacgatgtcggtgttaagcgcatcgactaaccgcgccgttaagttaggctggcgggcgcgacagtgtggaatgcagatggagaattctgtgcaaattaaaaccttgataactttgccttctggtcatggaatcgagctaggttttttttgacggcttcagaaccacgggcctgacagaagagagactggatttggagagttggacccccagagatttttctagaaattacttaccataggccacgaagcagcggttgtttcggcgaaacgtcgaatatctgagggtccacaactggttctcaacgaggtggttagtatagggatggcacataggacgttagggtgtataggatcgacgatgtcggtgtcaagcgcgtcaactaaccgcgccgttaagttaagctggcgggcgcgacactgtggaatgtagaactcatcaaggattatgatgtgggaattcactatcatccttgtaaggccaacgtggtcgccgacgctctaagtcgaaagagccattgcaacactcttaacgtncgtggctttcacccgaactaaccaacagatggaagccctgaatctaagcatagtgggtcgtggattcttgg

SEQ ID NO: 16696 - DNA, 6561 bp, Oryza sativa
aatctgagggtccacaactggttttcaacgaggtggttactatagggatggcacataggacgttagggtggatagcttagacgatgtcggtgtcaagcgcgttgactaaccactccgttaaggtaggcttgcgggcgcgacactggaatgcagatggagaattctgtgcaaattaaaaccttgataactttgccttccggtcatgtaatcgagctaggttttttttgacggctgcttaatcacgggcctcaccctagagagactagatttttagagttggacccccagagatttttctagaaattacttaccataggccaggaagcagcggtttattcagcgaaacgtcgaatatctgagggtccacaatgggttttcaacgaggtggttagtatggagatggcacataggacgttatggtggatagcacagacgatgtcggtgtcaagcgcgtcgactaaccgcgccgttaaggtaggctggcgggcgcgacactgtggaatgcagatggagaattctgtgcaaattaaaaccttgataactttgcctttcggtcatggaatcgagctaggttttttttgacggcttcagaatcacgggcctcacccaagagagactggatttcgagagttggacccccagagatttttcttgaaattacttaccataggccacgaagcagcggtagtttcggcgaaacgtcgaatatctgagggtccacaactggttttcaacgaggtggttagtatagggatggcacataggacgttagggtggatagcttatacgatgtcggtgtcaagcgcgtcgactaaccgcgccgttaaggtaggctggcaggcgcgacactgtggaatgcagatggagaattctgtgcaaattaaaaccttgataactttgccttccggtcatggaatcgagctaggtttttttttacggctgcagaatcacgggcctcaccatagagagactggatttggagagttggacccccagagatttttctagaaattacttaccataggccacgaagcagcggttgtttcggcgaaacgtcgaatatctgagggtccacaactggttttcaacgaggtggttagtatagggatggcacataggacgttagggtggatagcttagacgatgtcggtgtcaagcgcgtcgactaaccgcgccgttaaggtaggctggcgggcgcgacactgtggaatgcagatggagaattctgtgcaaaataaaaccttgataactttgccttccggtcatggaatcgagctaggtattttttgatggccgcagaatcacgggcctcaccctagagagactagattttgagagttggacccccagagatttttatagaaattacttaccataggccacgaagcagcggttgtttcggcgaaacgtcgaatatctgagggtccacaactggttttcaacgaggtggttagtatagggatggcacataggacgttagggtggatagcttagatgatgtcggtatcaagcgcgtcgactaaccgcgccgttaaggtaggctggcgggcgcgacactgtggaatgcagatggagaattctgtgcaaattaaaaccttgataactttgccttccggtcatggaatcgagctaggttttttttgatggctgcagaatcacgggcctcaccctagagagactagattttgagagttggacccccagagattttactagaaattacttaccataggccaggaagcagctgtttattcggcgaaacgtcgaatatctgagggtccacaactggatttcaacgaggtggttagtatggagatggcacataggacgttagggtggatagcttagacgatgtcggtgtcaagcgcgtcgactaaccgcgccgttaaggaaggctggcgggcgcgacactggaatgcagatggagaattctgtgcaaattaaaaccttgataactttgccttccggtcatggaatcgagctaggttgtttgtcacgaccggaattgacccaacgggcgttccttacgtgcgtgtattattccttgtcccaggaggcaaggtacaccaaaaattgatacatttcagagtttatcaagcggaagcgtaaatagttaatttattacatgggcggcgaaggcccagcacacacaaagacaaacgagaaacagcggaagactagggtgacgaccacaggcacttgacagcaggcacgagctagacaccaaagccttcatcttccaggggctcctcttctgggtttgggaaaaattgagcaagactgagtacaaccaccatactcaacaagacacacccacaagtgcaggataaatgcaggggagtacaagggggttgtaatataaagggttaggttttgcagtaaacagcattaaaagacacttagttgctcaaagctattttgtaaacacgattccagagctatacaatattattaatcaaggccgtgaacccacacgaacctgccttaacccaaggcctacgatgattcagaccgaactggcaacccgaccctgggtcccaactcgtcccaagccaacccaggccaaccattccacattttagttgttaagcaggttttaagaattaaaacactaacttgggtacattgctcggcttgcccataaccgagggcgtggctattcgaatagattatactctgatcagaggtgtacatctttacccacaagacacatcttcctcacgtgtaaccacgtgccgcataccaccacggtatacggacggaagacgtgacatagtttccaacccatcctagccatagacaagagtaccgacccaaccccacctacggccagaacccccgggacaggtaggcaggactgagcctctagtagcaggacaccagccctgtgccatgacatctcggctaccgggccgcagctcgtgtagccttcatttgtcctagagatgtccatcgacccgagccacaaactaagccttacccactagacatgtggaagtacggtagcgctttgcaacagaggcccgaagaccggtccttatatggccgaggtgctactatcaaaaccatgcaccccgagcccaacctaaaactattttgagggttttgaatagagggggaggtgtgaatccaattccacaatgatccaacaaatccatagtgtccaggtgatgagaatattcccaaagtctagagttgtaaaaccacctaatgttgcctaattaaccagcgaagcatctacctaaattcatactagtggtaccatgagtagagtgtccactagttggggttttgtttattctaggatgaacaaggaaataataacaataacaataataaggtcataacaaaggtaaataggcatggctagataaaacagtgataacgcgggaatttaaataaagcgataatgcaataatttaaatcaaaataattttataaactgggattcaatatgttcaaggatgatgtgacttgccttgctcgctttcccaaccgtcggcttcaacttccacgtagagcggatcttccgaagctgcagcgtctacacaaccaacggaaaagaaaaggcttttactctaataaactccatataatgagcaggaacaaaggacaaaaatgggttcttgacttcttaaggaaaaattagagacttgaacggtccaattccgagttcaaatggccaagttatgaccatttgaagtttatatgctctttaaatgaatatttgcgaatttcttcatttaaattttaattttaaaagggtttattgcgtcagccgaggggaggggcgcgcggaccgggtccacgggagtggggcccacgcggcagcctcacggtccacggtggaccaggtgcacccgggctcacaccagccggcgccgtgggccccacgcgtcagccgcacccgagggcgcgagcggctgacggccgggccccacgcggcagccgctcggtgcgcccgaaggcggccacggcggagcggcggccgagagaagggagggaaagggggaaacgaggcggcggtccacggctcaccctaggtcgacggcgacgacgaaaaggcggccggagcggaggaaggcggcggcgtggttcgggtcgacagggacggcggcgctccggcggtcgacgagcgaaatggaggggtggacgaggtcggcgaggatgcggcgaagccgaaagaggcggcgccgaggtgggaggtggtccggggcgacgacgacggcggaccggagctcggcggtgatggcgaagagagagagcgacggcgcgagctcgattccggcaaggaggaagggcggcgagaggcggaaacggacggaggaggtgcggggagggtttatatagggttggaagggggagagagcggccggcggggaaggaataggcgcgggaggtccggccgccatcaatggcgccggcgagatttgcgggggcaaatccgcccgtttgaacgcgaggaagagaggggaaaatggggggaaagggtgagggaatcacggggaataattcccccctattgattgcacgcggggaataatcaggcgggaataatggcaggcgcgacactgtggaatgcagatggagaattctgtgcaaattaaaaccttgataactttgccttccggtcatggaatcgagctaggttttttttgacggctgcagaatcacgggcctcacctagacagactggatttggagaggttgactgtcacgcccagaaattctcgaatagaattccaagcagaatgtgcattaaaacccccgtccaggaccggccggggtacacaaacgatgaaattgacatacagatccacgtcttacaaacatcagaaaagtcttacaagaatgcagcggaaaaattaaaaggtaactggagctaagccttgacttggaccgcagcgggaacaccactccacaggcatcctcgacggcacggacgaagcctactcctcggaaaatccaccatcggacgcatgctcaaactctgaggtttggggaaaaagagcaagactgagtacaaccaccgtactcagcaagtcataccggaatagggggtatgatgcaggatatatccaaaggataggtagagcgattcatttgcataaagtgagcatttataaacagtagttgaaagcagtaaaaatagttgtaataattaatcaatattaatcatccactgttcaatgctatcccacgttgcaacaggcccaaccctccacctgaactaatcaatttcactagactaagctaggatgagactaatcacggtgaacctggttgaccgcgcataaccgcgggtatggctattcgaatagttttactctgatcagagatgtacaattgtacccacaagacacagccccacgacacgtttccgtgcaccgacatgccaccatgacataccggaaagaggccgtgacaggacctttcgcataaccccctctaaccaagcacaccacacctcaggtttcacccccactcctcgcaaggaagcgggcagtcccctctcgtgcctaggtgaatccggaagccgcataagtcgtcgcagggcccatccaaactccatcacgcccacccttccctggatgcgtcagctagaggaaagcaacactacaagcccagccgttgcccacactggcttgtggtaagtacgataagttcttccagggcatcccgcgaaccggtccttgattgccatgggtgcgactagcaaaaccatgcacccacagcccaccatttaatatatttaattaaccatcactagagcggtggcactaatccaacatcaacactagaacctgaagtctatgcattaatgtgattccccattgtgtgctagttgaactaagcatggctaagcaatccctaatccaacttctagtcatgattcaacccaagctaccaaaggaaatgatggtacaacaatcatatagccgagtacaataggtaatataccatacagaatcattgtaaaacaatgcataacttagagagaataaatgagaatttgcaatataggatcaatatgatcaagagacaagcatgacttgccttgctctgttgctggagggacctcggtgactatttcaaagtacaccggagcgtcgggagagccggaatctaagcgacatacaaagcaaacaatacaaacaggccataagactactgaaacagagaacaaaatcatttttaatggattctatgcatttttcttgatttactgagacttgaatgggcttaaacggagctcggatgaattttctatgaattttagaaggtttactgtgctttaactataaacagaaaagccttaaatgatttattgcgcaataattaaaaccctggagagagaggaggcggcgccgacaggcggaccccacatggcagtggctcggggtggcggtccacggtggaccgggtccatggaccggggaggaggcggcacaccacgtggtgcacacgtggcgccgacgcggcgcacacgtggcggtcacgtggcaaccacgccggcgggggggttggaccgccccgatctaccaccccggagattcgacg

SEQ ID NO: 16697 - DNA, 30962 bp, Oryza sativa
  unsure (1)..(30962): unsure at all n locations
gcggccatggcgatggccggcccggcaccggcggtccaaggcggcgaccgacaaccggcaaagggtggcggcgtcgcgccaacgcgaacgccgacagcggcgattaagcggctagcgggcccggagaggaagagaaagggaagnaggtgtctcaccgaagcccgtccgccggttgccgtcgtcctcccgtggcttgccatcgccgttcgctgtcatcttcctccgcgccggccaccctcggtgaggcttcctctcccctctattcccctccctctccttcctagccgccgcttagcgccgccgccttcgcgtcgcctttgcgccgtcgcctccgccaccggttgccgtcgctggcaacgcgttcgcgcgcgcgcgccgtcgccatcgccgtggccggtcggctggccttgagccgagccgagccgggtcgccaccgcccgtccgatcggccccgggtcgatccgggccatcgatcctgtggaccggcggtggaccacccgcgtggtcccggtccacggtggaccaccccccctttgagccgctgccgagtggggcccgtttgccggcgccccttttccctctctcccgagccgctgaccggtgggccccgcatgtcggcgccgcgccccccttgatgacgtcagccctgggaattattgcgcaataaatgatttaatgactttttgttatagtaataaacacagtgaatcttctaaaattcataactaattcatccgagctccgtttaagcccattcaagtctcagtaagtcaagaaaaatgcgtagaatccattaaaaatggttttgttccctgtttcagtagtcttatagcctgtttgcaatgtttgccttgtatgtcgctagattccggttcctccgacgctccggtgtacttcgaaatagtcgccgaggttcctctagcagcagagcaaggcaagtcatgcttgtcacttgaacatgttgatcctatattgcaaatgctctattgtttttcttcaaatattgcattgttttataatgttactatggggtgtttacctattgtcatagccatgctattgttgtaccatgtccctttgtcagcttggggttataacatgactagagattggactagggattgcttagccatgcttagttcaactagtgcacaatggggaaaattctattaatgtttagactgttggttctaatggtattgttggattagcgccaccgctttggtgttggttaattaaaataaatcacatggtgggctgtgggtgcatggttttgctggtcgcacccatgacagttaaggaccggttcgcgggatgccctggaagaacttatcgtacttaccacaagccagcgtgggcaacggctgggcttgtagtgtagcttacctctagctgacgcatccaggcaagggtgggcgtgatggagcggggcgggccctgcgacggcctctgtcgcttccggattcacctaggcacgagaggggactgcccgctgccttgcgaggagtggcggtgaaacctgaggtgtggtgtgcttggttagagagggttatgcgaagggtcctatcacggcctctttccggtatgtcgtggtggcatgtcgacgcacggaaacgtgtcgtggggctgtgtcttgtgggtacagttgtacacctctgattagagtaaaactattcgaatagccgtgcccgcggttatgggcggtcaaccagattcaccgtgattagtctcaccctagtgtaatctttagaatttggatagtataggtggatggttgggcctgtcgcaacgtggcatagcgttggacagtggatgattaatattgattaattattacaactgtttaaatcttccaacttctgtttataaatgctcgctttatgcaaatgaaccactctagctctcctttgataattccctgcatcatacccctattccggtatgacttgctgagtacagtgggtagtactcagtcttgctctttttttcccaaccccagagtacgagtgtgtgtcagatggaggtttctccaaggagtaggcttcgtccgtgccatcgaggatgcctgtggagtggtgttcccgctgcagttctagtcaaggcttagctcctgttgtctttcgcttttccgctgcatttatgtaagacttttatgatgtttgtaagatgtgggtctgaatgtcaacattgtcgtttgtgtaccccggccggtcctggacggggattttaatgcacattctgcttggaattctattcgggaatttctgggcgtgacagaagcggacggcgtggccctcgggctcgcgaacgcgacggcgttgacggcgtggctcggtgcagtagctagcgatggctagcggcggccgaagatggctaaggcggcagcggcggcgggtgcacggcgctagggcggtagaggccatgggtgagctcggtgaaatggggaaaaggatagggggaggggcgatgatgcttaaataggggaagagggggccggacatggccgagagacgacgggagaggtggccgacgtgggggagtgggagaggagagagaggcgggattcgaaaatagagtcccggccatctcatgggcgcgggcgagcaggagagagagggagtgggcgcgggcggcgacgtgggcgacgtggcccgagagacgcgggagcgagcgggtggcggttgcgggatgcggcggcgccggctggaggtgggagacgggcccgacaggtggggcccacctgtaggtgaccctaggggaggaggagggggcgcgggctgagctgggccgtggcctccggccggcctagcaaggcgcaggagagagaggagggggaataggccggcggcccattaagggaaaaaggagggaaaaagaaaagaaaaagaaagaaatgaatttgcagggatttaaataatgcttgtgctcatttttagttgattaaaattatttctagagctctgaaaattccactaaaaatcttgttagcatatttcgacatgtagaactcaagaaaaattctacgtgccaattccgattattatttgcattaatttattagggtttcactcttgcttttacaccgatatttttcttgagaccatttattaattcattttaggcttgggagaagaacttcagggtgtgacatggacccccagagatttttctagaaatgacttaccataggccacgaagcagcggttgtttcggcgaaacttcgaatatctgagggtccacaactggttttcaatgaggtggttagtataggaatggaacataggacgttagggtggatagcttagacgatgtcggtgtcaagcgcgtcgactaaccgcgccgttaaggtaggctggtgggcgcgacactatgtaatgcagatggagaattctgggcgaaattaaaaccttgataacattgccttccggtcatggaatcgagctaggttttttttgacggctgcagaatcacgggcctcaccctagagagactggatttggagaggtagacccctagagatttttttagaaatgacttaccataggccaggaagcagcggttgtttcggcaaaacgtcgaatatctgagggtccacaattatagtagcccccgactgataactcaaggaagaacttgatgttagcagtcaaagaggaaaataccaaaaaatagtgcctaagcataaaaacgacggagatgctcgatattccaagagttgtcaacatgagtactgtcttcacgcttgagtcggtatgaatctggccgagtaacttcagaaattatgaacggtccttcccataaaggagataacttgtgccgatctcgtgtagtttgaattttcctcaaaaccaggtctccgactaagaaagctcgtgatcgaacgttgcagttgtgataacgtcgcatcccttgtaaataccaagccgactggattaaggctgcttcacgggcttcctccaatcggttgagatcatccactcggttttcttcgtagcgctcctctctggagttacgaaatcataaagactcaaattctacctcagtcggcaacattgcttccgcaccataaaccaaaaagaatggtgactggcccgtagcccgactgggtgtagtgcgtagggaccaaagtacagacggcagctgatccacccatttgccagcgtagggacgcagttggtcaaaaactcgtgcttttattccttggagtaccataccattggcgcgttcgacttgtccattgctcataggatgcgctacggaggcatagcagattttaataccaaagtcttcatagaaatctttaaatactccgccagtgaactgagtaccattatcggtgatgatccaattggatactccaaacctgtgcacaatgttaatgagaaaatctctagccttgtctgctgtaattgtgacgactggtttggcttcgatccagttggagaatttatcaatagctacaaagagatgagtataaccaccggttgcctttttgaacgggccaaccatatcgagccgccaaaccgcgaacggccaggataatgggatggtttgcaactcctgagctggtagatgagtctgtcgggcaaaaaattgacaaccctcacacgtccgcacaatcttgtcagcatcggatatggcggtaggccagaaaaaaccctgccgataagccttgccaatgatggttcgcgcagctgcatgattgccgcagatgcccgaatgtatgtccgttagcaattgcctcccttcctccaaagacacgcaacgttgcagaatccctgacggacttttcttgtacagttcagccctatgcatgatgtaaagtttgcttcacctggaaattcgcttggcttcgtctttatcttgagggagttcttgcttagttaaaaatttgatgaagggctctctccagtcggcttcgagcatgttcacttcttgagtgtccgtggcatcggttgtttcttttcttggtacggtcagttcataaagatgttcaacgaacacatcggaaggagctgcttctcgttttgaaccaaagttggctagtctatcggctgcctcattattgtgtcggagaacatgagttagctcaaggccatcgaacttgtcttctagtttgcgtacctcttgccaataggcagtcatattatcatcgaggcaggaccactctttcatgacttgattaacaaccaattgagaatctccatgaactgtcagacgccgaattcccaaagaaatcgcaatccttaatccatgaagaagcacctcatattctgccacgtaatgggacgcagaaaaatgtatccacaacacgtacctcagccgttctccagtcggggaaatcatgacaactcctgctcctgtgcctgaaagcctttttgacccgtcaaaatgcatagtccagtactcctccttttccacagttgtgtcttcctggcattcggtccactcggcaacaaaatctgctagggcttgggacttgatcgaagttcgtggcttgaaggataaatcaaaagacattaattctaaagcccactttgtgatccgtccatttgcctcacgattgtgaagtatgtctccgagtgggaacgatgtgaccaccgtgaccgagtgactttgaaaatagtgagataacttcctaacggtaattaaaacaccatataacagcttttgtacctgaggatatctggtcttggagttggctaaaacttcgctgatgaaataaatcggccgctggactttttgaacatgtccatcttcttcgcgctcaacaaccaggaccgtgctcacaacctgagaagttgccgatacgtataacaacaacggctcttgtgggtgtggtgaagctaagaccggtggagtggtgagaagtttcttgaagtcttcaaaggctttttgcgcttcgggtccccactggaaattgtcggttttcttcaatagcttgaaaaagggcatcccccgctcgccgagtcgtgagacaaatcggcagagcgccaccatgcacccagttagcttttgcacgtctttctgggaactcggcggtttcatgttgaggatggcattgatcttctccgggttccctatgggataccataaagccaagcagcttccctgacggtactccgaagatgcatttttcaggattcaacttcatcctgaatgtgcggatgctcacaaaggtttcttctagatccgcagtcaaatcgtccttctgcttggttttgacgactacatcataaacataagcttcaacgttgcgaccaatctgtcttgaaaagcatctctgaatcatgcgttgataaattgctcctgcgttctttaatccaaaaggcatggtgatgtagcagtaggccccgaagggtgtgatgaatgaagtcttcaggcagtcggactcctttagtcggatctgatgatatcccgagtagcaatccaaaaagctgagtaactcgcagctggccattgaatcaaccacctggtcaatgcgaggtaatccaaaaggatctttgggacaagattagttgaggtcggtataatcaacacacatatgccattgtcccttcttcttccgaaccaggactgggtttgccaaccagtcaggatgtaggacttccttgatgaagcctgctgctaacagcttggtcaattcctccttgattgcatccttcctatcctgtgcaaaacggcggagtcattgcttaatgggtttagcgtcttccttaacatgtaaagagtgctcaatcacctctctgggaatactaggcatatcagatggtttccatgcaaagatatctttattattttgaagaaaggtgatgagcgcgctttcctatttacaatctaactcagcccctattacagcagtcttagtaggatcagagggatctagaggaattttcttggtcttggtgtcgctttctccgctctttgacatcttggttgcaggcacttctccttcggttgcagttgacgcggccagtcggatttcttcttgagcgagcgtgatctcacggttctgggccatctcacaactttccttatcgccggtaacggcttgcttgatatcgctctgcagggatataactcctcgaggacctggcatcttcatcatcatgtaggtgtaatgtgggacagccatgaacttggctaacgcggggcgtccgagtatggcgtggtacgctgtctcgaaatctgcgacttcaaagcaaatgttctctgtgcgaaagtctcccgagtgccaaaggtgactggcagagtgatctggccgagtggagtagcagatagcccggggatgactccgtgaaagggcgcactactcggcttcagctccgtccgagggatctgcatgtcgtccagagtcttggcgaaaaggatgttgagtgcgctgccaccatcgatgagagatcgtcggagcttgacgttgcaaaccactgggtctagtactagggggtaccgccccgggtggaccactcggtcagggtgatctgagcggtcaaacttgatagttgtctctgaccaccgaagatattggggcatatcgggctaaacagcattgatctcccgctcggtgagcttttgcttccgcttggattcataagctagaggtccgccaaagatgtggttgagctccttgcgggagtcttgaaaaccagtcggggcatcatctccatcgtccttcttcttcgacatgccttggtctccatcagtcggcttgcgtgcgttcttggcgtattgctctgcgacctgtttgtagacgaagcaatctttggccgcgtgattggaatttgggtgatgtggacattgggagttcatgatcttgttgaaagtgttgacgcgcgaacgttgccgggaggatggtgtggtagttgctacaagttcctcgggcttacgcttgtgatccttgtgattggtactgttaacagtgaaatttggtaagcccaaagttaccatcggcttagagttagtgtcggcttcaaagttctagaattagccgatgggagtcaagtcgccacgatgtcgtgttcttggttgagtcggatcaatcaaaggaagattatctagaagagtccgagttcaagacggatgcgacatgacagtttatctattaattaggcatagtttgttagtttccttttatctttaggaaagtgtgtttagtgtccgataaggattttatcttttcctttttagtttctttcttgtccgacaaggacttgtatcaacccatgggtataaatatgtacacccggggtctatgtaatctatctcttgatcaatacaatttggtgcatcgccaccctttttacttctacttttgtttttacgttccgtcggaacttggcacccgacgcggggctgcatcgtcttcaatctccggcgaagggataagtccaatgtttcgccggtccaggcaattgtatcatctacgtcagcgtcgttcaaggctgcatcaatacattcgacctcttgaattgctctggtttggatgatatatttgcctacctatttatcatatgtctctgttaatctagtcttagcatatcaatttagctctatcggctgcttctcgttttagggtttatgtcacgtcccaaaacgactctaaaatacatcctctaaattatgcctagaataattaaaatccttgtgaaaccctccaaaaattaaaatgtgcaaagtaaaagtcaaataaggcttagaggatttttgtatatttcctaaaagcctaaaatgcgtaaataaatattagtggaattttcagagcacaaataataattaagaagaaataaacaaagttgagaaagttttataaaaagaaaaaccctaaaaatcctccttccctctcttgggccgaatccggcccatctccctccccctctctcctctcccccgcggcccatccggcctctccccgcgcgcgcgccgctgacgggcgggcccgcctgccaccctcgctgacgggtggggcccacccgtcatccccgacctcccgctgctcccgccgcctcgcccgcgccctagcgccgccgccgccgcgaatcccgccgcctcccaccgtccccgcgtgcaataaagtggggggaattaatccccgtgatcccctctccctttccccccatttttccctctctctctcgcgttcaaacgggcggatttgcccccgcaaatctcgccggcgccattgatggcggccgacctcccgcgccggtttccttcctccccgtccgccctctcccccttccaaccctatttaaaccctccccgcacctcctctgtccggttccgcctctcgccgcccttcctcctcgccggattcaagctcgcgacgtcgctctctctctccatcgtcgccgccgagctccggtccgccgccgtcgttgccccggaccgtctcccgcctcggcgccgcctccttcggctttgccacatcctcgccgacctcgtccacccctccgtttcagtcgccgaccgccggagcgccgccatccccatcgacccgagccgcgccaccgcctccctccactccggccgcctcctccgtcgccgccgtcgccccggggtgagccgtggaccgtcgcctcctttcccccttccctcccctctctcggtcgccgctccgctgcgccggtggtcgccggcggcgaccatcagggcgcgggctcgccgcctcccgccgaccgcgccggcatggccgccctcgggcgcgccgagtggctgccgcgtggggcccgaccgtcagccgcccgcgcccttgggtgcggctgacgcgtgggacccaccgcaccggccggtatgagcccgggtgcacccggtccaccgtggaccgtgaggctgccacgtgggccccactcccgtggacccggtccgcgtgcccctcccctcggttgacgcaataaaccctttttaaattaaaatttaaatggagaaattcgcaaatattcatttaaagagcatataaacttcaaatggtcataacttggccatctggactcggaattggaccgttcaagtctctaatttttccttaagaagtcaagacccatttttgtgctttgttcctgcttgttatatggaatttattagagtaaaagcccttttattttccgttggtcgtgtagacgctgcagcttcggaagatccgctcttcgtggaggttgaagccgacatttgggaaagcgagcaaggcaagtcacatcatccttgaacatattggatcccattttataaaattattttgatttaaattattgcattaccgctttacttaaattcccgcgttatcactgttttatttatccatgcctatttgcctttgttatgaccttattattagtgttattgatattattaccttgttcaccctagattaaacaaaaccccaactagtggacactctattcatggtaccactagtatgaatttaggtagatgcttaggcaacattatgtggttttacaactctagactttgggaatattttcatcacctggacactatggaatggttggattattgtggaattggattcacacctccccctctattcaaaaccctcaaaatggttttaggctggactcggggtgcatggttttgatagtagcacctcggccatataaggaccgctcttcgggcctctgttgcaaagcactaccgtacttccacatgtctagtgggtaaggcttagtttgtggctcagtctagttataaacaaaagtacacggatggagatggacgaaatcgggggttgatggacatctctagggcaaatgaaggctacacgagctgcggcccggtagtcgagatgtcatggcacagggccggtgtcctgctgctaggggctcagtcctccctacctgtcccgggggttccgtccgtaggtggggttgggtcggtactcttgtctatggctaggatggattggaaactgtgtcatgtcttccgtccgtatgccgtggtggtatgcggcacgtggttacacgtgaggaagatgtgtcttgtgggtaaagatgtacacctctgatcagagtataacctattcgaatagccgcgccctcggttatgggcaagccgagcaatgtacccaagttagtgttttaattcttaaaacctgcttaacaactaaaatgtggaatggttggcctgggttggcttgggacgagctgggacccagggtcgggttgccagttcggtctgaatcatcgtaggccttgggttaaggcaggttcgtgtgggttcacggccttgattaataatattgtatagctctaggaccgtgtttacaaagtagttttgagcaactaagtgacttttaatgctgtttactgcaaaccctaaccctttatattataactcccttgtactcccttgcatttattctgcacttgtgggtgtgtcttgttgagtacggtggttgtactcagtcttgctcaatttttcccaaacccagaagaggagttcctggaagatgaaggctttggtgtttagctcgtgcctgccgtcaagcgcctgtggtcgtcgccctagtcttccgctgtttttcgtttgtcttctggtgtgttgggccttcgccgcccatgtaataaattaactatttacgcttccgcttgttgaactctgaaatgtatcaacttttggtgtaccttgcctcctgggacaaggaataatacacgcacgtaaggaacgcccgttgggttatttccggtcgtgacagtttatgccggtatcagctaaatcgtgttgctagattacattagcttagacatctaccaccctgaaaactcagtcaatggcttgattgtctagatattatgtttcttttcatacttagtgctgcatcagttaagtttgatctactaagttgtgcttagaaccataatctctagcctgcttcttgattgccaataagggtttcatcggggtttcagccggtgagttatctagacgttgcatcggctaataaggattgcatatacatataagttggatttagccgatgacaacaaagtttcactgtttaatctaatcttgtggatttcatgacatcggacctccagccgatgtgtgctttaaccttcggatcgatgcttatttatttgccgattggtttatactggattatcttgttattttattacatcatcatcagccgatttcctttatatcatcatctacattagacatatagccgattgcttaaaccctatcgctatcggctggtatcggcatcggctattatcggctatcggctggaactactctatcagcttgtcagccgatcggctgttttgtctactatttgcatatcttgtcaattgcaggatcaaactgactggcacgcccgcatctcatcaagatttggacctgcacaggagctaagcagatctcctaggccgccatgttcgattttttcgtcaacaggtacttccactcccccctgtagtcggcgcatctttctttggcttccaggtgctgcccgactgcttggatgcagtgaccgcgtcttcggctttggcatactcattggctttctcaaacatctacttgactgtcctaggaggtttgcggccgaatttgccgactaaaagctcatgacgaatgcccttggtgaaggcggcgatgatgacgtcatcggtgatgttgaagatcttgttgcgttgcttagaaaaacgacggatgtaatctcgaagggattctccgagcttctggataatgttatagagatcaaactgggtgccagggcgttcaaaggtgccttggaagttggcgatgaagtggtcgtgaagctccgcccaagatccgattgtgccacggggtagcccgtggagacaggaccgggtagaatctgctagagccacaggcaggtagtttgccatggcttttgaaagtgcatctaggacccctcatttattttggtgttaatgataacacaattagaggttcactaatgctctttgttgagatggatgcaaggataaaaaggagtggaacttgagtttaaaagtattgtggcatcttttgtggtaattgtcttctaatccatgtatatcttgtgttctttagtattaggatgtcatactattaagagggataccacatgcttataattggtagaacactagtgctcgaaatcctgtttttgaagtgttcttgttcttctcctgtcggactatccgatcctgatcagactatccgatgctcagactatccgaaatttctcaaaactttgctctctgtctttggtctgggtgttggctcaaaaatattggactatccgatataaggtcagattgtctgatacatcggactatctgaaatttctcagaacttcactctctgtgttgaattgctttttattcctcttgagtgatttttttctctaagtcaaatcagactatccgatgtaatcggactatccgatgatacagagactccaaaattcaatggaacttgagtctctgtgaggatgaagattttgcttcaaaatatcggactatccgacatgacttcggactatccgacatgtcagatagtctaaaattctccagaacttcgttctctgtctctggctagtttgggacgcaaaaacatcgaactatccgatgtcatctcggactttccgaggtgggatgaaaagatttccttcccaatggccacatttcgggggcatctataaataccccccacctaacccttttctagggttacccaactcattcattcacattcactttgggttgagcttggtgctaaggtgctttggatctttgagctctttctccctctctcaaatccctcctcgttctttgtgtggtggatcttggtggttctggatttggtgtttgagggcctagtgtgtgtttcactcgatcttgagcactagggtttgaccaagagttgtgtggtgtttgctactcttggaggttgaggactcctagatggctaggtgttactcccgagcctctgatctacgtatggttggccgggagaagtttgtaaaggccgaatctcgcctctgcaaggaaagagataccccttagtggaaggaggagtgcttagtgcaacctcttgaggaaagggttagcaaagacccggctcttagtgagctcctcaacagagagtagaatcccctcaaggatttgaactccgggaacaactcggtgaacttcattgttggtgatatctcttcatcccctatttagctttgcttattgtgccgctatagatatagtcgctgtttgcgctatactcttgtttgtgcactagatctacttcatgtgtttctttagtggatcagacagtctgttccaacatcagactatctgatatttttggatagtctgactgtggatcagactttccaaccctaactcagttttagcttccgcataaagttttaaattagcctattcatcccttccctctaggcctaattgaccctttcagctttgttgtctcctcctgctgcgcggattgcgagaccgtagacggtgagccaagattcagggttagtggtgccgtcatacttctcgattccagtcggcttgaagccagccggccaatccactcgacgcaggtcgtttgtgaaggcagcaactccatccacatcgtcatcgtaacgatctggtgaatggtgggggttgtagcctcttgtcgcgcgacgctggttgatggtctcgcgaagatcgatgggacgcctgcggtgtggggagtgggcacgttcagctcgacgctccctatgccggtcagggggcgagtggacagatcgttcgctgtgatccctgctcctgcgattggatccctcgccgacgacactaaggcttggttggtgatagtcttgagatcgaagaggtggaactcggctgccggtcggcgtgcggatgctcgtggagttaactgggaccgagacggtgatcatggccttggtctagttcaagatgttgacgacgtgatcggcctgattgagtgcgccttccttgaggagggtatcgaggagggtgatcgctgcaaccgtgttctgctgaggggtgcgaaaaaccatcgtcccctcgacatcttgttgcctgatgagttctcgtgctcgtcgcccggattccaaggtgcgctgtcgtcgatcctcagcctccttcgcagcccgctcgcgatcttgttgttcacgctgcaatcgttctcgctcttgtcgttgtcgttcttcctccagtcggtgacgttcagcttcttgtcgtgtgcactcttcttccgcttctcgggttcaccactgttccgccgtctcgttgtcggccatgaatacgccaaagaagagaggcgtgtagtcgtcttcgtagctttcgtcgaagtcgtcgaagttgctgaagtcatagcgatagccgaagtcgtcgtactcgaggatctccgttggtcgagaactgacgccgggggagctgaggtagccgtccaattcttccgtcgagaccgtcccgagaggttggagtataacgccgacttccctagagttagattggattgaagccgaagctgggtcccgtctaggccttcggggagaagacgccttggtggtgaagacagcggccagatcattggggagtctcatcaggattgagggatagggcccatcgtcttgatcaggtcgtgctggagtagattggatctcgtccaagtggtttgaagccgactcgatcgagatgatcttggggtagatctcggccgagttcggaataccgaacggggcggagacctagcctctcctcgactggttcggatccgagtcaaggagagaaatcttgccgaagtcgttggtgatgaagtcgaggctgccaaaccggaacgcctgcctgggagggaagacaaagtcgtcgatgccggagacgaaacccatcgcactaatcagcgaaaaacttgacactacccctacctagcgcgccaactgtcgaaacaagatttcggcaatactaaaagggggtggctattgagctagaaaagtggatgggtttagagacaagaaagtttatacaggttcatgccttcttaataagaagtaataccctactcctatccggggattgatccgccgagtgtattattgatcgtatgatctgggagtaaaaagtcataccccaagaggcgcccggacccctccttatataggcgaaggagtccgtattacaaaatacagcccatatccctaacggaataggtagttacaaatatggcctaatcgtaaccgacttggatcccgggtatttccttaacatacaagtttggaacttaacccaagtctccttaaagatattctatctatacatggcaccccatacccagtcggattatacatgccgtgtaggtatggggtatccataatctccacaagtatgctcaaccatgttgaggctctgtttgtcgcactgtaccactaacttggcgtttccctggatagtgattatcccttttggtcctggcatttcgagcacttgataagcatagtgggacgctgccatgagctttgcgagtgcagttctccctatgatggcgttgtatgcagtgtcgaactctacgacatcaaaggtgatctgctctgttcggaagttgtcggcttgtccaaaggtgatggccatgggtattgtgatcttacccaatggcttagatgatgattctggagtgattccatggaagggctaatctgtaggcgccagctcgcttcgtggtatccccatggcatctaaggtattggcgaaaagcaggttaatggaactaccaccatcgatgaaaacccgtgctaccatgatgttccgaatagtgcgctcgaccacgatcagatatctgccaggtccggttgcaattttcgggtggtccgcctgcaagaactcgatcttgtgttgggaccatctcatcttgggaccatctcatcttgtgttgggaccatctcatcttgggaccatctcatcttgtgttcggcaatatgaaaaaggggtagcgcacgagacctaaaagtggatggatgcggagacaaaggattaagacaggttcaggccctctcaatgagaggtaataccctactcctgtttggggatttgaatccgtcgagtatgtatagatctgacgatctagttgtctcatgccccctagagggcttcctgcccaccttatataggatgggggcgggattacaagatagaaaccttaaccaatacggtatcggtttcctaaatctattttacaatattatcaaatcaggactttaggccgctccataatataaaaggaaacgtaatacccaagtcatgatcggttacatattccatagatataagctatcccctatgactaatcggataaccatgccgtgtgggtatggggtacccataatctccacagtagcccctgagaccttcacagtcgtaaagataatcttttcttgaactagattacttcaaagccgagtgcttcaatcatctccgccatgatctcccgagtgcttttaccaaatatgaagactgtggagggctaaaaaataaagtcaggtgcatcgaatagatgtacctaatagatgcaccaactgagtggttttgataattgtagtcaaccaagcgacttgatattaatatgtagcatatgcggtgtgaatccttgaacgacatgatccgagtgatataccgactgctttgtaaaatatgatgagtgtaacctaaagttggctacattattgaaaattcacatagcaaaacagctataaagaagcttgaatgccgtgaataaagaaatttccaaagtattgggcatacgccatgcgcacactgctttaacagatgtgcttaagtccctaaaagacacatggtttcaccacacccagaaatatacggcatatgtggtgtaaaatccgagtaaataaactcataaaggatttaccaaccacctagaaaatgaccaagatatataatcagcctaagccataatattggtcaataaaaatgcacacttacgtggcaaaaagcaacgatattgtatccaatcaattgcttgataaacccaaacagcgccatgactatataaaaaagtcagcggggcagctatataaagctttactgtttgacaccttttaagatgcattgtaccaactcctaaaaagttgagtaactgcggtataaaaggattttaaggtattgggcacttgatcacgcgcactttggcctaagcaaaaagtgcctaagtccctaaaagaacgtgacaggccacacctgaaaatatgggctgtagacatattaggcctaggccaaaaaaatatgccttcgacaccctttaaaggatgacgcatataacatgctcccgagtagtaaatcttccgggtgatatagaccaagtgttgctcatatcaatagcttctgatatgagtgattatcccttatgagatactccaaaatagatataataattgaatcccgaccgccttatggggaataataaatagtccagtctttgagcatagaaaatagacccatgatcattaaattcatgttgcatgtatccgaaacaagtccaaattgaaggtatgatactggtgtttgaggtagtaagcccctgagtatatagcttgtccttttggagtagttgaaattatccatcggtgatagctgatgcaatcggcatggaagcgaagaaaccagtcagcagcagtcagatcaactaacagtgaagatgaatgcacccagcaatagcgacagagttttgtagccttggtgacgaaataatcagtcggagacgacgaggcggtcggtcggtgaagacgtagacgcccaacagacggcggcataataggccagccgtgtaggcggagacaccagtcggcggcggcgaaggcaagccggtcggtgaagacgtagacgcccaacagacggcggcataataggccagccgtgcaggcgaagacaccagtcggcggcagacgaggcggccggtcggtgaagacgtagacgcccaacagacggcggcataataggccagccgtgcaggcagagacaccagtcggcggcagacgaggcggccggtcggtgaagacgtagacgcccaacaacggcggcataataggccagccgtgcaggcggagacaccagtcggcggtagacgaggcggccggtcggtgaagacgtagacgcccaacagacggcgacataataggccagccgtgcaggcggagacaccagtcggcggcagatgaggcggccggtcggtgaagatgtagacgcccaacagacagcggcataataggccagccgtgcaggcggagacaccagccggcggcagacgaaggcaagccgatagtgatgttctgactgatccattcctgaagcgtaggagataagcttaaagccgtgaatcccttttatgcatatctggatctggatcctacagaacaaacagataggatgagtagtatctgatgtaaatataatactcgagaaaaatgcaagtattttaaaatatttataaatatgtatttcttctcttgtcaattttgatttctccgagcagatgactcattacgtttaaacactctgcccgactagtcatagccaccaagcaccgggagtcggcctaagcacttcccaaacatgcatatgagtgacatgagttcgtcattaatggaacaaagtttcatgggtcagagtttactactcgggtacttttgcaattattaagagcagaaaataaattatcttatctctatgcttttgatttattccgaataatgcttagcaccttgcgttattcggtccatccaacaagccctcgggtgctaggaatcggcccaaaggcaactatccattggcaaaccaaacggaaagcataggaagatggaactccataactcgataggcacttttgtactcagaataagtcgcaagcaatcaagataaatattatgaaaattgtttaaaaaatatgatataacatttgtagcccccgactcactagtcaacagcgaaccagttgatatagtgaggcaaaggaaaaggtaaaatatcatataaagaataaaacaaatgatgacttagctttgtcgtattccctcggtgacagcagaagtagccgatgtgggaatgaagcagtctatcagtggtgacaaaaacaccagtcggtgccagtggaaccaagccagtggtgtagataatgaagcccattaacggcggcgaagtccgccaaccgtataggcgaaaacaccagtcagtggcggcagaggcaggccggcggtgaagtcgtagacgcccaacagcggcggcataatagaccagccgtgcaggcggaaacaccagtcggcggcggtgaaggccagccggtcggtgaagacgtagacgcccatgtatggtggtgtgaccaaccaaccgtataggcgaggacaccagtcgacggacgcccaacaacggtagcatataataggccagccgtgcagacggaaacaccagtcggcagcggacgaggcagccggtcggtgaaaacatggacgcccatgaatggtggtgtgaccaaccaaccgtataggcgaggacaccggtcggtggcgacggaggcaggccggcggtgatgatggcggaggcaagccggcaacgatgaagtcagggaacggagaaacagcttcgcactccagccggtctatccatgtggtagcatgcgacgtctgcccagctcgttggtttgactctgtcgactcgtcctcctggcgacgtgcctctgtgcatttagatcaggcactcgtgtacagctcggacagaggtggattgatcgataccatccggtgattaaatcaagtagtagttgcatgaatcttaattactccatattagacaacgttgcctatgcatggcggcaaagtccaagctcccaaaacaaacaaatttgcctgggaataacgatagtatatatgctggtgcttcagtaattggagacacgtgctgcaaagtctgctaattataattccagataaatctgttgtcagtggattccgctatatgcatgtatattgtatacatggcgaaatcgcacacgattactattccgattggatagatgactgccttccgtcgttctgcgtctggctaatcgcagctgagttgaaatcaggccgaacggataattggcgtgggactcgtcctggcaatgatcggattccgacggcggcaaggcatgtatatatatggtatttgatcttgaactgaggtcttccaaggaggtattgacggcggcggaaattgaatccatcgaacatgtcgaggcggaaattgaatccatcgaacatgtcgagactgatcttcccggctagattggatccgagtcgaagagcaagagcatgttgaagtggtcggcgaaaaaaactcccgaagcgaagatgaattcggtgactcatgaagttgattccatcgcacttgtcgacaggtaactcgacgcaacccctacctggcgcgtcaactgtcgaaacaaattttcggcaatatgaaaagggggtagagcacgagacctaaaagtggatggatgtggagacaaaggatttagacaggttcaggccctctcgatgagaggtaataccctactcctgtttggggatttgaatccgccgggtgtatattgatctgacgatcagtttgtgtcatgtcccctagagggcttcctgcccaccttatataggatggggggcaagattacaagatagaaaccttaaccaatacggtatcggtttcctaaatctattttacaatattatcaaatcaggactttaggccgctccataatataaaaggaaacgtaatacccaagtcatgatcagttacatattccatagatataagctatcccctatgactagtcggataaccatgccgtgtgggtatggggtacccataatctccacagtagcccctgagaccttcacagtcggaaagataatcttctctcgaactagattactccaaagccgagtgcttcaatcatcttcgccatgatcttccgagtacttttaccaaatatgaagactgtggagggctgaaaaataaagtcaggtgcatcgaatagatgtacctaatagatgcaccaactgagtggttttgataattgtagtcaaccaagtgacttaatattaatatatagcatatgcggtgtgaatccctgaataacatgattcgagtgatataccgactgctttgacagatgtgcttgagtccctaaaagacacatggtttcaccacacctggaaatatatggcatatgtggtataaaatccgagtaaataaactcataaggatttatcaatcgtccggaaaatgaccaaaatatataatcagcctaagccataatattggtcaataaaaatgcacacttacgtggcaaaaagcaatgatgttgtatccaatcaattgcttgataaacccaaacagcgccatgactatataaaaaagttagcagggcagctatataaagctttattgtttgacaccttttaaaatgcattgtaccaactcctaaaaagttgagtaactgcggtataaaaggattttaaagtattgggcactagatcacgcgcactttggcctaaccaaaaagtgcctaagtccctaaaagaacgtgacaggccacacctgaaaatatgggctgcagacatattaggcctaggccaaaaaatataccttcgacaccctttaaaggatgacgcatataacatgctcccgagtagtaaatcttccgggtgatatagaccaagtgtagctcatatcaatagcttctaatctgagtgattatcccttatgggatactccaaaatagatataataattgaatcccgactggcgcaagtattcggttgatagcccttacggggaataatgagtagtccagtctttgagcatagaaaatagacccatgatcataaattcatgttgcatgtatccagagcaagtccaaattaaaggtatgatacttgtgtttgagctagtaagcccctgagcacatagtcacaattgttcattgatggtagctgacgcagttggcatagagacaagactaccaatatagaggcgaagaaaccagtcggcaacagtcaggtcagccagcaatgaatatgaaggcgcccagcgataaagttgtgtagccatggcagtgaaataatcagtcggtgatagacgatgcagctggtgaagaagatgaagatgcccattagtggcgacataataagccatccatgaaggcaaggataccggtcggtggtgacaaaagcaagccgacagtgaagatgtagacatgcatcaaaggcgatgacgaaatccaccaatcatgaagatgaagaaaaatagtcgacggcgacaaacacaaccgacatgatgaagatgatgatgtcagtgatccagtcaatagtagtattgcggccgatgataatgacgaagacgctcatcagtgtttgcatagtaggtcaaccatgacggtgaaataacaagctggcaatgatgaaagcaactggaggcgaagacgtagtcacccattagcaacggcagagatgtcaggaccgatgaagtaaaggtgctggtgatgatgtcagtgacaataatccatcaaactgttgagaagatatcaaagctcgagtagtttccttgatgcgagcgtgtgcataaagaagattgatgcaacgctccttgatttatgaagatggcagtagaacttggtgttatagctgttgcagatgcttcatttggaggaaaataaatgatgttgtccaactcgttgaatctgagttaattggttgataactccaaactcccgaacatgtagattaaatcttgaacttgatacttgagaattttggaatagattgtggcggcgtggagaagccaaaattgccggtgtaataattagagtcgctgaaattaaatgtcggctctgaagcaaagacgaagataataactcccagagttgactcgtcgattgattgattgcttcatcttgccataaagcttgtcgaattttgagagtcttgtatttgtgtagcccccgactctttggttagttgggaaacaactgaacatagagtcgagaattgtagcttcttgtcgtcgagtactcattgcttgagtaaagatgcatgttgaagatgtccgagtagaaatattgaagattggaacaccacttgttgtaataaaataacacggcatcatatttggtgacgcatgccgagatgtcgaagctcttgtagacgtcgtggttggtgaagtagcaaaacttgcgaagtagcggcaatagagtttgccggtgccgaagataatgaagatgaagtcgctccaccatgatgataaagttgcatagccatgatgaagtgaatacgagtcgacggcaacataaacaaaccagtagcaaaaacgcatagttatgaagataaaagcaccagtcggtggcggcataaccagtcggcgacggaagacgatgatgtccatcagtagtggtagcagtcggcagcagacgtaggcagcttgtgttgaagatgctgacgcctattagcggtgacggtgatgtaaccagccatgaagaagatagcatcagttagcgtcataacaggtcaaccgtgcaggtggtgacaccagtcggcggcggatgaggcagccggtcggtgaagcagccggtcggtgaagacgtagacgcccaacaacggcggcataataggccagccgtgcaggcggaaacaccagtcggcggcggacgaggcggccggtcagtaaagacgtagacgcccaacaaaggcggcataataggctagccgtacaggcggacacaccagtcggcggcggacgaggcggccggtcggtgaagacgtagacgcccaacaacggcggcataaaaggccagccgtgcagacggaaacaccaatcggtggtggacgaggcggccggtcggtgaagacgtagacacccaacaatggaggcataataggccagccgtgcaggcggaaacaccagtcggcggcggacgaggcggccggtcggtgaagacgtagacgcccaacaacggcggtataataggccagccgtgcaggcggaaacaccagtcggcggcggacgaggcaagccggtggtgatgttctgactgatccattcctggagcgtaagagataagcttaaagccataaatcccttttatgcatatctggatctggatcctgcagaacaaacatatgggatgagtagtatctgatataaatataatactcgagaaaaattcaagtattttaaaatgtttataaatatgtatttctcctcttgtcaattttgatttccccgagcagatgactccttacgtttacacgctctgccctactagtcatagcccccaagcactgggagtcggcctagtcacttcccaaacatgcatatgagtgacatgagttcgtcattaatagaacaaagtttcatggatcggagtttactactcaggtacttttgcaattgttaagagcagaaaataaatttatcttatctctatgcttttgatttgttccgaataatacttagcaccttgcgttattcggtccatccaacgagcccccgggtgctaggaatcggcccaaaggcaactatccattggcaaaccaaatggcaagcatagaaagatggaactccataactcgataggcacttttgtactcagattatgtcacgagcaatcgagataaatattatgaaaattgtttaaaaaatatgatataacatatatagcccccgactcagtagtcaacgtcgaaccagttgatgtagtgaggcagaggaaaaggaaaatatcatataaagaaaattaatgatgacttagctttgtaatattccccttggtgatggcagaggtggccaatgtgagaaaaaaagtcgtccatcaataacaatgaagacaccagtcggcggcgacgaaggcggttgatggtgaaagcgaagatgcccaccaacggcggcataataggccagccgtgtaggcggagacaccagtcaacggcggcgaaggcaagccgattggtgattagatgatgtcacccaggaacagtggcaaagtcatgttgccacgaaggcatatatgcacaaaaagagcaaaccaatctggttagtaccaacaaacagaatagttatagatatatagacaaatatatgctcctgttggcatgggcgattgtgttgatagcgccatgattagttgaggcgtgctgacatggattccggccgaaacaatcgctaggtgacattcatgtgacagcacaattaataactgtcacgcccagccacggacaaccggttgatcttggtcagcatatacatacatgcaaagaaaacgattagtagattaatctgttatcaagcataaaagcatgtatataagcatatgtatatatcaatgtatggctcagagctccttgtaatcggctgctcttatatgcccctggtaatcagcaatgcttctcgcgtgaagactgccggttaacctatgctggcgtgtagatcggtacagagcgcgaacggaattacatcagcaggacacatgaggtcgccgaccgagtggcagattaaaaccgttgaactcattgagatgaaggttgaaaccgtcgaactcattgagatcgatctcagcacatctccagaaattgattccatcgcacttctcgatggaaagctcaacgcaacccctacctgacgcgccaactgtcaaaacaaattttcggcaatatgaaaagggggtagcgcatgagacctaaaagtggatggatgcggagacaaaggatttagacaggttcaggccctctcgatgagaggtaataccctactcctgtttggggatttgaatccgccgggtgtatattgatctgacgatcagtttgtgtcatgccccctagagggcctcctgcccaccttatataggatggggggcaagattacaagatagaaaccttaaccaatacggtatcggtttcctaaatctattttacaatattatcaaatcaggactttaggccgctccataatataaaaggaaacgtaatacccaagtcatgatcggttacatattctatagatataagctatcccctatgactagtcggataaccatgccgtgtgggtatggggtacccataatctccacagtagccccctgcgacgtggagcagacttcgcgttctatatttttgtactccctctttgaggtgtaagatgtagaaccgctaaagatgtgtgagacgtggaggtcgtattctaggaatacggagtcagagtcggaagtggccgtctcaacaatcgtttcgacaacacgtactctctttcccctctcgattgctagttgtcgcgcgagctcctttttgaagacgcaacaatcttcaatggagtgactgttcgtcttgtgtatagggcaccattgtttccgtgagtcatcgttctgggcgtttgggcgcttgggtgggtccgtttgtgtaacaacccagcgcccggaaacggtattgggtcatctcatttagttggaccacacctaacactattaactcacttgcgtttttgtcctcgcttcacgcaaaaggttcgaaccggagttaacaacctccaggctcccatccttataagctgctgctgctctagctgaagtagcgaggtggtactaaactcggctgctacagtgccgcgagctactactgctgcacttctgcatgcacggacactattaactcacttgcattttcgtcctcgcttcatgcaaaaggttcaaaccggacttaacaggaccccatccttataagctgctgctgctctggctgaagtagcgaggtagtactaaactcgggtgctacagtgccgagtactgctacagtaccgcaagctgctactgctgctgtctgctgcgctgctgcatgcacggacggcccagcccagctgttgcttgctcacatgggccggacaaggcccaaggccagctagcttgctcttttttttagggtgttacagtttgctcagcagcgaggacctcttccgagggtttgcgcttcccacaattatgacttctcttcttgctcaactctggtgcgtctttattggctggtgtcacgcccggaaaatatctttcccgaacgctcatatattaatccccatcccaggaaaagccagggtacaccacacaaacatgatacaaaagacacatctttattaattatcacgataatatttacattattacaaaggcacataaggcctaacaatcaaagaaaaacagcagtgtactagcgggcctagggcttcatcttcacaggcgttcaactggggtataagccaagactccatctaaaacttcctcttcaagacgcttctctgactggagggggaaagattgagcaaggatgagtacaaccaccgtactcagcaagccacaccgggaaaatgcacttaatgcaagggagtacaaggattcatttataagggttattttgcagtaaacaagcacttcaaacatttagttatttaaaggcattttaataaaatcacatcctatctctagtcaaattactaccaagtcgtgctacaacgcaaacttacatgggccgcgcaacgatgcgaacccacttaaggcgcgctacgacccgaccttaccttaacccaacccacaggctccaaccatgtgttccaactctacagacagaaaccactaactttgggtcattgctccgcttgcccataaccaagggcgcggctattcgaataaatttaaccttggccagaggtgtacatctttacccacaagacacagtcttgactacacgtcaatcgtgcatcgtgatgccggaaaggtacccgaagagccaagatcaccacataacccatcgtttagtattgtcctaaacaaagaagaccgacataaacttccacggccagtagactctgggacaggtggatagtctatgcccctgggcgcaactgccaggaatgtccattgcaaactagacatgtggtactacggaatatgctttgcaatcatgccccgaagaccagtccttatgtcggctgaggtaggacaaacaaaaccatgcacctcgagcccagctgaaaatgagtttgggaattttgaaaggggagatccaacctgtctaggctaacaagcctctaatccatcattatcaagattatagagtcattcccaaagtctagattattataaaacaactaaaattttctaattaagcagggctaagcataatcctaaaatgtctagtaagcaccacatatagagttctcactagctggtttttgttacctagggttgtcaaaggtaaatacacaatattcaataagtaaagccataacatggaaatgtaggaatggctaattaaaacagttataacgcggtaaatttaataaagcgaatgcaataatttaattaaaatacttttcgcaaatgggattcaatatgctccaggagagcgtgacttgccttgctccgagaaaaggagggcttcggaagcttctgcgacaaactcgaacggcaccgcaggagactccaaaatgacaggaactacacgaacaacacaacaaggctacaacgctaagaaagaaacaagaacaatacataaaaacaacaaatacaggatctttaagttataacaaaaattagacaatttggacgggtcaatttggagatcgtatggccgagaaaggaccatccgaattttaggtgcaattaaagtggaaatttctgagttgtttaattattattaaaccattaaataatgtgttcttcaacatcgctcgaggaaacaaaggaccgaacgactggtagctaagacccactggtcagacggctagctcaccgtggaccgggttcacagagacgatccacgggaaggacgagtgagaccgtacgtgtcaaccaaagcaagtggccgacaagcggggactcacacgagtgccacacgggttgcacacgtgcgcaagcacgaggcggcaacacgggcacacgacgacaactaccacccgtgcacgtcaagaccacacaaacgatggccgatgccggcgcactggaccggagccgacaaaagcacgacgagcatggggcgacgtggggaggacgaggacggggcagcgaggagaggggtccttaccaccacgcacgaggcgaggaaacgatgacgatgaccgacgacgaacggaggagactggcggcgacgaacagggcgacgactcaaggaggatgacttcggtggcgacccttgcatggaggcgaggatgggcttggtgcagtgacgacgatcgaacgaccttgacgatgacggcggctttggcttggtgaagaggcggacgacgataggatcagcttgacaggaacggcagccgaagggggatgaagcaggaccgaggacgaagacgaggcaacggccagggaggaggacggcgatgtcgggcggcacaccggggaaggcgacggcgcagccggccatcacagcgggtcgacaagccggggacgacaatgccacggcgcacgggtgccgcggcaggggtgacgatggtgggggcacacttccggcttgcctcgggtgaaacagaggcgaggccgggggagaaggggtggcggatgagaggccgagggtggcagcggaagggtttggcgcggctccaatcggcggggaggtgcggccggggctcgccgacgcggtggagagagaaggccgagcggggagacggtggggagaggcttggcttgcggggtgaaggaaaaaggggaggaatgggaggggcggtgccattttgtaggccgggaggagggaggggaacggccgaagggagctcggccggccatccatggcggtggttcaaggaggcttaaatccggtgaattaataccgaattaggccttgttcggttacgcccggattcaatccgggccaggaatgacaagtattgatgaactacttgcagcaangcgcatcgaccgacacg

SEQ ID NO: 16698 - DNA, 20589 bp, Oryza sativa
ttctatcaaaaatttcttactataatttcattcccggcccagattgaatccgggcataaccgaacaaggccttaaagggggggaaagttgggggaattgatgaggaggaggagaggaacctattgagagggaacaactggggagggagatcaagaggtggcggcggtgcttctgttcatggccggggaaaggaacggccgagcaggaggacgaagacgactgacaggcggggcccacgcggggggcgtgcggtcaccttgcgtgcggcgcgcgtgagggcgcgggaggggagcggctcggcttgggctgggcgaagcagggcggcccagggaggaggggagggcggcctgggccaaggcaggccgagaggaagagaggagggagagaaaaagagagagggaaggagaggaggaccttggccacgggccaaagcagaaaagaggagggagactaccgatcggtcgcccgatccaaatcggcaaaaatcgggcactcatatcagcatgacgtcagcgccacgcatgcgtgcaaaactactttaaactaatttttctcttaaattatttattcaaatcataatccgattgcaccattaaattcgttgcaattaaatctttaaaacaagaccacacatggatatattccgatgaaaaaaaattagcttattattgaattatttttaaatgttgcacgatgttccaccaagtatatcggaattatttcactaagtggatcgaaaatgtttcaatcgtttaaatcaggcgttgtttcaccttatataaaaacaatgtttcagcaaatagtgaaagaatatttcagttcactacaacattagatctatacgaaatattgtgaatatactaggtgaaacatttttggtggaacaaaaaatgaaacaaattcccttaatagagggtttccaaaatatgtgggtgatttgttgcaaaagaatgtttcgttcactgcaacattagatctatacatagtgaaacattatgagtacactaggtgaaatattttttgtggaacaaaaaataaaatgaattcccttaatagagggtttcctcaatatgtgggtgatttgtcgcaatagagttaattgtgtagatacgtggtgggccagggggccaactgcacgcacgcggggggcggggggagcgcccaatttttgctcccccagccgatcgcgcgaggataagcatttttggggaaaagggggaggactttgggccgaaaataacccaaagagaagatgggattatttttaggttttctattttaattgactctgaaattggtttttgttgcttagaattatttcttgcgctctgaaaattcatgtaaatattgagggctcctttcataccaaggagaatttaagacaaatacccccaagccacattcgaatttttcttgtacgcattttaatgtttgccattttctatcgaattttaattaattatatcgttccattttagagaatgatttttaaaacgggatgaatttatcaggacgtgacagctggctttttctcctcgcccaccttactttttccttcctttcatcttagggcgtcatctgcatgagcgcatctgtcgataatttcaaatagcttgcgagcagatgtgatccgtcgtgtcactagttcctgggtggtgtatcgatctcggacgcctgacttaaacgcgtggatgacaaaagcgtcggagatttcagggatcgtattcctgcactcattaaagagtcggatatagtccctcaacgattcaactgggttgtgagttagagcgtgcacgtggcgcttatatcttccctggaaattggcgacgaactactgccataagtcttcccacgaagagattgagtggggtggccacgtcatcaggctctctttcccctcctctcccttccacctcctctctctctctcactcatctccttgggcaggctgactggcgatggggaggaggtcgccgggacgatgaggaccgacggccggccggtgacgcggcggcggcgacatgggagaaggggagggaggcggcggcaggagcacaggggagatcgagcacggcggcgggcagagtggggcgatggcgaggcggagcagcaccacaccccctttgcgcccggcgtcgtcatctggatcgcgtcgtccctcctcctcgcccccttcgtgccctcctccgccaacggcggtgacatctccattggtcgcgaggatcccctccccgagcaggaacccgtcccggatcccgcccccacctcttgcgcggtaggcaccacagctcaagctcgaactcgccgcccccgaagccctcagatggtgaagcacccagcgggtgagtcacagcggtgggagagaccgtgacagagtaatcagcctggtcctgcatacatttgaatgcctcaagatcttcctcttgattgtcacctttggctttgtcatctttgccggaactggtttctacgtcatccttgttcgacagaactaccttatatttctgaaccatggtgccggagcgagtcggtgcgaacgaatgcagaaatcggttttgcaagtcgtctttcatcttttcaaattctgccttctgctccggggtcagcttgtccatcgttattgggatgacgttctctgggtcaacctctcctttcttgaggcttgccatgaagaagattttacgaaagtcagtcccactaggtgtgccaagaggtgtgttgacgcgaaaaacacgcactggactgagagatttgcttaactctagtgcaggtccaaagaaattgtcttcgggttctgagcgtgccagggtttgatcctggaaccgaaaagaaagaaaaaggaaaaagttaaatccatcaacgatagccgatcagctggattgccgatgacgtatcattcagggccatgccgatgtgacttgcatcggaccggcaaggtcagaataaacgtaggatcattagatctactcgatcagctgtagatgtcaacgatacataatctatccattgaaacacacttagatcgggtgattgggatagatcgggcgttatgccgagacagtataaatcactcaacaactaagtgtgccccaaagtacagattatgtaggttcacagcatagccgatagagcaaacataacgtgtatcggctagtactccgatactactgtatactaggatatcagcgcagatgaaatatacaaaactaagatcaatctaacaagcagggtgaactagtagactgataggaagcttaatatactttaaacggatgagatcttaatataaagggtaggtttagacagtccagaaccaagtagggaaacaggacggctaaatcaagtaagatcggctgaaactccgatgctatatgtattagcattcaaaggaagagctagataagacgtttcaagacaatacttaacagatcgaacctaacggttgcaacattaagcataaaaagaaacataagatctaagtaaatcgatgaaaactcattcaagatggtagatacaccacatagtctagcttgacattgacgcctaaacctatcggccgtttcgatgatagaggctagccgatgaagtttaggtgacggaatcaatctagattatgcggtatatatgataactcagcaattcacgtagacaggattagagtgtcataaagatgtaagcacgaatcccgagaacgcaatccgccataacaagctttacctcttcgtcgaagatcaaacccgatgcaacccaactcgaaagcaaagactcgtaaaatagaaaagggtggtgatgcgcagaagtattattgaactgtcgtcccttgatttcaagatgtcaggtcttatttatatccgaagtacatagcttgtccttgctggacacgactcttatctctattacaatttaaaatacgaacaagcccattaggtggactcttaccaaacatatctttaaggaaactgaaaaaacatcctaattaataaatacaattgcccctttcttcggacctcgatccttgtgtggcaatggctatgaagtgctttgactaatcttgatgataaatgtgggaccgtatttttccccctggtcgtatcggcttcactccatcagatttggtgctagccgatatgtggcagctgataccacttgtagctgattcgtgcagcagccgatgctgctcgtagccaatgctgctcgtagccgatgtgtgctctgccttctcaaacataatttatccaaatcggccttgaccctagctctgaatccggcttatggtactaccaaatttggtcgtcaacaagcgccagcgcaaaatcgcccaccacgtcgcacatcgatggacctcctcctcccctccacctccctcccccatccgcatcgccggcgtcgtcctactgtagccgttctttagtggcgagagatgaattactctgtgaataaacagattttactagcccagggagatgagtgtgagagagagaggaggggagagagagcctgatgatgtggtgtcctgaaatgtggggcccacgtgggtcccacgctgactcgcccgccacgtaggataaaatcggggtcaaaaccactgaaggatgtaaagcgaatggttttataagttaagggatgatatatatctgattttacggttaggggtaatttgatgacaagttgagggaccttcggtgtactttttccttttctactcactcttctgggcctctagtaggccatatgggccccagttttagagtgatcggcccaaacatggaccgggccatattgccagcctgtctaaaaaagaaaaagttcactttgagatcactgatccatcgggcacattagatagcattgaggacggtttggtacctatggggtagttttgacttgctcttgttaggtgaggtggcatcttatatgggacccacgcaaaactctttcaatgaattggttttaaaaaaataacatgacccacctatcatcttctcctcccctcttctctctccctttattctcctccctcttctccttctctccatctcttcgatgagtttgtgggggacttgagggaagagaatgtcgccggcgtggatcaaactctaagtgctctacccgcatcaacctcgacagatggcgaaatgccaccaaggatgagaaggtcaacatcccgcttctgctccagccaacaccgctgagggcgtcaagccgctcgtcgcctccatgcacctgccgctccaagacatccgcaccgatactggtgtaggtggccgctcctcctgctcacacgctagcttccagtagctctagtggggagaaagaaaagttacgagaggaagcgcggcattggtggccacaatgagggggcttgaccgacacgacgcaacgattgagcgataacgcgaacggccctagagcggcagtcgagcgacctgtgtgcgatggcggccgcagcgtcgcgctagcttgcggcgtgaggctgattcgcgggctggggatgcgcatgtaggcgccctagttgatgttgccctcactctcgtgcgtggtggacaagtacaatgcgtcgctgaacaatgccatggcgccctcatgcaaccctgccgccgcgacatccgacgtcaacacgatgcttgtccttcacctccactttttccccttcgcatcacaatccgacctctccatgatgcggttcatcgtctctggctctctgccatgggcaggtacatccctatgccttcttccttcgtggcctgctccgtatcacttgacgaggacctagctattgcatacgtcttcaccttcaaatccctcatggcgctcaagacccacgaggctgttgtccccacgcgccttgtgcgaggccgtggcggcactatccattggtcgtcaccccttccagttcgtggtgtgatgtgaagaggcgtgcctccgccatcgccatcgagcatggcagacatcatttccttgtcctcgattgtttgcgcacctccaccacatttgctaccgcagagatcgaagatatgaggagagagataaggtagaatatttgtttcaatgatacgggggtcccgcatgttcttcttgtttctagtgccacgtcaaccaaaaacacgctcaacactgtattgggacccaatgtaatcccgttttataatattagagatatgtagtatttcaattcaggacgattttaaaatttgacgataagacgagggagctccagcgaactttttccgtctaaaaacaatcaatcatcaatctggatctggcccatccacatttacttttctttcttttttgaaaaaaaaaaagctgcatctccaaattctccgtcttcttctggagcgaggaagagggaaaaaaaagaaaagaaagaaaagaaaacggaaagtagtacgatacagtaatggtaagatgtgggggtggaaacccaaatggtattggggagggcaggggtcaggggggcgcagaggcctgcttcgttgctccgccgccgccgcctcctcctcctcggttcctcctcccatctcctccgatctcctcctctccaaaccctatcaaatccgatcccgatctcagagcaggtgcgcgtgcgcccgcctcctcctctagatttcgatctccaccaacaataagggatcccatcccatcccatgcccgcctccccatctccggcgccgcgagccatgaagcgcgagcttgccttcgcactccagtcgctctccgccatgtccacctcccccggccgcacccgctccggccgccccctctcctcctcctcctcctcctcctcctcctcctccgcccccgcccctgcccccaagaggcggaggagaccggacaagccccccgaccacgaccccgcccccgcccccgcccccgacaaggatcttctcgtctcccctcacacgcctcctatggacgccgaggcgcccaagcccatacacctcctcaacgacaaggacaaggacaaggagggggacgatggatctcaccaggatacacccacgctacagtcaccccctcgtggatctgatgctcatccaataccaacggagctcaatgtttctgctgctgtcgccaggcctccacaaccaccccatgcacaaccaacggagctcaatgctgttgccgccgccgcgtctgctctaccaatggagcttgatgctgctgctgctgctgctgtgcctgccgaatcaacggagctcaatgctgctgcaaccgctgtgcccgcacaaccgacagaggtcaatgctgctgctgagattgtcaaaccaattgggctcaatgctgtcgctgctgagactgcaaagccagacatggccatggaattgcaggaaccgcctactgtaactgcagccaatgggagggatgtttcccatgaatcatttgaacaaaacctgcaacaccaggtcctggacaatgccttaaccgatccttctttgcttgccgagagcactgcaacaccagcctctactgctggcctcaagcctgcgaggcgcttcacacgatcgctgctcaagaacaaaccagaggaagagcccacagctagcaaaagtcaagaccctgctgtctccatgatatcggaggacaacaacgaggcctctgttgatttggctcttgccccagggaagccacagaggaggttcacaaggtctcttctcaaggtaaaggttgaggcgcgctctaccaacaatttgcttcaatccaaggaggcaattgacagcacatcagactcttctcggtcagtgaagaagatggagatgaagatgtctaagaaggtcgcctgcctcacaaagcacccaagcaacattagagagttgctcaacactggcctgctcgagggaatgccagtcaggtacatcatccccagtagcaaggtacgtgaggataatacttatgttttatgacttttaccaacagcttttcattttcagtccattatagcgagttccttattaattattgtgatggccaccatgctagtttttattatactatcttgtaagtttttagccaagcaatgttaagattactcatggaactttatctttagtctactgtggtatttaggaattttgtctttgacgtgacagtacatgtatgcacttataatatgtttactcatcagctaggtcttatccatgaaaatagctttaatcacctattctgttataatcgggacctcccagggtcagctcccaatcgatcttgtgatatattctaagaacaattgccaggccaacacacacccttgatcttttgctttgcttttcatggtacacttcttgtggacatggtgtgctattatttgagttgcactaagccaggtagcccctaaaatgctactctctacgaatgatacatctagccaagaatattaaaactatatctgcgtcttttcttctttttttttggggggggggtgttattgatgggagtatctttgagtgattcactgtggattatgttctagcatacttttgtagctcaatgcaattaaattatattttgtttgcaagttgcagaaggctgtgctgaaaggagtgattacaggctgcaatatccgttgcttttgtttatcctgtaatggttccaaggttagtactccttaatcgataaatcgctacacattacaaattgtttacattatccacctaaatttcacaggatgtttgttcttatttctttgaacaacatgctgggagcaacaaaaaacatcctgctgaccacatatacttggggaacggtaatagtttgcgggatgtgctgcgtgcatgtgagagttctcccttggaatctctggagaaaacaatacgttcttccattgatccaattgcgaagagaagctatgttaattgcctaaactgcaatggtgagggtttcatgcgtttgttttttgactgatagttttccttggtacatttatttacgtcttctaatgctgcagaacatctttcttcatcacaaactgaaatctttggaagctttttgtgtcaacgttgccttgagccaaaacaacatcaagatcccccttccccatcttatgcttgtaagagcaattccaggtaagcagtccaagcaccataatatgttagatgtgttttgcctaataactatgagatattgatttgtttgaaaatgcaaaatctttcctttggttagataattttgttcaagatatatgacttacatccttaactcacaagagtaacaaactatttttattttgctgcccgggatgtttttaattgtatgcaaatttcattgttttgacttattcagatgttaacagttttgtaatgttcaaacttatgctgttgcatttataaatcatctttttttttttgctccatgttgttttgggggctttagcctgataccaagctccaaggattttttgttgaagaagacaccattaaatacaaaaggtggaagtgctggaaaagtaactacaaagttggtatttctgtactgttgttttttttttcttctttcttatcatgtgactatatgaggcatgaacacgaaattaattggtcatttcttggtactttcttcagggacaccgggctacacaaattggtctttaaagttctgcttgatggtactgaagtagcttactatgttgatggtcaggttgttatactcagagctgctcactggttatgttaactacaccattttgcaactttggttaataatttgcagttgcattatgcagaggaaagttgatgggtatatcaaggatcaaagaatctactgtaatcactgcaaccgagtggtgcgctcctttcttatttatgatatataatttacttctatcatactccatgaaataattaactttttgtatatgatgagtatccaggttagcccgtcagcatttgaggctcatgcgggtgagggaacaagacgcaagccgtaagtctttgttatttcctgtacttagcttgtgtgagcaacttctatttcggttgcccttattatactatgtttctaccaggtatgacaatatttttacatcaaatggagtatcattacatgagctgtcaatgaaaatatcaaaggacatggaattatctgaacgcgaaacagatgatttgtgcagagaatgtggtcaagggggagatattttcccttgcaaaatgtgcccaaggtcatttcacccaggtagagtctcccatattccagaattaattgcaaataatgtttaagaatggctatgttttacttgggtgatgttttttctttaacgatcagtccaacacttgaccttctttttgtaaaatctgcagcctgtgtagggctgtctggagtcccctcagagtggtattgtgataattgcagcaaccttgttcaaaaggaaaaggctttagcagaaaataaaaatgctaaagctgctggaaggcaagctggagttgattctattgaacagataatgaagagagctatacggattgtcccaatctctgatgaccttggtgggtgtgccctatgcaagtaagtattcttacttttctttttcttttaatattttttctcaattcatacttccattctgcagttatagctagaatacgttttaaacttgttgtaattcataatatgcaagcgtaattttgatcaataggctgtaaggagtaatgcagtattcgatggtattgaattaacaatctactagcaagtagtagtacatcactttttttttggtccatggagaatggtacccgagcagcatgaaaacagtgacagactacttatggactgggaaaatcttttggtaattttccagtggcataagcataagtatgactggagctgaaaactcattgggctaataagaagagcaaacaatggtctaaatgactctgaacaaatgctctgatctagacagcaaaattatactaagtaatgtacctacccatcttttggaggactgaaagatagctcaagtcaccttgggttgttggaggaatggatttgaactcactcatccatgttcatgaatacagctgcagttgaatctgatcccatgatgggaccaacagagtcaacactatgtgcatattggatttcttatttccttttaaaaattccaacgttaaaatcacgggcccaaccgaatggcacccaactaactaatgtaatgagtaaagtcaaaacaaatattataaaagctctttgtatctttcttgaagtttcttgttatccagtacaacacctcaaaattgctagctattttgtttctgatgtttatcttcttttcactttctacattgtacccccgtgatattattaatggtaagaatttgtttctgcaggcagaaagattttaacaattcagtatttgatgagcgcactgtgatactctgtgaccaagtatgccttatatgccatcttgatagttcctgtttaagttcctgatattaaagcttgcctttgttttttttattggatggtatttttattttaacacttttttaaaatatttggtgcccctgcatttattgaattattctaattcttcactaacatggtttttttcgtcactatccagtgtgagaaagagtatcatgttgggtgtttgcggagccagtggcaagttgacctgaaggttagcatgaaatcttttttgtttgatcacccttgttcttcatgtgtgaaaagctaacattgcctgttttcttttctacaggaattaccagaaggggagtggttctgttgtaatagttgctcagagattcgttcttccttggacaagataatctctgatggagctttgattttggctgagtcagatattgatatcataaggaagaaacatgagatgaaagggttaagcatggacactaatacagatctgagatggcgattacttgctggtagaaaggcttctgaagatggtgacttattgctctctgctgcagtcccaattattcatgtaagtaattcatgtttttctcatatgtgtagacatgaagttccatgtctacagtctgaacatttgctagccagtttatgaagtggatttggggtggggttaggtcctcagtagttacaagcacgtaccagccatgtctattaaccaatgacttgctcggtatgatccactgagttttttgttttttaaaaaaaaacctttgtaagtcttaagaatttttgccaacattgatgagccttcaagtccagtccatgcataatttctagcaaggttttatattgagtttttgcaactggtggttcttctcaccaagtatctatctattgcagcaatcttttgatccaatcattgaagttcagagcgggagggatctaattcctgagatggtcaatgggtaagagaactatccttccatatttctcccaatgcattgtccctctgtctatgtgtaagaaatttcccatttcctctaatctcccaggaggagacccaaggatggaatgcctggccaagattatagtggaatgtactgtgcagtgttaactttagggtaagaattctttatgatgattaagatttggccaaaacttttgtgttcattgttgttgatacaaacttgaatgttgcagcacttctgttgtgtcagctgcattgttgcgagtcatgggaggtgaagtggccgaactgccactagttgctacaagtaaagaccttcaaggactggtgagttgtctaaatttgttctttatattatgcttcattcttgtgttattatctggcaacgaatgcacttgtgtaaagaagaaatatgctctttttgttccatgtttctttctaataatttgttgctccaaacagggctacttccaagctttgttctcgtgcatagagaggatgcttatttctctgaagatcaaacacttcatgcttccagccgcccaggaagctgaaggcatctggatgaacaaatttggcttcactaaaattcctcaggaacaggtttgtgttaatctgcacagtttttagtgatgacgagaaatttaaatctaattttaactctccacctggttgcagtcggatgcttatcttaatggggcacacctgactatattccatggaacgtcaaatctgtacaaggctattccttcgtcataatattggtttgaagccttgtgctgtgcatgtatgcagtcagacagatttgtgttttgaagctctgctgacaactgtacataagatgatgaagcatgggctaaaggatgatgatagcacacagaagaaagggggagaaaagatgaaagataaaagtaactcgaggcggcatgatattggtcgaccaaaattcttatccttcagtttggagatatgctggatgatggaggcaatgcattttgcttaattttgtttatctttttttaaaaaaaaaattggctttcagcattttcagtgtggctgctatgccgctgagaaatgcagctatttttgatgtacagacctcaaacatcagaaactgcaggtttaatgcagtgctgaccctgttctgtttggagttagacttttggtctgtttcttgggttggcattattgcaagatttggaagggcctgtttgatgtggctgtcaagttttgatgggaaagagcatattgtatttgtggatatacatgctagcttaagtaaaagttttgaaggaatgcagtaagtagtggtattgacatggaattcgggagaagtcatctcttgagtgtaaaatattacagagcttgctcctgttagtttatttcataggcaaaattgaatgtcgtgccggcgcgtgttgcttgctattggggtcttacttaacaggaagaagatagggcaggcaggccggcccatcttaaagcccatcccgtctcgatctcacgccaacagcaacaacaggtacaagtccgtccgccgccgccgccgagagcgagagatggagatggatccccctcggctgggcatgggcgcgtactccggccccgtccgcccggtcggggacggggacggcggcgccgcgggcgagacgatgctgctctgggccctcggccagccggcagcgcagcgccacaacgccttcgtccgccacggggcgcactccctcaccctagacgcctgcggccgccgtctctccctgctccagtccccgtcctccatgtccacgcccggcgtcaccggcgccgttgtgtgggacagcggcgtcgtcctcgccaagttcctcgagcacgccgtcgactcgggcctccttaccctccgggccgcgcgggcgctcgagctgggagcgggctgcggccttgctggctgcgtcgccgcgctcctcggagcccacgtgctgctcaccgacctccctgaccgcctcaagctcctcaggaagaatatcgacctcaacgtcggggacgacgcaaggggctctgctcgggtcgcccaactcgtctgggctgatgatcctcacccggacttgctcaacccacctctagattacggtcattcttccttacttttgtattactatcttctcactaataattgatagaaattaattactggagtactccagttagttagtagtaagaagaaatgaattggaatttcagtgcttgggtcggacgtgatctacagcgaggaggcagtggatgatctgctgctcaccctcaagcacctctcagcccctcacaccaccatcatcctcgcagcagaactccgcaatggtacattcagattcttaatatccaacctagtacaagtggaatccacttgacaatttaatttcgcatccagatgctgtactggagtgcttcttggaggcagcaatggcggacttccaagtcggctgcatcgagcaacagcaatggcacccagatttccgctctacacgtgttgccttgttcatcttgctcaagaaaccaccttcccaaccggacgtgctgctctagctccaaattttgggcgtccctcatcgaaagctgaattgtagcggagtaccagcatttactccatcctttgttctggactctggagtttaattttacaccttttgcatgtatggaattagggggtcaaaactgtacgcttttgttttctcctattgattacgtgcacttcggaaatgaaattgaaaattgtagagacaccatttaatcggtctactccttttatatatataggatttttaagacaaaatatatcatatagttccgacgattcattagaatgaaacaaatataaattctactaacaaatattagagtgaatcaacttgtgatgtaagataaaccataccgtttttgagaaaacaaattggctaggaaaatttcccatcctcgtgtcatgctccttcaatttagacggcccttttcttttctaataattggattaaataaacactctttactagctcctaaaagatatgatttttacaaactatatgtgaatatcttataatacttttttcaatatatgtttcaatttcataatagtataaagattaggtcatatgtacactcaaataattccactattcaaccattcaaacagttgagcatacattctgggcctctttggttcacaggatttccaaatcatataaataggaaaaacacagaaatattatagaaatgcacgtgcaaaataaaagattggaccacaggaatttttcatacactgagctgaacataagagaatggagtggaagttttcattcttatggaattaatacatttttgaggattggcgtagaaaactttcctttaaatcctataaaccgaatgtatgaatagtgtttatttcaaaggaattgagactttctttaggaacaaggcctcaaactagtagtgtttcatatcgtgctattttagaagggaaaaagtacactgaaggtccctcaacttgtcctcgtgttataaaatcatcccccaaccgtaaaaccggatacaacgtatcccctaacttacaaaaccagtgtaaactagatccctcagcggttttgaccccggtttgtctgatgtggcgactgagtcagcgtaggacccacgtgggccccatacgtcaggatgccacgtcagcgaccagcctctcccttcctctcctttcctcccttctctctctcccactcttctctctggattgggcaggccgcccggcggtggggaggtcgttgccggggcgaggaggtccgacggccggccgcgacgtggcggcggcggccgggacgaggacgttcttcttcacgggcatcctcctaaagctcccgacccagcgcaaggtccccgatttgcgcgcacgccgagaacgccgcggcggcggcgacggtgtcgatgcacacgccgctatcatccgccatggccgtacaagaaacgacgtcccggccagccggcggggaatccgtcgaagagcgcccacgtggaggcgagctcgacgcgcgcgaggtagagctcgacgagcccatcgcggacggcgaggcggtggtcgaggccgagcttggccgcgtgtgcgtgcacggccggcgcggcctcgccgtggtcggcgatcaagcccttgataagggccctgaggcaaagcggcggcagtggcgctccggcgagctcctcgccggtgcccttctgcgagctgcggtagctgtactagattaacttcttgcatttttttttgcctaattgtgatttgccagtagaatgacactgattttctatggcctcttagttggatgagataagaagagatgagtatgacgagatggcatttgtagcacgagattaatttcttgcctgtttctgctggatgctaaatttgcaagctttgattcccgatttaatggctgcgatggctgtagataaatcccagctggtggatcccttgatgtgtctcgatcgagttccgggaggcagcagcagcagcagcaatgtccggcaccgccaacgcgacctcgccggccgctggcgctggcacgccgcggtcgcggctgccgccgtggacgcggcacaagacgctggtgttgcttgccggccgccggcgctggcacgccgttgtggacgcggcacaagacgctggtgttgctcctccgtgctcccgccgcccgccgcccttcccttctgggtcgccgccccctcatcgccggccggccgtcggacctccatgccccggcgacctcctccccaccgccggccgtccagagccccacagaggagtgagagagagagagagaggaggaagtgagagaagagaggaaatagagaagaggctgacgtggcatgctgacatgtggggttcacgtgggtcccacgctgattcagccgccaacaaaacctggataaaaaccgcctagggatctatcgtaaccggttttgattagttaagagacgtcggatatctggttttgcagtttgaggacgtttttgtaactcgatgacaagttcagggaccttcggtgtactttttccttttagaagggaggaggaagacggtgaaaagaagacaaacagttgggcctaattgggcctggggaaaacttacttgggcggggcttgtggggggtgggaggttcgagagccttctgggagaaggagagagcgcttgcctgacactgcagtggccccacttgtcagtcacagtaggtggacccgtacacgtacacgcctctttcctttactcttcttcttctttcttcttctcctcgagtcgagtcgagaattgttagatttaggtctcccccatatccccattcccatctctctctctcgagtctcgacggcggctgctgctgcggcgtcgcctgcggtgcgatgtcgtcgtctccggcgcatgctcagcgcttctactgccaccagtgcgaccgcaccgtccccatcccgccgcccaccttccccgacgccgacgtcctctgcccgttctgcggtggaggcttcgtcgaggagcttggggaggacatcaaccccaaccccaaccccaaccctagccccttcctgccacaccaccccttcttccccttcgcctccccatccttcgacctccgcaaccctagcgacctcgcggccttcttcgggcccccctccccctccccctccccctccccagccgccaggcacttcgacccctccaacttcctccatgatcacttcaccggcctcctctctggcggcgccaccatccagatcgtcctcgagggctcctccgcctccctccccctcgggggcgccgccgccgggcccggggggatcagcctcggcgactacttcgtcggctctggcctcgagcagctcatccagcagctcgccgagaacgaccccaaccgctacggcacccctcctgccgccaagtccgccgtcgccgcgctccctgacgtcgccgtctccgccgacatgatggccgccgatggaggggcccagtgcgccgtctgcatggacgacttccacctcggagctgccgccaagcagctcccctgcaaacacgtcttccacaaggattgcatcctcccctggctcgaccttcacagctcctgccccgtttgccgcttcgagcttcccaccgatgaccctcaccacgcccacccaacccttggatctcaccgccccgccgcacccgcctctgcctctgcctctccctctccagctccaccacctaggctggctgagagaaggttcaggatatcgctgccatggcctctccgtgctgcgtttggcggccaggcggagagcagcaatcctaccaatcaggatcctgttggtggttctactgatgcttccggttctggcaacaacaatgcaactggaggtcatcgtggctacgatgatcttgactgaagagcatcggacaaagaggggatgaggaggtataagttactctatagcttttatatttttttttgtaagatgattacgctaatgttgatacttttacatgctctaccaacagccatattagttttcgagatataaccattcattttagtgttctaatattactacatggattgaaaaagaagggacccttcttttaaccttaagtcatccatttctgatatctgttcaatgacagtttggtgtgctcgatttagattagaggttttcgcgatctataacattcttcgtttatgtgctaaacatccgtgggttgagagttgggaacttgcgcctagggaatgcgtcatgccatgcggtgggagtcagtcttgtgaataaatctgtggctatgcgagtcggctggtaggaaaatgcttcagtaaggcccacatgtatcctcatttatttcagtcgattggccaaacatacacttaattggtggttaatgcttacatgtatttggtatgccacaagatgattggttgcatgtttaaactatcaatagttgattggcagtagtgtgtaatgagacacgtagtatgtgcttaaactggttaatcaagaaatctgagttcttttcatgtattccgatctaatggttcatattatctttcttggtttggtcaatcttaaattctgtatcgtgctagacaagcttgaaaaggaatgtattgttgaccgatggttcatattatctttcttggtttggtcaaactaaaattctgtattgtgctagacaagcttgaaaaggaatgcactgttgaccgatgatttcgaaaggagtttgtgctctgtaggctacagtagtttgatatacttctgccagctttttattggaccacgtggtgcagtaattttttcgatgtgggaggaacatacgtgctcttgatccgtctggatagatctgtacgtcttgatccgtctggatagatccgtacgtcacgctgctgaaaaagggaaaaaggaagaagcaatacgggttcacacacaggctggcatctagctgggccttagattgcttgggccttgctggctggtgaatggtggtcacacacgtaagagtaagggtgcaagcgggcaggaaaaaaacctatctcgattccatgaccggaaggcaaagttatcaaggttttaatttgcacagaattcttcatctgcattccacagtgtcgcacccgccagcctaacttaacggcgcggttagtcgacgtgcttgacaccgacatcgtctaagctatccaccctaatgtcctattgccatctctatactaaccacctcgttgaaaaccagttgtggaccctcagatattcgacgtttcgccgaaacaaccgctgcttcgtggcctatggtaagtaatttctagaaaaatctctgggggtccaactctccaaatccagtctctcttctgtcaggcccgtggttctgaagccgtcaaaaaaaacctagcttgattccatgaccagaaagcaaagttatcaaggttttaatttgcacagaattcttcatctgcattccatactgtcgcgcccgccagcctaacttaacggcgcggatagtcgatgcgcttaacaccgacatcgtgtgagcattcaccctaacatcctatgtgccatccctatactaaccaaccttgtggaaaacaagtgtgggactttagaaaatcgacgtttcggcgaaacaaaccgctgtttggtggccatgggaaagtaatttctagaaaaaatctcttgggggtccaactcttccaaatccagtcttttctatgggtgaggggccgggatatctgtcaaccgtaaaa

SEQ ID NO: 16699 - DNA, 2967 bp, Oryza sativa
  unsure (1)..(2967): unsure at all n locations
caaggtatataatttgcacagaattctccatctgcaatccacagtgtcgcgccgccaagcctaccttaacggcgcggttagtcgacgcgcttgacaccgacatcgtctatgctatccaccctaacgtcctatgtgccatctctatactaaccacctcgttgaaaacccgttgtggaccctcagatattcgacgtttcgccgaataaaccgctgcttcctggcctatggtaagtaatttctagaaaaatctctgggggtccaactctccaaatccagtctctctagggtgaggcccgtgggtctgaagccatcaaaaaaaacctagctcgattccatgaccggaaggcacagttatcaacgttttaatttgcaaagaattctccatctgcattccacagtgtcgcgcccgccagcctaacttaacggcgcggttagtcgacgcgcttgacaccgacatcgtctaagctatccaccctaacgtcctatgtgccatccctatactaaccacctcgttgaaaacaagttgtagaccctcagatattcgacgtttcgccgaaacaaccgctgcttcgtggcctatggtaagtaatttcaagaaaaatctctgggggtccaactctcgaaatccagtctctcttgggtgaggcccgtgattctgaagccgtcagaaaaaacctagctcgattccatgaccggaaggcaaagttatcaaggttttaatttgcacagaattctccatctgcattccacagtgtcgcacccgccagcctaacttaacggcgcggttagtcgacgtgcttgacaccgacatcgtctaagctatccaccctaacgtcctatgtgccatctctatactaaccaccgcgttgaaaaccagtcgtggaccctcagatattcgacgtttcgccgaataaacagctgcttcctggcctatggtaagtaatttttagaaaaatctctgggggtccaactctcaaaatctagtctctcttgggtgaggcccgtgattctgcggccatcaaaaaaaacctagctcgattcaatgaccggaaggcaaagttatcaaggttttaatttgcacagaattctccatctgcattccacagtgtcgcgcccgccagcataccttaacggcgcggttagtcgacgcgcttgacaccgacatcgtctaacctatacaccctaacgtcctatgtgccatccctatactaaccacctcgttgaaaaccagttgtggaccgtcagatattcaatgtttcgtcgtaccgaccgctgcttcgtggcctatggtaagtcatttctagaaaaatctctgggggtccacctctccaaatacagtctctcaagggtgaagcccgtgattctgcagccgtaaaaaaaaacctagctcgattcaatgaccggaaggcaaagttatcaaggttttaatttgcacagaattctccatctgcattccacagtgtcgcgcccgccagcctaccttaacggcgcggttagtcgacgcgcttgacaacgacatcgtctatgctatccaccctaacgtcctatgtgccatctctatactaaccacctcgttgaaaacccgttgtggaccctcagatattcgacgtttcgccgaataagtcgctgcttcctggcctatggtaagtaatttctagaaaaaactctgggggtccaactctcaaaatctagtctctctagggtgaggcccattattaagcagccgtcaaaaaaaacctagctcgattccatgaccggaaggcaaagttatcaaggttttaatttgcacagaattctccatctgcattccagtgtcgcgcccgccagcctaccataacggcgcggttagtcgacgcgcttgacaccgacatcgtctaagctatccaccttaacgtcctatgtgccttccctatactaaccacctcgttgaaaaccagttgtggaccctcagatattcgacgtttcgccgaaacaaccgctgcttcgtggcctatggtaagtaatttctagaaaaatctctaggggtccaactctccaaatccagtctctctatggtgaggcccgtgattctgcagccgtcaaaaaaaacctagctcgattcaatgaccggaaggcaaagttatcaaggttttaatttgcacagaattctccatctgcattccacagtgtcgcgcccgccagcctaccttaacggcgcggttagtcgacgcgcttgacaccgacatcgtctatgctatccaccctaacgtcctatgtgccatccctatactaaccacctcgttgaaaaccagttgtggaccctcagatattcgacgtttcgccgaaacaaccgctgcttcgtggcctatggtaagtaatttctagaaaaatctctgggggtccaactctccaaatctagtatctctagggtgaggcccgtgattctgcagccgtcaaaaaaaacaaagctcgattccatgaccggaaggcaaagttatcaaggttttaatttgcacagaattctccatctgcattccacagtgtcgtgcccgccaggctaccttaacgacgcggttagtcgacgcgcttgacaccgacatcgtctatgctatccaccctaatgtcctatgtgccatccctatactaaccacctcgttgaaaaccagttgtggaccctcagatattcgacgtttcgccgaaacaaccgctgcttcatggcctatggtaagtaatttctagaaaaatctctggggttccaactctccaaatctagtctctctagggtgaggcccgtgattctgcagccataaaaaaaaacctagctcgatttcatgaccggaaggcaaagttatcaaggtttttatttggcacagaattcttcatctgcattccacagtgttgggcgcgtcagcctaccttaacgggcgggttgtcgacgggcttgacacccacatcggnttaagttttcaccctaacgtgctatgtgcg

SEQ ID NO: 16700 - DNA, 7483 bp, Oryza sativa
aaccttaacgggcgcggttagtcaacgcgcttgccaccgacatcgtttaacctatacaccctaacgtcttatgtgccatcccctatactaaccacctcgttgaaaaccagttgtggaccctcagatattcgacgtttcgccgaaacaaccgctgcttcgtggcctatggtaagtaatttcaagaaaaatctctgggggtccaactctccaaatccagtctctctatggtgaggcccgtgattctgcagccgtcaaaaaaaaacctagctcgattcaatgaccggaaggcaaagttatcaaggttttaatttgcacagaattctccatctgcattccatagtgtcgcgcccgccagcctaccttaacagcacggttagtcgacgcgcttgacaccgacatcgtctaagctatccaccctaacgtcctatgtgccatccctatactaatcacctcgttgaaaaccagttgtggaccctcagatattcgacgtttcgtcgaaacaaccgctgcttcgtggcctatggtaagtaatttatagaaaaatctctgggggtccaactctcaaaatctagtctctctagggtgaggcccgtgaatctgcagccgtcaaaaaaaacctagctcgattacatgaccggaaggcaaagttatcaaggttttaatttgcacagaattctccatctgcattccacagtgtcgcgcccgccagcctaccttaacggcgcggttagtcgacgcgcttgacaacgacatcgtctatgctatccaccctaacgtcctatgtgccatctctatactaaccacctcgttgaaaacccgttgtggaccctcatatattcgacgtttcgccgaataaaccgctgcttcctggcctatggtaagtaatttctagaaaaatctctaggggtccaactctcaaaatctagtctctctagggtgaggcccgtgaatctgcagccgtaaaaaaaaacctagctcgattacatgaccggatgacggaaggcaaagttatcaaggttttaatttgcacagaattctccatctgcattccacagtgtcgcgcccgccagcctaccttaacggcgcggttagtcgacgcgcttgacaccgacatcgtctatgctatccaccctaacgtcctatgtgccatctctatactaaccacctcgttgaaaacccgttgtggaccctcagatattcgacgtttcgccgaataaaccgctgcttcctggcctatggtaagtaatttctagaaaaatctctgggggtccaactctccaaatccagtctctctagggtgaggcccgtgggtctgaagccatcaaaaaaaacctagctcgattccatgaccggaaggcacagttatcaaggttttaatttgcacagaattctccatctgcattccacactgtcgcgcccgccagcctaccttaacggcgcggttagtcgacgcgcttgacactgacatcgtctaagctatacaccctaacgtcctatgtgccttccctatactaaccacctcgttgaaaaccagttgtcgaccctcagatattcgacgtttcgccgaaacaaccgctgctgcgtgtcctatggtaagtaatttctagaaaaatctctgggggtccaactctccaaatccagtctctcttctgtgaggcccgtgattctgcagccgtcaaaaaaaacctagcttgataccatgaccggaaggcaaagttatcaaggttttaattttcacagaattctccatctgcattccacagtgtcgcgcccgccagcctaccttaacggcgcggatagtcgacgcgcttgacaccgacatcttctaagctatccaccctaacgtcctatgtgccatccctatactaaccacctcgttgaaaaccggttgtggacccttagatattcgacgtttcgccgaaacaaccgctgcttcgtggcctatggtaagtaatttctagaaaaatctctgggggtccaattgtcacgccctgataaattcatcccgaaataaaaatcattttctaaaaggaataatagagttaattaaaattcgaaaagaaattggcaaacactaaaatacgtacaagaaaaattcaaatgtggcccggagaatttttgttaaattctccttgttctaaaaggagccctcaaaatttacttgaattttcagagcaccgaaaatatttattaaacaacaacaacaattaacaaagtttattaaaaagaaaaagctaaaaataaatcctccttcctcctttgggccaagcccagcaaaagtctccctctcctccctctctttccctcctctcccgggcctgtcctcctcctcccggcccactcttcccctccccctctcggcccactccctcctcctccctctccctcccgggctgcctctccctcctctcctcctgggccgcctcggcttcgcccggcccaagccgagccgcgcctcccacccatgccgcgcacgtgcgcgtgcgtgcgcgccgttgccgcgcgttgaccgcgcgcctgcgtggggcccacgcgccaggtcgtcgttctcctcccgcccggcctcctcctctctcctccgtgaaccctagccatttcctccctcaaatccgcttgattcatttggctaattccaaaattgattagggggttttaatccccattgattcctcttcaattccccccaatttcccccttgattcgtgcccccaatcgtcgggaacagacgcgtcttccccagccgctttccatggccgccggccgccaattccgccaccgttccccgctcctcccgtgctcggctcccttccctccgctataaaacggaatccactcgctccgttctatcgttttagccccctcccgcgatctcccgtggtccctagccacctccccgccgtcgtcccctctcccgtgccgccggccgtcttcagccgcccctgccgccgcgttagcacgccggccagctgtgccgtcgcctcctccagcgtcgcagccgcctcctctccgccggccttccctctgtttcccgcgaagacctccggaagtgcatccccgccggcaacagtggcgttgccaccactgttccgcctccggccgcctctgccgcgtcccctgtgcgccggccgacgtcgccaccacctctcccggcaccggaacgccatcctcttccccggccaagccacggcatcgcccgtatttcgccggaacgccgttgcgcgcgccgcctctccctcggtctcgtcggcacccactccggcagccccttttgccgtgccagtgcgccggccgacgtcgccgtctccacctccggcatcgcagcggcaaggtcgccctcggcctcgtctccccttcgaccgaacccctccgcggtccatcctcgtcatctctattcgttctcgtcgtcgacgtcccgtcggtcgcccggctcgtcgtctcgcggcgccgcctccgtcgtcggcatcgcagtggcgtgttccacgccatcctcgtcttcgtgcagccgctgtaggctgcccacgtcgcctcctcgccggccccggtcgtcgtcgtcgtcgccctctcgtcgttcccggttgtcgtggcgttcgtccctccgtcaagccattctcgttcgtcgtcctcgcttcgtcaagtgccgcagccccatcatcgtcttcgtcctcgcctccgcgtcgtcaagcctcgtgccggccgtgtctcgccttcgttcaaggatcgccgctgaagtcgttcccttgccatccgtctccgccgcgcccgttcgtcgttgtctttcccacgcctcgtcgcgtggtggtaaggatctctcctctcgctgccccgtcctcgtcctttcggtgtcgccccgtacccgttgtgcggttgtcgaccccggtacccgtgtaccggtgtcggtagtcgttcacgtgtgcgggtggtgaccgtgtagtgtccgtgttagtgtgtccgctcagtagccgcgtggtttccacgtgtgcagcccgtgtggtgtctagtggagtccgtttgtcggccactcgcctcggttgacacacggggtccgcttccgtcgacccgtggaccgtctccgtgtactcggtctaccgcggtcctttaggttgacatgtggggtccgcatgtcaacagcgcagccttcctgtcttttccaggctagcgcttccacatgttttatagttgcaaagcttaattataataatccgcaaatctccatataacagcattaaacttcggatgatcatatcttggtcatacgagctccgaatcgacctgttcaagtctcttaatgtttgttataacctaaagaaccgtgtgctttctttttatatattgttattgcttctttataggcttgtagctttgcttgtgtgcttcgcgtagcttctgtcgttccggaggttcccgaagcgtggttcgcggccgtcgccgaaggttcggaaggccgttctctctgagcaaggcaagtcacatcatccttgaacatattgaatcccagtttataaaattattctgatttaaattattgcattatcgctttatttaaatccccgcgttatcactgttttatctagccatgcctatttacctttgttatgaccttattattgttgttattgttattattaccttgttcaccctaggataaacaaaaccccaactagtgggtactctattcatggttccactagtatgaatttaggtagatgcttcgctgattaattaggcaatattaggtggttttataactttagactttgggaattctcatatcatttggacactatagaatagttggcttatgttggaattggacacacacctccccctctattcaaaacccccaaaatggttttaggctgggctcgaggtgcgtggttgggtttggttagtcgtacctcgggtactataaggattaagctcgggcctctgttgcaaagcactaccgtacttccatatgtctagtgggtaaggcttagtttgtggctcagtctggttataaacaaaagtacacggatggagatggacgaagtcgggggtcgatggacatctctaggacaaatgaaggctacatgagctgtggctcggtagtcgagatgtcatggcacagggctggtgtcctgctgctaggggctcaatcctgcctgcctgtcccgggggttccggccgtaggtggggttgggtcggtactcttgtttatggctaggatgggttgggaactatgtcacgtcttccgtccgtataccgtggtggtatgtggcacgtggttacacgtgaggaagatgtgtcttttgggtaaagatgtacacctctgatcagagtataatctattcgaatagccgcgccctcggttatgggcaagcctagcaatgtacccaagttagtgttttagttcttaaaatttgcttaacaactaaaatgtggaatggttggcctgggttggcttgggacgagctgggacccagggtcgggttgccagttcggtctgaatcatcgtaggccttgggttaaggcaggttcgtgagggttcacggccttgattaataacactgtgtaactctaggatcgtctttataaaatggctttgggcaactaagtgacttttaaatgctgttttctacaaaacttaacccctatattattaccccttgtacccccttgcattaatcatgcatccaccggtgtggcttgctgagtactgtggttgtactcattcttgctcaatctttccccccccccttcagtaagagaagctttggagaagaagtcttaggtggagtcctggcttataccccagttgagcgcctgtgaagatggagccgtatgcccgctagtccgctgctgtttatttttgattgtcaggccttaagtgcctttgtaataatgtaaatattatcgatataataaagatgtgccttttgtatcatgtttgtgtggtgtaccccggcttttcctgggacggggattaatacactagcgttcgggaaaatgtatttttctcggtcgcgacaccaactctccaaatccaatctctttagggtgaggcccgtgattctgcagccgtcaaaaaaaacctagctcgattccatgaccggaaggcaaagttatcaaggttttaatttgcacagaattctccatctgcattccatagtgtcgcgcccgccagcctaccttaacggcgcggttagtcgacacgcttgacaccgacatcatctaagctatccaccctaacgtcctatgtgccatcccaatactaaccacctcgttgaaaaccagttgtggaccctcagatattcgacgtttcgccgaaacaaccgctgcttcgtggcctatggtaagtaatttctagaaaaatctctgggggtccaactctccaaatccggtctctcttcggtgaggcccgtgattctgaagccatcaaaaaaaacctagctcgattccatgaccggaaggcaaagttatcatggttttaatttgcacataattctccatctgcattccacagtgtcgcgcccgccagcctaacttaacggcgcggttagtcgacgcgcttgacaccgacattgtctaagctatccaccctaacgtcctatgtgccatccctatactaaccacctcgttgaaaaccagttgtggaccctcagatattcgacgtttcgccgaaacaaccgctgcttcgtggcctatggtatgtaatttctagaaaaatctctgggggtccaactctccaaatccagtgtctctagggtgaggcccgtgattatgcagccgtcaaaagaaacctagctcgattccatgaccggaaggcaaagttatcaaggttttaatttgcacagaattctccatctgcattccagtgtcgcgcccgccagcctaccttaacggcacggttagtcgacgcgtttgacaccgacatcgtctaagctatccaccctaacgtcctatgttccatccctgtactaaccacctcgttgaaaaccagttgtggaccctcatatattcacatcattcactcaggtttacatctcaacgttttttttgcaactaatgtggcatctgaaaattgagtttctttgcatctaaattttagagtagtttagaaatttatattgtatcctctctgttttatttacaaaaatgagtagtttttggtttttagagcagaaatctagctgcaatgttcacaaaaatgtaaagagagattaaaggggaacacaaccaacttccgggatccgcaacagcacgcgcgttgcgatgattgtgcctgcagtcaggtccctaatccgccgaccttagctatgtgattcatttttgtgttgctgtcatcagtgtttcacttgttctgtaggccgctcgcgaagtacacactggagttgtgtgtgtctacgccgccgccggtggccgctgcggccatgaaggagtgtgtgcttgatgagtacgccaccaagcacaggatcttcatcgataggtttctccagcttaggat

SEQ ID NO: 16701 - DNA, 5437 bp, Oryza sativa
agtatggtgctttccgtttgactgcaagtcgttcatcatcgacgacggcgagcgacggaggacgatggcgacggcgggacgagctccggaacctcctaacgaacaaaaggagaggggttagagggagagaggagagtgcgagagggcgagggcgccggccgaaggcggcggccatggcgtcactcaccggcgcacgacggggatggggctccggcggcgaacctcgacggaggaggggtggacgaggtggacctcggccgcgcgaacccaacggcggcgacggcgcggtgcggcggcgagtgtagcggcggctagaggcgaccggagtagcgggagaggcggcggcggatgggcgcacggcgcgggagcaatggagggcacgggagagagcggtggaaaaagaaaaaaggtggaggggagtgcgggcatgctttataggggctcgggagagacggacgtgtccgaggcgagcccgatttcgccggcgacgtgggaggttgaaggtgggggagagagagagagcggcgtgattcaaatttgaatcccggccatctcggttgagggcgcggcgagacagagagggggagtgggtccggaaggcgcggcgcacgcacgggcgtggccgacgtggaccggagaaggcggggtgcggcggtttcggcagcggtggcaacgtgggcggccggccggaggttgggaaagggcccgacaggtgggccccacctgtcggcgaccctggggagaggagggaggcggccggcctggctgggcctcggcttgcggcccgcccagcagggaggagggggaggaaggagagaatgggccggcggcccattcgaaaaaagaagaaaaagggaggaaaaagaaaaggaaaaaggaaaaaggattttccctggaattaaaatattgcttgctcaattttaattggttaaaattatttctagagctctgaaaattccactaaaaatcctgttagtgaatttcgacatgtagaactcaagaaaaattccacatgcccattccgattattatttgcattactttcttagggttttctcttgattgcacctgcatttttttggggtcgtttataaactaaattttaggcttgggaggagaacttcggggtgtgacaccaagccgcccctccctctctccccgggacgccgacaggtgggccccacctgtcggacccgtccccttcctctagccggcgccgccgcgcccgaaaccgccgccgcagcgcccccgcctccgcctcctccgggccacgtcgcccacacccgcgtgtgcgctgcgtcccccgcgcccactcccctctctctcccgcccgcgcccgcgcccgagatggccgggattcgattttcgaatcccgcctctctctcctcccccactccccacgttggccggcgaaatctcgcctctcccggccatgtccggccctcccctcccctatttaggcttccccgtcgccccctttcgctttttccccatctcgccgaactccctcgtgctccccatcactcccgcgccgtgcaaccacccgccgccgccgtttccgctactccggccgccgctagccgccgctagggtcgccgccgcactgcgccgtcgccgccgtcaggttcacgaggctaagctccaccccggccaccccttgcccgtcgagtttcgtcgccagaatttgcatcccctcgcgctccggtgagttcaacccctaccgccgccttcggccatacgcgccggtcgccgtggttcatctccctccctctaatctctctcttctccttccttagggcaccccgaatcccttccgccggtggccgtcgtcctcccgtggctcgccatcgccgttcgccatcgtcttcctccgcgccggccaccctcggtgaggcatcctctcccttctattcccctccctctccctcttagccgccgctttagcgccgccgcccattagccgtcgctttagcaccaccgcccgtcggcgccgcctttgcgccgccgtctccgccgccggttgccgtcgccggcaacgcgtgtgcgcgcgccgtcgccgtcgccgtggccgcttggccggtcttgagccgagctgggtcgccaccgcccgtccgatcggccccgagggcgatctgggccttcggtcccgtggactggcggtggaccacccgcgtggtcccggtccacggtgaaccgccctcccccttgtgccgctgaccggtggggcccgcttgccggcgccgcccccccccccctttgatgacgtcagcaaccatctttttctttggaaaaataaataataattgcgtcataattcgttaataattctagaaattcatttaaatggctcaaaacttctaaaattcatatctaattcattcgaactccgaattgagccattcaacttgtaaattcatctaaaattgagctctacatgtttgtttagtttttatgtactgtttccttggtttttattagagtttttcctcgttttgcgtgccagcgtgtagaatccgtcgtttcggaagatcgcggtcgcaaggataagagttcggaagatcaaagtgaagaagcaaggtaagtcacacattccccttgagcatgttgatcccaatttacaaatgttttactgtttgcaaataaatatgcatgttttgctaattacatggggtcagggttttacctatctgctcgcttgtgccatgtttacttgatatctgtcctttgtcaaccatgggtaataaatcgcctagcttgtgttactttgatgacctagctagaactatatgcttagccatgcttaattaccactagctcagttgatgggataattacagtattagaccttttaatatcagaatgagctgcgtgctcgagacatctggccatgcttcatggtcgtaattatccaactaaaatgcgactgaatggtgggctgtgggtgcatggttttgctggtcgcacccatggcagttaaggaccggttcgcgggatgccctggaagaacttatcgtacttaccacaagccagcgtgggcaacggctgggcttgtagtgtagctttcctctagccgacgcatccaggcaagggtgggcgtgatggagtttggatgggccctgcgacggcctatgcggcttccggattcacctaggcacgagaggggactgcccgctgccttgcgaggagtgggggtgaaacctgaggtgtggtgtgcttggttagaggggattatgcgaagggtcctgtcacggcctctttccggtatgtcgtggtggcatgtcggcgcacggaaacgtgtcgtggggctgtgtcttgtgggtacagttgtacacctctgatcagagtaaaactattcgaatagccgtgcccgcggttatgggcggtcgaccagattcaccgtgattagtcccaccttaataaatcgactcaatacactgtagttcaggtgggttggttgggcctgttcaatgtggtgtagcgttgatcaatggagattcaatattactttaattactcaacagttttactgttttgctcaataaaatgttttacaacctcctttatgcaaatagccacaaaccatccttgtatccccttgcacatctgcatcgttggtgtggcttgctgagtacggtggttgtactcagtcttgctattattccccctttttcagaagtgtagtgcttctgagctgaagatggagttagaggaccaaggctcagaccccagttgagttttgcctgtggagtggagctgaagccccgctaggatcgcctttttccgctgctgtcgttctgtttcggtgtgaggactaagtgcctcttccgtaagtattttacgctttatttatgtttggaactgtatattacttgtcgttttgtgtaccctggctggtcctggacagggatttaatacgcaaaatagtctggaaatttgggttaaatttctgggcgtggcaaagtggtatcagagccaacttgactgtaggttgagccaaatggtcaaaccctaaggacaagttttctgaaaaccctatttgcaaattgtctcctctcgcccttcggcatttctttgtcaaacggttttcaaaattctcctcccaatctctccaattcttttagttgtcacacctagaggaccagccgtcagcttcatgtctgttcagaagtcaagtcaagtcaaatctcaagcttcgcgcagaaggagcaagaagatcagcccagagtcgtcgtcccgcgaagatcaagtgaagtttccccggagctgacccaaacccaatccttcccagaagagtagttccgttagctttctagatcgtgtgttgtttgcttgtgtgtaggggtatggtttgcatcattggtggggatgcgaccatactaggttgtttgcttaaacaacttgaatcataaaatccattcaccacagatcaataggcaagtggtttagtacctcatctttagtaacccctctcatctccccctccctctcttgtgcccgcagcaattggtcagcatgagggacaatttcaacggatcaggatcccatcagtttcatggatcaactcagctcaattctaatagtattccacgtcagcctcttgaagatcagcctcaaccccaagtcatggctaatcaaactcagatagtggaagagttgttacaacagatgcgacgtcggtaccaaatataccagatgcaacagatgcaacgacaatgtcaggagtcacgtcaatgtcacccaccgcaggtgcgagatcagatgccagcccggaacccgaatcagagtcagagtcaggagttcccaatatcagcaccgaagacccctgtcaaaatgcagtccagatccccgaagataacgacagccaagtcaacgtcagaccaaaggacagtaagtgctacctgttatgactgtggtgagcaaggtcattatgtaaggaactgtccatggaaggtgttcgccaggtcacctgaaaaagacgagaagtagtgcccagggagtaaccaagctccaagtcagtctaccgacaagaaggatggtactttgcagcccaactctggagcgaacaggacagtgatatggaagatggataatggcaggaccatgatcatcaccggttcagaatttactcctgaagacgcagcaaggatacccaagcgtcagagaggaagaaataccttccgaggagcgcgtcagctaacccgtcatctcataaagtacggtccgcccagacccgaagatgatgaatcaggagaacggttttctgctgatgacaatgacgacaacgatgatgataatgatgacaatgatgatgcgacccttgactgtttcagggaaagagagtgaagttcaaagcatgtgctagatgtgggatagtcggacacactgctagctattgcctccccacatgccgctgtggtgaatatacccattactcaga

SEQ ID NO: 16702 - DNA, 744 bp, Oryza sativa
atgtagtaccgctctactgcaagtagttcatcagataaatattatgaaaattgtttaaaaaatatgatataacatttgtagcccccgactcactagtcaacagcgaaccagttgatatagtgaggcaaaggaaaaggtaaaatatcatataaagaataaaacaaatgatgacttagctttgtcgtattccctcggtgacagcagaagtagccgatgtgggaatgaagcagtctatcagtggtgacaaaaacaccagtcggtgccagtggaaccaagccagtggtgtagataatgaagcccattaacggcggcgaagtccgccaaccgtataggcgaaaacaccagtcagtggcggcagaggcaggccggcggtgaagtcgtagacgcccaacagcggcggcataatagaccagccgtgcaggcggaaacaccagtcggcggcggtgaaggccagccggtcggtgaagacgtagacgcccatgtatggtggtgtgaccaaccaaccgtataggcgaggacaccagtcgacggacgcccaacaacggtagcatataataggccagccgtgcagacggaaacaccagtcggcagcggacgaggcagccggtcggtgaaaacatggacgcccatgaatggtggtctatgtgccatccctatactaaccacctcgttaaaaaaccaggtgtggaccctcagatattcgacgtttcgccgaaacaaccggtgcatggtgcctatggtaag

SEQ ID NO: 16703 - DNA, 21637 bp, Oryza sativa
  unsure (1)..(21637): unsure at all n locations
atccagaagtgaccgagttcaatgaggatgcggcatggcaaattatcatggcaaattatccctataagaactttatgttttccttttatctttaggaaagtttcttttttgtcctaaaagaactagtatctccccatgggtataaatatgtacacccggggtcattataatttagctctcgatcaataatactctcggcgcatcgccaccctcttttctgaggtttttacttatcaaccgacgaaatttggcacctgacgcggggctgcatctgttcagttcgatctccggcgaatgggtaactcctacgttccgccggtgcaggcaattgtcttgtttacgttggtgtcgtttaaggctgcatcagtacattcgacctcttggattgctccggtttggatgatatatttgtctgcctatttatcatatgtcttagttagtctaggcttagtatctcaatttagctctatcgattgtctctcgctttagggtttctgtcggtatcggctaaattgttttacaagattagattagctaaggcatctaccaccctaaaaatcagtcaagggcttaattttctagatatgatgtttcttttcatacttagtgttgcatcagttaagtttgatctactaagtcgtgtttagaaccataatccctagcctgctttttgactgccaataagggtttcatcgggatttcagccgatgagttatctggatgttgcatcggcttacaaggattacatacaagttggatttagctgatggcaacaaaaatttcactgtttaatctaatattgtggatttatgacattggacctccagccgatgtatgctttaaccttcggatcagtgcttattctatcatgtcattgttagccgattggtttctactagattatattattgatatattatattatcatcagtcgattgtctttatatcattatccacattgggtatatagcagattgctcaaaaccatatcgctagcggctggtatcggcatcggctggaattattcctttggtttgacaaccgatcggctcattggtctactatttgtatatcttgtcagttgcagcaacaaactgactggcacgcccgcatctcatcaacctttggacctgcactggagctaagcacatctcccaggccagtgtgtgtttttcgcatcaacacctcccctccctaggaggtcttctatttatacccatagatgtccccttgtccaagtagaagtagagagacaagtatggatataatccgagtagtccatatagtttccatgtagaactctgcttgtccttccttatccggaactccttctatatacgaggtatgattccgtataaggcttcgtacaaggtgggccccgctgaccttaatcgactaatattgggtatgtgttatccataaccatgacaatattgatccttcgtttcacaattggtggtgtgctttcagaaatgatattcttctacatatgtgtaggacaaataaaattcttaaacaactagtttttgattggttgcacagcatttaatttcttttctggaggtgtttacctcttgtaacattcgctgtaaatatagttttttctcttttacaaaattacactactggggaaatgtctggtagcattcaatttcaaaaaaaaaagaaatacataacatctgatccatttgatatagacccaaccaacatgattctatgtaagccacataatcatctatccaccaatttcactcgtttaatgggcgccaaattctggtacttttggggtcatgatgctaagaagtatactcattggtctacttctattttgttgtgaaggtagatagcaaagttattaaatttgtcaattcccctttgaacattatgtatagtacatagctagttatcaaatgtagatcacttcaaaattgtttgtggagaacaaaagcaaattcggccacactacatacagtcaaatacctcgatacaaattcagccattgggaagttaattcagccaccggaatctaagtctccatagactacatagaacagaacttaacacaacagaaatcaaatgaagggtgttgtgtccctgatgttgcagagcaagatgcagggtgccgagagcccgagacgcgatgggggaggagactgcggcagcagcgacacagtcacgcgcatcatgggaaatggcgtggggcttggggggtggacaggttcggtagtgttggtcgcaacaccgtagccacagagcaagtacgcacagcagggaggataggctgcggtggtggctataggtgcaggcggcgacaatgacacatgcgaggtgaggaaaccacattgccgcaagggaaggagggtgcccctatcatacccccgatgattgaacggtcagatttcatttgatacatgcttgtacaaagtacctggaggtactaactgctggaccggaacaaaacacattttagatggaggtagtaaatttcaagcacccaagtttaatcccaaaattagtgcacttttaaattactactctctccatcctaaaattagcaacatagtatgcaatgagacatcctagtattatagatgtggacatagcagtatctcatcttatctcatctcatacaaagttgctatattttgagatggaaggagtatatgccccatcagttgaagcatgggtactggtcggcgttgctctcagtccgcacgggtggcaatgccactcaccatgccgtgcctcccttcctcccctccgtcgctgtccaagctagcaatcggatatctgtgcagcggcaaggtcaaaggcggtgggggctgcttaccagctccgcaatggttgaaggcaagcagtagctatcagatctgggtctccgctcctaggtctagatgtgtggtggagtggtgacagggatcctctccggttcatcaacaatgatgcccctggcttgcggatggtgccgatatgggggctttccccagttcgtggatggcggtgcaattagggcttctccccggtttgctgatggtgatggtggggctccattcctgagggtggtgacagggtgcttgaccatgggactaggcgaggaggtgatagggtggtatggcaacggtcacgattgtgggaggcgacgatagtagttgaggccagtcagccaggcggttcacctggatctggcgggggtggcacgcaagtggtggtggactagcggctctaattgctggttagcttggtgttctccggtgaagcggtcttggacatggccaactaatgttggttgctaagaagactgggctaagcaggggagcatcgaggtagcgagcggccgggtgagcgagccgggtgagcgcctagatccggtcgcgtggtgccaagggcagcggtcatggtggttgtgcttttggtgtggatggcaaagatggccctagggcagtggctaccagaattgttctttcttgtccagattggtcgagtggattgaaggcaagtgttgacagtccttaaatcataatatctaaccgtcaatgcctacatataatgaaataaaatatggtatccaaactagtgttagggatattactaatcatttccgctagtgttggtgaaatatatgtatgcatgtattttaaggagaaaacacatctgtcctgtgacaaaatacacctccggataatcaggacacgtttacatggattggacggcggaaatgctactgggcgggcgagcgccctcgctcgcccagagcgatcggttccccctcccccctccccctccctctctccacctggtttccttttttggcaccgcattactttcctattttagtaaatttatgcacctaaagtttatacacctcaagtttacacatttaaagtttagagaccaaaagtttataaatcaaaaagtttatatatccgattcaaatttgaatttgaattcaaataatttttatatatatagtatttctatacatctaaagtttatacacctaaagtttatatatccgattcaaatttgaatttgaattatgtccgattcaaatttgaatttgaattcaaatatttttcatatatagtatttctatacatctaaagtttatacacctaaagtttatacacctaaagtttatagacctaaagtttatatacccgattcaaatttgaatttgaattcaaataattcaaatattttctatatatagtatttctatacatctaaagtttatacacctaaagtttatagatccaaagtttataaatcaaaagtttacgtacccgattcaaatttgaatttgaattcaaattttttatacataaatttttctaactttttgttttttttaaatttttttgtggtgtactgtaataggaaaagaaggggaggaggaaggggagaaaggagggggggccgatcgctggatcgctcgcttagcgagcgatcgcccatcaagcgcccccattggagggcccatatgtcaatcaaaaccacttagaattgggccaaatcatagcataggatgttgggggcccattaagcaacctcccggccgaaagagaggtcgggacgagggtttttgggtatgtccgaaccaccaatttggccgaacccatcctgaggccgttgattgccatatttcacgtgtacgctcctgatctctttccaatgacggttggagggcatttaggacatttcccatagctataaccgtcatttggagcctataaaaggaggagctcacttcatttcaacacacacaactttgagctgaattacaagaggcacagggtgagggaaagctctggaggagtgcccggaagtttggcgctctctccgatttctacctcaacgagtgtagctttttaggaggaattctggaagagtatcggagttgtcggtacactgctttgggttcggagaaacttcttttataaagtaagcattcgggatcatttcttatgttatttaattatttattctaagtaagatttccatctttgtgggttcattgtttagtattcgtactaagtgcaccagttctagtactctggataaaaaagaaagttcctgcgcaagtattagagtagtaattaataacttagacgtggtgtctagattagagcactacaataatctatgacgaaaaaaattcgtcatggatcactgaaaattcgtcatagtaatttgactgtgacgattctacgtatcgtcatctattgagcatcacagattaaatctgccgacgttttctccgaaattgtcacggatcagcacaatctatgacgttttttaaccgccataaaacgcttttgggctcgtgtagtccagccagtcccaacctttgtgatgaaattaaacgtcacggatggttgccacgtggcggccaaaatggccagtggcgtggtcgttgacacatgtgtgatgacgtgtcactgatgatgtggtagttaatgtcagcaaatatttttaaatgacccattatttttttaacggcccattatttttttatggcccattatttttttaacagcccattaattttctactgcagcccattattttgttgagaactgacccattttaaaataggcccattttagaactaggcccatttcagaactagcccattttatcaaccaactatcatatcaaagcccactaaacaggcccattaaatttgagaccaccaaattcaatccaatttctcataccatctcagatacaaacataatggcagataccatctcagattcaactaaaaacagatacaatccaaatacaacaacattcaaacaatagttcatctcagattcaacctaataacaaatagtctcagatactctgcttgcagaatcaaacaatagttccacagcaagcaacaaaaatttgtgtagcagaaccaagctaccaacttgtccaagttcaagaatcacacaacattcaagcatacacagttttggttcaacaaacacctgaaaacactttcagcacaaaaaaaattgaaggtccaggttcaggttccctccacaccagcaggacggcaccaaaaatgaaccttagtaaattgcagccatgttgatctgtgcacatactagtactaggtgttggggttatattactgaatatgcatccttagttcaataagcaagacataattttcatgagtgattggccaagatagtatcatctaaaatttaatggactcttaataggataattcaagtatagatcagccatctcagtgcatagttgatagcaagaattatcttggatgatctacaagtgcatttgagttaagcattatatctgtatatagttcagtaaagccatcatagaatgaattttgaatgcatgcatagttagaaataatcattgttctatttaacctcaagaggttaagataactagataatatcactattgtgctactatttctagttaaataggcagagcctaaatgggtagacagtaatctatttctcagtatagacactaaataaagcatctaggatccattggcagaatcataggtatcaatattaggtcagctagaagagcagagcatatttagagaaaagaatgacatctattaggtcttgttcagttactagggattaaatccccaaggggaagcaaaccagggagggattgagtgaatcccaccatgtcacttaaaccctgtggggatataaattcctttctcctaatccctctattaatggaaaccctgtgttcggttatcaatttttttttttttgctactgatcaataggaacagccgaacaaccaccctacaatgcttatgtgcattaaaatgtgacagacatgtgtgacgaatgatcttgaaccaaaacaaaatgtaattttttaatggccgatgatcaagagcatcaatgcatatatcaactacatttgaatgctcatttcaactgcacgtttcgatatccgtaaaatcttttgctgatgagcaactgcggaatacatacaaatcttcatccaaaaattcgacacaaactggctgtcaacacgaactggctgtccaggttgtactgaaattctaaacaaatgagcatagaaacaaatgagcattgtactaatacccaaccaacagtgacccctccttccctgtgctgtgcacactgctcaaagaaaattaatgatcctactagtatctcacagatcattcgaaatgcaaatgcatgcatacatgttaatttaacctgtccttttcgttttcttgatcaatgctggggcaaaacatatttacaggtgcaggcttgcagctagcatgcatggggcaaaacagatttacagtgcaacactgtgatgagtcgcgattaaacagtcagatcagatgacaaactatgccaatttatgaaacaccaacttatattacctttttttagataattaacaccaacttttatattacttgtaacaatgaaagcaaagaatgccatgaaatataactgaagaaatcaagaaatccaccaatgtgcagcaatcaatcgatcactagagattagctagctaagctcagtaattaagagaaaggaattcatataagagccttcgcggagaactctatcagtttctatttggttaccgaagctaaatggacccgagctgttgatgaccgaatagaaaggtttattttcaatggcatgtcctagatgatgtaggctttgcttcctcagcattaaaccaatcttcaggattctcaagcgtttcagctatttctagatcaaccaaaagctcataacttggtttattcttcggttaccatatctttgaatgacaaagtgcccgggaagaaagatctagatctctatcatcatctatctctatatctaaatatggaagaaccctcgaagcctgtccccgacgacgatgccccctgggtgaaaggaaaggggccgccattctctttctttcctcaatcgttccgatcatttctctcattcccttttgtttgtttggtggggccccgggttggttcgtttattcttttccatgtattagattatccgtccgagccatatcaaattaaaaatatctaaaatcaaattcaatatagaaattggaatagattctattagaaaacatatatatatcgatcaaggatgctgaagacatcccagcgtattgaagtacctaattatctactggcccatccaagaaccaagggaggaggaaatctaggtgacacatcaatgggaaagaagacaaattcaagaatgccgctgtttacacccaaatttggcacctagggataaaataggaaaaattgccaaagtttggaaatctgccggtttcctccgagtgggccggtttgaccgccatgtgttggccggtcagaccgccggtcgaaggccagtcagaccggcggtatgtggccggtctgaccggtagagcccgagttcgggtctgtttcgccgggtctcgaggtttccttgctcgggaaggcatgtttcgggtttcctttgaattctatcctgagttggacgtggaggaggcctgtagagggcaagaccaactcctatataagggacatggccggttcaattataactaaccaatctacaatcaatcaatcgaatcgttttttatattgcttttagttttctcttagtttgtccatctttgtcgatttgtgccgtaaatcgtccgccgccgctgcgagagtgcgacacctctttgtaggtttgtcctgaaaaccttccgttttgcccacgagacgggtagttatctagaatcggctctgctagccggttttgttatcaaaacccatcttggtttagcttttgctagatcgaggtggttggtgactctaggatcaccgcaaggcatttaggtgctgcgatcgtgcttgtcaacttgtcacaaaaagttgccaacacgatttttggcgactccactggggacatctgctcaacgtcaactcaacttcgacctcaccatgacgaagccgccgtcatccaaggcggaggtggagctggccaatgtgataccaatcatatttgatgatttcgaaggggaagatcgcaagtccatggaggagtacattaaggagatcacacaggaggcgctgatgagggcgtgcaccaggactcgtcaaggcgtgatcatcaagcctaagccacgtcctaagcctacttacgatgtggtaagtaatgaggaggtaacacaatttatccaacaacacattgcatctacaatagattcatctatgattactttgaataataagttaaatgcatctattcagaatcatgttgaaggatttttgaggactagattcggccctctcgtggccgattttatgttcaaagacaaagcctctaccagtgctagccaagccactatagatcagataagtagtataaccaacggggcgaaaacacaacagcacggcgaggggtgggcggcgcacacagccagtctaaccgggcctggtggccggttagatcgcgatgtcgctgtcggtcagaccggccagacggccggtcagaccgggtattaccccggcggtcagaccggaactcaggccggtctgaccgcgccactggacgtcggtcaaaccgggtcttgggccggtcagaccggcacaatcatcccaattcagggggtagatccaatgacaaataatgcttatttgtatcatcttagaacatttgattcccctgtatctactgccactacttgtccccaaattctcctacatgttcctaatgcttataatgatgtttctagggggtatcctcccgatactaggcaaggccaatataattatattgcgccgcaaccacaacctattaggccaccaaacccaccaccaaaccaacataggcctgataatatggaggaattgattagtggaatcattagggataaattcaggattgaagctaggaatcgtgctaaggtttaccaaaagccgtatcctgactattatgacaacataccatatcctcgtggttatagggttcccgaatttaccaagtttaatggtgaggatagtaggaccacatgggagcatgtaggtcaattcttagcacaatgtggagaggctagtagttccgatacttttaaattgcgcttgttttctttatctttgtatggtactgcttttacatggtttacttctttaccggcaaattctatacatacttgggctcaattagaacaaaggtttcaagattatttccatactggtgaaactgagtttaggttatctgatttaacatcagttaagcaaaagtataatgaatctgtcataggtttagggatgttaaaagctgatattatagtttaaacataactgatagagatttgtctgatcttgcttttaatggtttaattgctcctattaaagaaagattagatgttggccaacaatttcttgatgttagtcaactcgtgcaaaaggcactagctcaggaaagccgggttaaggatagcaaaaaatttgttagaccatatgagaagaagcctaatgttaattcaattgattaccatgaggctagtgatagtgaaggtgagggtgatcatgatatgtatgttgcctgccgccgagccgtgtgcgccgctgccgattcctccacccgattcgctcgattctctgagccgtttcttgaattagttgaggggatttgtttcccttatcctcctctatctcttcccccaaaaaaccgactttatccctttgaattcgacgcgaatttggattcgttttcgagtttatgtctccaccaaaccctaggttttcccggcgcgattccttgcgttccaagcctgatctctctctcccgtcgctataaatagagtcccctccctctcctctttcggccgccacctctccctctctatgccatcgcttgtagcgccgtccccgtgttcgccttctctctccgccaccggcagctgctccagccgccgtttgccgccgcctcagctgatgccctcctgtgccgccacctctctcggctctgcaaggtcaagagcaagcccggcagccgattcccttgcaccgaagacccagggaagcccgtcgtcgccatcaacccgaagctcgccgtcgtgttttgatctccggcgaggctctgctgctcctcccgtcatcgccaagcttcgccgccgcctccattggattcgcagctgcgaagtgaagcctggccacccctgcattgtcgccgaaggtcgccgaaacactgtcgccgccgtggacagtacctcgccgccatcccgttctcgtcgccggccatcttccatcgctgtccgtcatcacgtaagtgttggtaagaatttccatcgccttctctacctcccggtgccctccgtttgcattattgtgtcgtggttcgccggcaaccgccgctcctatgtcgttcaccggtgtagtttatccctagggtcttaatccaatataatccaatccgtggttggtctagcattgtcatctccgtgtgttgctgccggaacgttgtcatcatcccttcctctccgatcgctttggttcggtgagacttctattcgttctctcttttcaatggcatattatttctttttaatatatgtcatctaccaaatataatctaatattttccgaaggttgttttaatcttttctctcagttataaatcatttataaatggtttaattaatttggaatagtcttttctttaataggtttaattggaattaaatcttgtaaaattcgtaattaatttatatgaaatcggaatgagaccgttcaagtctcataattcatctaaaatcatgatctacatatttgtttacttttatgtactgtttatttggtttttattagtctttttctttgttttgcgtgttagcttgtcgtttccgtcgttgcgaaggcaagtcacacagatcctaaacacaattcctttgagcttgttgatcctatatttaaattctctatttatttcaactgtgcatttattttcgaatgtcatcgggtggtgtgaacctattcctttgttatggccaatttgcattgaataccctattccttcataccttgggtaacaaattaattagcttgaaccttatatattggtttggttcagctaatagctatatatatatatgtatgtatatatatatatgtatatatatataaatgtatatatatatatatgtatatatatatatgtatatatatatatgtatatatatatatgtatatatatgtatatatgtatgtatatgtatatatgtatgtatgtgtatgtatatgtatgttgtgtgtgtgtgtatgtatgtatgtatgtatataataattgcttagccatgcttagaaacattagctcattaatgggatgaatcacactacattattacttatggttatatttaattgtagctcatgatggttaatcgtgttatgataattaactgataattaaaatttgattaatggtgggttgtgagcacatggttttgaaggtcgtgctcatgacaattaaggaccggtttgcgagctactgttgtgagacattaaccgtaccaactacaagccagcgtgggcaacggctttaccttttgtatagcatggttctttacggggtgctagactgagaagcggtgagaagtccgtgggggtcgctggggagtccatgcctctggttatatttatagagggggtgattatgatccaggaatggtgcattgtggtgagttgtgttgtgcagagggtattgtcacaacctctattcgggtactttccagtatcgcgacgcatggtagacatgatgttgaggctgtgtcttgtgggtatagtggtacacctctggccagagtaaaactattcgaatagctgtgcccgtggtcatgggcgggttgagcaatgtttttcgtgattagtctcacacctctcacaataattattgatgctataactggtaataatttgtttagctcctggtttggagttagatctgtacagccgggtatggttgttcagaatggttgggcctgagcagcatgggcgtgttgttcagtgttgattaaaattaatgattaaattagtttattgttttactactcttaaatgtttattaaatgctgcttttgcaaatgagcctatattatgccattctttggtatccttgtgcacttgcatatttgctatgtggcttgttgagttgtcatatgctcactttgcaataattaatcaacctcagttgaagaaaatgatccagaaggagaagacgtttggcttataccccagttgagctgcctatgggagtggagccggagcttcgctagaccattaattttgctgttgttttcttttcttttgtaagtatgtaacgatgttattatgatggatttgtatattaaattgtcagtttgtgtgcctcggctgattccgggacgagggttttatgcacaaataagttcggaaattgctagtgagtttccgggcgtgacaccaagtggtcatgggactaacaaaaacaagccttttgtttgttctaatttaatgccgactcctcgtaaagatcggcaaagtaggattaagtatagttttgatgtggccaaatatgataagatctttgattatcttttgcaagaaaaacaaattagattacctaaaggtcatattatatcatcttaagaagaattgaaacgtcaagcttattgtaaatggcatgattctcactctcattctactattgattgcaatgtgtttcgacaacaggttcaatcggctataaatgaaggacgattgaagtttaccgatggttccaagatgaagcttgatcatgatccttttccggtgaacataattaattttgatgataagaaggtattgattcggccggagcaagccgaatctacaaaggggaaaggaatggtcattggagagcctaggccaaaaatgatggtgccaaagaatccggaggttggtgtttgcaaggaaaataggagtgaagcttcaacttctagagttcctaagaagactaaggtgaccttcaatatgcttttggagaagtatgagaagcaaggcggtgagagagatcgcaacaaaggaaaaagaccaagatcacctcctagggagcgatttggtcattgaccaagacggtcggaatcacctccatatcatcattctcaagacatgtcatgggggccttacccaatgccgccgccgggttatccttatccttactacatgccatggggggcaacaacgccaatgttcaatcatatgcctccaatgcaattcaaccaagggtagggaggaccaaggaggccaattcatgagcatttgtcttcatcaaacaatggttggttttatggtaagaaccgggccaatggagaaaagcgggaaggaaagcgcgtcaaggtgaagactaggacttcggaggtgattaccatcaaagtggggtctcatgatgtgccaataccttctggagatgaagttggggagtcctcaagcaacaaatctgaagccggtaccagctcatcgaagtcggccgatctgaccaggccctctggccggtctaaccgcagccatacgggcggtctgatcgccaatccaacaacggtctgtccgacgcctcaggccggtctgaccgctgacctaatgtcggtctgaccggcacctccggccggtctcaccggtggtctaagtccggtctgaccgggctccagcgccagtttgacaggaggtttgcaggaagcaatgtaggggcttcctcgtcttcaaatagacttaacagggggcactatttacctcctggaacaaagcagaaacctaggtggatgcctgaggatttgacggctactccaaggagaaggttgcaacgtcttcgggctcaagagataagagagaaaaaggccgaagaacaaagagataggaggttcaatgagttgtgaccaccaccggtatggaggagtaaattcgtagagaaggaagaaccagttgttttgcaagaggaaaaggaagaacaatcagttactaaagatgaagcatctccaaaggaagacatggaggtcaacatggcgtgtatgttgcctatggagttttgtgctatggatgaagctgaggttgctcaattttcactaggtcctaaagatgcggtttttgagaagccgatgagtcaaaccgtcatatgaagcctctctatctcaaaggtcatatagatgggaagtcggtctctaggatgctagtggatggaggtgccgccgtgaatttgatgccgtactcgttgttcaagaagttgggcgtggagatgatgagttgaagaagaccaacatgattctcaatggcttcaatggtgaaccaacggaggcggagggtatcttttcggcagaacttaccgtggggaacaagacctaccaaccgctttcttcatcgtcgatgtgcaaggtaactacaatgtcattttgggtcgttgttggatccatgccaattgttgtgtgccttctaccttgcatcaatgtttaattcaataggacggcgatgatgttgagattgttcaagcggatacatcggccgaggttgcaatggctgatgctacttttgagtggcgccatgggaatattcaatgcttatcggggatggatctctttagttatgattttattagtatctccaatggcaaatttgtacccatctctgtaaagccggctagtttagcacggctaggccatattaatttatgcaatgactagagaagctaatttagggtggtagcaaaagagtgtgcaagaatattggtctacaaataacgatattggtgaaacttttgaagattttgatgaggtagagaagcttggacaagggtttacattggccgatccattggaaaaagtagacataggtgatggaactaagccaaggccgacttttgtaaacaaaaaatatgagatccggttataaggttaaagtaatcgagctacttatggagtatgtggattggttcgcatgggagtatcatgagatgccgggacttagccgtgatcttgttgagcatcggcttccaatcaaaccgagttttaggccttataaacaactacctcgtcgttttaatcctttgctatatgaccgagtcaaagaggagattgatcggttgttgaaggcggggtttattaggccatgtcgttatgcggagtgggtttctagcatagtcccggtggacaagaaggggagtggtaagattagagtttgcataaactttagagatttgaataaagcttctcccaaagatgaatatcctatgcctatagccgacatgatgatgaatgatgcctcgggtcataaggtgatttgctttttagatgataatgccggctacaatcaaatctttatggcggaggaggatatgtacaggacggcttttacgtgcccaggatttgttgggttgtttgagtgggttgtcatgacttttagattgaagaacgccggtgcaacatatcaaagggcaatgaatttaatcttccatgatttgctaggtattatcttagaaatctatattaatgatattgttgtcaaatcggatggtatggagggacatatagccgatttgaggttggcttttgagaggatgcgccggtatggtttgaagatgaacccacataaatgtgctttaggtgtgtcggtggggaggttcttaggattcatggtgcatgagagaggagttgagattgatcctaagaagattgaaaagattcgttatttcaaagcgccaacatgcaagaatgaagttcaaaagttgctaggtaaggtgaattatttgagaagatttatttctaacctagcgggtaaaatcgatgcttttgtccctatactgcgcttgaaaaaagaagccgattttacttgggggagggggcaaaacaacaagaggtgtttgaagagttgaagaaatatttgtctactccacttgtggtgcgggcgcctaaagccggaaagccttttcggttatatattgcctccgaagacaaagtcattggtgccgttttgacgcaagcggaagatggcaagggatatatcattacatatttgagccaacgtcttttggatgccgaaacgaggtatatctttatagagagactttatctatgcttatactatgcttgtaccaaattgaggcattatttgttatctagtacatgcatagttgcttgtcaagccgatgctattaaacacatgttgcaaaggccaattctaagtgggagaattggcaagtgggcatatgctttgattgaatatgatttggcttatgaaccgttgaaatctatgagaggccaaattatatgtgattttatagtagaccatcatgtagatattgcttatgaggaagaggtttgcttagtcgaagttataccttggaagatttattttgatggttcttcttgcaaagagggtcaagttataagggtagttttgttttcacctaatggcatgtgttatgaggcatcggttcgtttaatcaagccgaatacaatgctttattattcggcttacaagtgatggagttggttggagctaagcatgtggaagcttttggcatgaggcccaacaacgatattattgccaattttgataattttgctattagacatattgctaggcatgataattctagagcaaatgatttggcacaacaagcatctggctataatgtgaagaagggattatttctggtattagaagagccggtgcttgattttaagtctttgtgcgaaattggcaaaacttcagaccaggggcggtctgaccggcattgcacggccggtctgactggccacatgccaccggtctgacagtccaccccgagcggtctgaccagccttgcacggccggtctgactggttctggacagagcgctgggggcacgctgtaattgattcaaaggccgaattaattgtaaattcggacatttatgcccaggaaacagaggaagattggagaattcctttgattagatatatgaacgatcctacacgtaaggttaatcggaaaattcggcggcaggcgttcaaatacacattgcttgatgaagtcttattgaagtgtttagatgaagatcaatctaaagtggctatgggagaagtgcatgaaggaatttgtggaactcatcaatcggcccacaagatgaattggttgcttaggagagcggggttctattggtcgaggatgattgaagattgtttctaatactataggggatgcgaagcttgtcaatggttcggcaatgttcagttggcgctcgccgccgtgttgaatcctatcatcaaaccatgtccgttccgaggttgggttttggatttcattggtcaaatttatccttcgtcatcaaaggggcataggttcgtgctagttgctacggattacttcaccaagtgggccaaagccgtgccgctcaagaacatgactcatacggaggtaattgactttattttgaagcatattatccattgattcagtattccgcaaacattgactacggatcaaggagcttcttttatgtctaaggaagtgaagagctttgccgaatcttatggtgttaaattgttgagttcatctccttactacgctcaggctaatggacaagtcgagtcgagtaataagacattgttgaagctagtaaagaagaagattgaggaacacccaaagaagtggcatgaggtgcttttccgaagcattgtgggtgcataggatatctaaacatggtgccaccaaagtcactccttttgagttggtttatggtcaagaagccgttttaccgattgagataaatcttggttctctttgctatatcaagcaaaatgatttatcaagtgaagattacaagacgttgatgggagacaactttgatgagatcatcgacaagcgcttgaaggctttggaagaaatatagaaagagaagaagagcgtggccaaggcgtacaacaaaagggtgaaagcaaagttgttttaagttgaagacttggtttggaagacaattttgcctttgggtactcgatctagggagttcggtaagtggtctcctagttgggaaggtccttatcgagtatgcggcattgttcgaggaaacgcgtattttttggagacacttcaaggagagcgtttcagcgagcaagcaacgggaaatacatgaagaaatacttcctgagcgtttggtaggtactatggccggtaattggattatcgccctaagaccaaaaacatgttctatgcttttagattcacgttgatcatcaaaaaggcaggggggcatgtgtttataaccaaatttggcacctagtgataaaataggaaaaattgccaaagtttggaagtccgccggtttcctccgagtgggccggtttggccgccatgtgttggccggtcagaccgccagttgaaggccggtcaaacccgcggtatgtggccagtctgaccggcagagtccgagtcctggtctgtttcgccgggtctcgaggtttccttgctcgagaaggcatgtttcaggtttcctttggattctatcccgagttagacgtggaggagggcctgtagagggcaagaccaacccctatataagggacatggccggttcaattgtaactaaccaatctacaatcaatcaatcaaatcgtttttcatattgcttttagttttctcttagtttgtccatctttgtcgatttgcgccataaatcgtccgctgccgctgcgagagtgcgacacctctttgtaggtttgtcctgaaaaccttccgttttacccacgaaacgggtagttatttagaatcggctctgctagccggtttagttatcaaaacccatcttggtttagctttttctagattgaggtggttggcgactctaggatcactgcaaggcgtttaggtgctgcgatcgtgcttgtcaacttgtcacaaaaagttgccaacagccacctcaccagttcgtcgcctaccgccgccgccgtagcatagcgcgagcgagaaaccctaaccctataagaggaggggagaggggaagggaaagatctcaccaggcaaaaggtgaccaccggaagacagctgccggaggaaagagcgcccatcatcggacttggacgggacgaggcccgccgccgctggatctgggcgggacgaggcccacatcgccgcccactcgtcgtcgtcgtcgtcgaggtcggcgcctccttgtcgttgtcgcggtcggcgccgctgcggaggggcagcccgcggaggaggcagcccgagcgtcagggtcagcgcccactcgtcgtcgtcgtcggggccgcgtcaccggcggaggaggagaaggaggaggagtgggtggatgttatttatatggcggcgagccaacgacgaaggggacgggtggaggcttatctgaattggatcggctagggttagggaactagtggtgttgaagcaatcgctgatgcaattttacaaaagtacccatggtgtatctggagttagcactaaaattatgtggaaaaaatggtcatttcatgttgaaatttaggtcttcctcccgccgcactgaaagaaggggaaaatattaggggagggagaggtggaggaaagatgaaatattttgaagtggtgaggaggcaaaatttttattgcaaattttgaatcgaattttatggcactaaatcagctcgtatgaaaaagttgtaaaaaacaaagttgtagaactcatttagatctaccattttttttggtcatttcttcatccgagtttgattgaactatataaaatttgaatttcaaattatgacaacttcaaacaatatttttaaatactaaatgatttcaaatgaaaaagtcatcaacaacaaagttgtataaatcatcaatatctacaacttttgtttttgtcatttcaccatatgactttgtttcaataatttgaatttgaatttcaaatttagacaacttcaaacaacattttcaaatactaaatgatttcaactgaaaaagtcatcaataacaaagttgtataacttatcaagatttacaacttttgttttggtcacttttctatatgtatttgtttgaatagtatgaatttgaaattcaaattatgacaacttcaaacaacatttacaagtactaaatgatttcaactcaaaaagtcatcaacaacaaagtggtataactcatcaagatctacaacttttgttttggtcattttggtatatgactatgtgacaatgatgagaagtccaaattcaaattattacatcttgaagagacattccacaatgctgaaggagagctactgattaagtcatcaacagcactatgtgacgaaccatgaagatgtactaatttgaaattggtcattttggtatatgaccatagtccaatagttagaagtcgaattccaaagtattacatctggaagcgacattcttcaatgctgaatgagtccaactgagtaagncatcaacatcaaaggtgtatgtaactcgtcgatatctatagtgcttattttcgtcatttctgtgtccgataaagtgatagtgacatcgttccataaatttacatgtctcttatatgattttgaagtatttaaatcacgacgaaattgctataacgtcacaggttttgggccggtttaattagcaaaattagagactgtcacggttt

SEQ ID NO: 16704 - DNA, 19313 bp, Oryza sativa
  unsure (1)..(19313): unsure at all n locations
cgatatcgtgctcgggtcaccggtcaagatgtggaaatacgaaatcggattctttgaaccggatgtcataagccaagagacccaaaacaaaagtggtagatatggatgaaaaaaacaattttgttgtagangactttttcagttgaaatcatttattacataaaaatgttatttgaagttgtcataatttgaaaatttaaattttatataggttaatcaaactcaaatggaaaaataaccaaaataagataggtatatctcaataagttatacaactttgtttttgacaattgtttcaaaaaagttcatttattatgataaaattcgattcgaaggttactggccagcccttttgctcatccctctccgagaagtccatttttcctccctcctttcaattaatttcaaaatgttaaaccttcgaatcaaattttatcttactaaatgaacttatgtgaaaaggttgtcagaaacaaagttgtataacttattgagatctaccaattttattttggttatttctccatctgagtttagttgacctatataaaattttaatttcaaattaggacaacttcaaacaacattttcaaataataaacgatttcaactgaaaaagtcatcaacaacaaaattgtataaatcatcaatatctacaacttttgttttggtcattttgctatatgactctgtttcaatgattcgaatttgaatttcaaattatgacaagtgcaaacaacattttcaaatactaaataatttcaactgaaaaagtcatcaacaacaaagttatataaatcatcaatatttacaacttttgttttggtcattttgctatatgactctatttcaataatttgaatttgaatttcaaattataacaacttcaaacaacattttcaaatactaaatgatttcaactgaaaaagtcatcaacaacaaagttgtacaaaccatcaatatctacaacttttattttggtcattttggtatatgactatgtttcaataatttgaatttgaatttcaaattataacaactgcaaacaacattttcaaatactaaatgatttcaactgaataagtcatcaacatcaaagttgtatataactcatcaatatctataatttttattttggtcatttcttcatccgataaagtgatagtaacattgttcataaaatttacatctctcttatatgattttgaagtatttaaatcacgacgaaattgctataacgtcacaggttttgggccggtttaattagcaaaattagagactgtcacggattatgggccttgtatccatagttgcatatccgtgatgatctctaaaaacatcacgaaaattttgtcacggattaaatatattcttgtagtggagattacctttgtttgttgtgtatcccactaatttgttagaggtagacggtagctggtgacaaccctgaatcccgtcctagtaatcctccacgtttgggtacatcatagagctatagcaggaaccatgctggcagaccagtaggggtctgtgcccgaagcaatagataggaaattacctttaacttagcttagataattaaaacatatagaaaatcctttctagcctagccagcctaccaacagttgttatccttggactgccttagccttagatagattagacatgttccctgagttcgatatccttttggggtcaccgaaggtgatgtgctacagcagtattccgtgcgcttgtggatttatctatggtcataagaaataccaacgacaagttcattggcgatgcttttacagtggcggtgcatgctacaactgggatggctcaattggaccttatggccagatttcagtgtcctagtgagcaaggtgaagagcatatgaagtgatcgttggagaggtgctagtaatagcgatggttggagcgcaacactggatttggggcctgagtgtcattggatcaaatgtgtgtgtgctgggagttgttcgtgcaaagacaaatgacgttggtttttctatgcttcctttggacggtgtcggcgagcaaaggaactaaggtcgagagataccgcatctgttgaattggggtggcgaaggattcaattgtaagtggatggaattctaatgaagggtttcaagaattcgggctgctctcaggatcgtcatagtgcggttttgtgaagctaaagcaagatgaaaatacttttgaagcttaatcttctagttttgtgtattcgtgtattcacttcgttgttcctcaatcatgagggttggattctaagtatttctataacttttggttgtgtatatccacttatggatacatatgctagatttcgatctattatctaaaaaatgtctcatcaatcacttctaattcaaatttctccctatcttacccccaaccgtcctcctactattaaccatcccttatttaatttgggggggcatttatgtcatttatttttcatagtattttatcttgtatatattgtagaaatgcacttatttagaaatggatgtagtaaatacatttaatttgcatggaaagtttaaaacgcacacacacttgaggtaacctagtcgaaatgtctaacgactagcaatgtcccctttattttaccataagattgcccatgctttcgatcgttttaattcacaaaacagcattttccttgctccatgaagggacccagactatgctgcttttggggaggaaatggcacgcctccacgtccccaggcttggcatgctgctcctgcaagaacgggtgttttgggctccactgcgtcatgtccaggtggcacacggacaccacctccatagtcgctggttccgcactgccactgacctagctgaccagcaccaccatgtaggccctggtggccgggccagccatgtggcagtagaatactacgtacgggtatgtcatatcatggcaggtcaccatctctgatgactcaccgtcgccactggatccggtggggacgatcctatgcagggctgttatggcatacctcctacgtggctcctcggagacggcagcagcctctaccggcatgttggcagagaaagcctgtacgtgacgtgtcccgaggagggaggaggggagcttgaccaggtcctccatggaggtggcgcatccggctgtattcctgttcttctcaccggtgagcggtagccatgggttgctgtagcatttctctagcacccaccgtatctcatcggcgatggcgagggagactggcacgaacatgttgagaatgttaccaagtcgatcgatggagaacggttaaccatggctaggattagacttttattgggcaagagtaaaattgatgccccatggccaccgccgactcaagtaagttacttggcatccttattgtgtgatattggaaaaacacccacagtaaggtattgggctgagtggaaaccttggcctccacctcaagaaattggcactacacatattcgagtgaatcaatgggcaagtgcaaaattatggaccttcctcacttggacatcccctgttgcagagaaatgggcagctgaactgaaagaaaaaggcataagattggaagatgttgaatttgattggaaaactcttgatccagatgtgcaagaggtcgattacattacatgggtttgcagttaggattcttcgtaggatcgaaacacaaaaactaagccaaccagagggggggtgaatggttggtatacccaaaaaccgaaaacttttagcgaaaataaaagttaccctcgaaatcgatggatcgtggtctgaccgaagtggatgcgccggtctgaccgcctgattaacgtcggtctgacagatgtagatcgatcggtcgaaccgtcgaaatcgcctgccgccgcctgactgcgccgtcggtctgaccgccttagctctgccggtctgaccactgcctattgccggtctgaccgccggtgcgccaccggttggacagccgaaccccggtgaaacacaaatcgaagaactctcaaagtagatgacaacattattgcttctctctctgtttacaaagtgcaccaacagcactccttataaaaatctcgactaaactcgaaaccctaactaaactagcaactcaattgctctcaaaagcgataccggaaaacctcacgctccccccctatttatacatgaggtaggcatcctaaagccacgaaccaaactcatactaagagtcctaaacaccttaggaaacccctctagtacaagacacaaactttacataaccaatcgtaccaaatttggactccttccaaattcgactccgcatcccatacgcacacaatacctccatcgtatgccatatggaatcttcaccaaccacgtgcatcaactctagccttagtatcccgcataatatctgaccaccacggacatcgtcttacctccaagccgactcccggtccatcaccgaaaatactgtctcaaggcatcaagtcacctacacatgaaacaaacaaagaaaccatattccgagaccaagctatccccaacttgactcattgttagcaaacaatagtattacatacgtatagtatccatctagaagccataaccatgaaacaatcacggatatccaaagaaacaacccaaaaccgaaaccgacacagcgtcggccggtcagaccgtgggccggccggtctgaccgcacacatagcaccggtctgaccggcaacatccgctcggtcggaccggacacataaaataacagtgaatccgatcatcacctgaaaattgattatctgcaaaaccacttcgacgataatctccaaatatcaaaaccaataatcacatatgccaattgttcatcacaaattaagaatcaaaacacacattgatcttacaatctcccccttgatgaacacattggcaaacccatcaaaaatgttttggtgtttggaaaaataaaaaaaagcgataaaaagcacacttcgtataaatgtacacattggtctcaaaaatccaaaagaaaacttctccccctttttaaaataaagaaattctcaattgaaccaaaaacattgctcttctcaaaaactcttctcagctcccaaaagtccaattttttttatattccttctcccccttttgacaatgatttcatcaagcataggaattatgttcactaatgtataagagcttagcatacatatagcatatcatgtcatgtgttgcaacaaaaagaagataaacccatctataatataacaagcatgcattaaagtataaccatgaatcaaagattttacaattaagcttgaatcaacaatcgaaattcatgatttcatacaatttataatggaacatcttaacaagcacataggttaaagaataaacactaaacacatatacctattgcatttatcactctttctcaaataaactttagcacaaaataaccaagagaattttttgaactttttcttttcctgagcctgtttgctcatatttttctcttttatttcgggtacgcccctgtcgtcaagactgtttccagggattcggcacctattattttgctcacatcgaatacgtccttgtcgtcaagactgttttcgaggattcggtattcatttttttcatatttttattctctttttcacaatgagcaattaaatctatttgaggaataacaagtcaataaagcatatatatagagcatttataaatcaaaccatatgctagcatcaatattgcacattttcttaattcaagtgaaatttaagtgtcatgcatcatctcccttaaaaacaaaatctaaatctcatgaaaagactagaacacatacaagctatgctagagacaaataaaccttcaaagtattgctagcatgcacaagaaaataccatatgtatagaacaaagctctcttttctcaattttttctcattgtcatattattgcttgataaaaccatgaggtaaaaactcctcctcaaaacatgccaaaaggatttacgaataagcactaactccccctcaaaataacctccaattctctccgaacaaaaatcaagaagaaatcaaagattttgaaaaagacatccaattgccaatgatatcacaaagattctcatgaattgacatgtatacaatagtattaaccaaaactacaacctcaaacactagcatatgaaaagctaataattaagaatgtagaaccaaatatctgtcaatccaaaagtaaattgatgttaccttgaaaagcaatcgtcatcttaaaattgaatactcatggggagtatgacgccaaaatacctatgaacgagaagatatcgaggcctccgtgttggggttagaaataagaaattttggaatccaacactgagtcacacgaccagtagaaccagtgggtacatatgtactgaaaaaatcagaatcagacttaccagaaaacttacctttttgcttcagaaaagtccgatttgaatttcgcacaaatttgccccgaggccggtctgaccgccgcagtgcctgcggtctgaccgggcctggcaaccggtctgaccgccagttcaactgcggtctgaccgctggccggtctgaccgactggtcagtgtcggtctaaccgtggtcctcgaattaaaacccgatttttgccaacgttgtattacaaaagcaatttctctttcctttttctgtttatgggcaagtctaaaacaaaaaccaaccaaatgtccatcttttccaaaaaagaacaagtgtacttctcacgacaagtttgtgaagtaaatggttttgaaattgatggttttgcaacaacataaggttttgcattcacaacatttgatttcgaagaagatccattcaaagaagacatgatgccagcagatttaaacacagtgttcttaggctcagtttcaatcaaaatttcacctctcctagcaacacccaaaacagtaggaggatgtctagtatgatgagcataaggatcaaaacctaaaccatgattgtgtgtgctaaccttagattgatcaagaatcatgttgaggttctttttaccatcagacaatctttgcaacgaacttttcaaataagaaacctcctgagtaagaatagcacaatttttgcaagcatccaaaagacctttttattttctacaagttgagcaagaaagcacctcatcttgtttaacaacctcttccatgtgtttaacacgctctagagcatctttcaactttaactcattcaaaacacactttgaacaatcttgtgaaatcacaacaccattgttttgttttgccttatttgcacatgaagcattgaccaaagaacttgcacaaaaagcaactttgtatttttttcaaaacgttctttgtcaaaatcaactcatcaacaacacgagcatgtaaagcaaatccaagagcaaaagatgattccaactttttagatttttcaatctcaaattccaattttttgcaattaacagaattgacatctcgcaaagcattaatttcagaaaacaaaacttcacaagatttacattcatcatcattaggaatcaagattttaatctagcaatttcagcatttagaatctcaatagtatgatccttctcatcaagcgcagcatattctaattgatcataactaagcttttcttcattattatcatcagattcatcaacatcagaacatgcattacaagcaataaaagctagatcaataacttgcttacctttgccctcatcttcatcttccggttcatcaaaaacttttatgagttcttggattaaccactgcatgcaatgcttcttcttctccttctccttcatgttcttcttcttgttcacgtcatcatctttgactctctcatcatctaccttcttgcctctcccaagcttagaaaaatgcgagcgaagatgatcaagtgcaccacactcaaaacaacgattcggttctccttttttactgttcctaacatttttcatagctcgagaaaatttgttagataacaaaaccaagtcgtcgtcctcgaactgttcgagttgttcatcggaaatggcattaaataaagcaaaaacagaagacttcgatgaagaagcaccaacatccaaagaagtcgaggaagaaatcaaagcactagacttataatcaactttacgagcaagaatattcatctcatgagtttttagttttgtgtaaagcgaatccaaagtcaaagtagacatatcaacagactcctgaattaatgtaactttcatctcccaaatagacatgtcaagaccattcaaaaagtgaagagaaatctcatattgtgaataattagcatcataagaagaatcaacagatctaagatcactcaaaattttattaaaccgagaaagatagtcatccaaagcttctccaggtttcatctcaaatttaatgtactcctttttgaaaagatcacgatgaagttctttaatattatttgttccttgatgaaaattactcaaagcagtccaaatctcatgagcagtttgaagatgagcaacacgatcataatccgaatgagaaatcccactcaaaagaatattacgagctttgcaattttgttcaaactcagtttttgtagcagcagtattaataacttcaggaattacataaggatgagaaacttttctccaaatatcataatcttcagccataacataagattgcatcctactacaccaatgagaaaaatccattccatcgaaaacatgaggcttagttgaaaacctaacaggagtagccatggcaaaaactctagatcgattaaaatccaaagaagcaaacaaggctctgaaactacttgtaggatcgaaacacaagaactaagccaaccagagggggggtgaatggttgatatacccaaaaaccgaaaacttttagcggaaataaaagttaccctcgaaatcgatggatcgcggtctgaccgaagtagatgcgctggtctgaccgcctgatgaacgtcggtctgaccgatgtagatcgatcggtcgaaccgtcgaaatcgcctgccgctgcctgactgcatcgccggtctaaccgccttagctctgccggtctgaccgccgccttttgccagtctgaccgctggtgcgccgccggttggaccgccgaaccctggtgaaacacaaatcgaagaactctcaaagtagataaaaactttattgcttctctctgtgtttacaaagtgcaccaacagcactccttacaaaaatcttgactaaacttgaaaccctatctaaactatcaactcaattgctctcaaaagcgataccgaaaagcgataccgggaagcctcacgctccccctctatttatacatgaggtaggcagcctaaagccacgaaccaaactcatactaagagtcctaaacaccttaggaaaccctctagtacaagatacaaactttacataaccaatcgtaccaaatttggactccttccaaattcgactccgcatcccatacgtacacaatacctccatcgtatgccatatggaatcttcaccaaccacgtgcatcaactctagccttagtatatatcccgcatgatatctgaccaccacggacatcgtcttatctccaagccgactcccggtctatcaccgcatatactgtctcgaggcatcgagtcacttacacatgaaacaaacaaagaaaccatattccgagaccaagctatccccaacttgactcattattagcaaacaacagtattacatacgtatagtatccatctagaagccataaccatgaaacaatcacggatatccaaagaaacaacccgaaaccgaaaccgacacagcatcggccggtcaaaccacgggccggccggtctgaccgcacacatagcaccggtctgaccggcaacctctgctcggtcggaccggatacataaaataacagtgaatccgatcatcacctgaaaattgattatctccaaaaccacttcaacgataatctccaaatatcaaaaccaataatcacagatgccaattgttcatcacagaataagaatcaatacacacattgatcttacattcttatgcttgcattggtcagaagtgctatgttcagcacatcctatttatgcacaataattggttttctagtggtatgcttgatttgaactctaaacaatacatgtgtagaatgctacttactttacatggcaccaagtcaatgattcactttgcaaataggaaatattttcttcaaggcaaggcattcacaattatggacccaatggaactcatgcaagcccaattagtgcagttagtgtgggatctagatgctcagatggttcagattatcaatttaatacctagatgagggaagaatgcactaaatcatgtgattgtgagatcgtcactgccaaagaacaccatgttgttgatgctacttttctgctgtttggcacggttcaacatcctaaagagaagagctcacaagttctcaatcatgtactacatctgcatggtgatttgttggcttgttggttctctcaaatgggctgatgaagcaatggattttgataaagtgcttcttctcttgcttactgctacatggaaggttaatagttatgcaattccaactagagggactaccgagatggttgtttcttctgtgcaaaattcgtaaggtgttatattcaagctcagtcaaacaggggctgagcatgataacaagctgaacacatttctagctcatgggagtttggcctactcagtaaccaacaattatctaatggaaagtatcaatttatgtactcaagctgcctttttgatttccaaagttcatctcagcaactgcaagctagaggaacaatggtgaatgtttttttgtattttggacatcccgaagaattctcagaactaaaggtgccatgggatctaggagtttattgcattggcttggagacaagccaaaaattaagggaacgggttgttaggagccgatgggcttcctaaggtgcagccgccccacactattgatgcagcccaagaccatgttccatgtaaagcctaagggcctgttcggctgctttgtaccgccgctgtgttgccacagccgaaagaaacaacacactgtgctggttggctgcagcacagtaaaaataatggcagccgaacagagcctaagaagaagagaatataaaagcagcagtactacgggaaggaggagagggagagaatcccaaaacggaagcttggcctggacggtgcgggcgaatggcggcagtggcggcgacttaggtctaggcttggattctcgtcgagtacctgttttcttcttccacctctccatttcctagctactagaacttttctatccacttgtatccttgccatctccatctccaccctccattgttgcagtggatattgtcgtttggaaatattgtgaattgggttgttgacaaaaatttattacaatctaaccagaaagatcaaaaccgtggatttattccctgccaattctttttcatagaactacagcttgaagatgaattagaagtctccttttgctaagcctaagcttacctttgagcttctttcgactttacagaggtaagaggcaaacaatagcacaaatataaagtaagttttgtatttttatcgtagtttaccaaacccaaacgtaagcatgccacagcttactggtaaaagaccacttttccgatcggtcagatccttctccagggtttcaactatcgatataaaaaaaatatcaaaggtaccgataaacaggattatcggaaatatcggaattttatcagcgatacgagaaaaattttggacaaaatttattaaaatttggctgaatttgtgcatgaaatcaagtagattgtatctagatcatttggtataaaaaataacatatgttggcgtagccaggaatttttttctggtagtactatttcagaagttcatattacatataaaaatttttgaacaccgtaaatcatatatagatgtaaaaatttagtaaaaaggcgatacaaacatagaaataatatcatttaacatcaataattggctaatttataacaagcaagttcaaaacgtgcgaatactatcatatagatatttaaaataaaaaagatcttagacatggaaagaaaattacttgccgataccttaatctacgcttattcatagccatgaaagtttttattatgtcttcctcgcctatattgctcaatatatgtgactaagccattttaaaatcacctgatcaacttactaattattttgtgcaagccatttcaaaagctgaaggaaattccctctatttgctagatttatcactttcattatgcccacgaaatgccaatccttgttttcaaagaaatcttacatctaagtataaacctagccttagaactaattttgttctcgtattaaaccttcacaatgacattatcaaggtgcgtctttaaagaaaaatatatttctcttgaacttttgtgtgcacttcatgttttgcaaatccaatatacaaactacaatatagcaaatcagcagaacgttctgatattcacattcactattcactgattcgcaaatcacatattcacattgactgattacaaatcgttaatttacttcacctgagcacaagatttgaagaggggctagtaggaaggcagggatatcaacaagggccagggtactaggggacccgggctcttagcgtggctgcccgacaccatgggggggacacgaattgggtggggagccgcacttgcccacgccgaggcgccgctcagctctacccaccgtgaatcgatgcatgcagagagtggcggtgtctagacggcgacgtgacgagaaaaggaaccacagcggcggaggcggcgcggcggaagcggcgcggcgaggcgagaaacggtagctacggcacggcgaggcgagaaacggcagcgacggcgtggctgaggtgaggaacggcggcacaacgaaaagaggagacggggagtggacagaagggaagaacggcggcgtcacgggttgtttctctcacgcgtgcaaagaaccacgtagcaatggtcaaacattggtacggaaagatagggtttgtcttttttttgggacggaggggagggagtatgtagtctgtaaataaccagtactctctgagtgcaaagcatcatataagcaatcgaagagcacaatatcaagcatgcatggcgacgggagggaggagaggccgcgctgtgccgctgtccaagagcttctcgaggaggctaaggcacggccgcacgggttttggaggaagcggacacgcgagggggatgatgcagctccatgtggcgtccgcgccatccagatgtatggcgacggcggcggcagttctcgcctctcaactctcgaacaacaggacaaggcggcgcactggggctcaatgaatggcgacggcggcggcagatagatgcatggcgacggcgccggccggcggcatatcgatgtatggccacgtcggcggcagctctcgtctcgcctctttctcgactctcgaacaggaggaggcggcgcacggggttgggagtggatggggtcacgggattggaacttggaagtgggctctaggactttgactgggctagggcgcgtccgcgcgtgggccaaaattttgggaggctgtggaccgggaaaagaaaaagtacaccaaaggtccctcaacttgccatcgggatacaaaagcgtcctcgaatcgcaaaaccagatatatggggtcccttaattatacaaaactggtcaaaatagatccctcggcggccctcggcggttttgatgcaggttttgccctacgtgtctgcttagacccacgtgggccccacatgtcagcctatccagtcagcctctctttctttcccctcttctctcccttccccttctctctctcactcttctctctgggggctctgggcaggccggcgctgctggccgacaggtggggaagagaccgatggtgcgaggtgggagaggaggtccggcggccggcgatatggcggcagtgatgacggagacgacgcgggagcaggggagcaaggcggcggcggcggcggcgagatgtccatggtgaggtactggaggcggagctccgtcggggcggggagcgggtcgacggcggtggatggcgggcacgggatagcgtcgcggcccaacgccggcgccagcgccggcatcgcccgcccgcgcgcgatctcccccaccgccgtcatgaactgcaacgcgccgagggccgagggccaatgcggcggcgacggcgtcaccgatggctgccatcgaggcggttcgggagaggcagcagaggaaggggagatcgaggatgacggcgccgtatcggcgggcgtggcacagcagtcggtgtgctacgacggcgacaagcagtggacggtgtcagtgttgtgggggttcgcggtggtggtgacgcgcggggtgctgtcgccgcggagatggagatgcccatgcgcacgttcctcaattggtaccgctgtgccgactacacggcgtacgtcttcaacacgcggcccctggcgtgccaaccatgccaaatgccgcaggtgtactacatgcggcagtcccgcctcgaccgccgccgcaacaccaccgtcaccgagtacgagcgccaccgcgtcgcgcccgtcaattgcggctggcgcatccctgaccttgccactctgctcgaccgcgtcatcgtcctcaagaagcccgaccctgacctctggaaaagggtaatcaaacacacaccgtagttaaaaaactgaattgatttgtacaacaaaaaaccttgatttttttaatgttgctcttaaaccgacgcgcgtgcagtctccaaggaggaattgctgcagggtgatgtcgtcacccaagcaagggaaggaccggaagatgaccaacgatgttggcgtctgcagagcgggaggtcaaagtgagtgtgtgagccgggaggccgctgggcgccggccggacgcgccgaagcgggacggagagggcgtggccgcgcgggcgccggcatggcgcgcgaaggcagcaggaggcgcgcgctgccgccacctgcacgcccgcaccgttcccgcctcgctaccgcctccccgggcccatctttggccgccgaggagctccgccgggccgccgccggggtctccgtcctcgacctcgcccacgtggcgacgccctcccctcccttatcaccggcgacgccgacgccctccctttttccccgtcgcggcccccgccactgccgccgctgccagccatcgccgtggacgtgctaaccccgcctcgccgtggtgccatggacgcgctaccgccgccgctgccgacgcgctaccgcctgggtgtgtgactgtgtgtagaagagaggaagagaggaggaagggggaggctgacatggattgcctgacatgtggggtctacgtgggtcccacgctgactcagccgccacatcggacaaaaccggggtcaaaaccaccgagggacctaaagcgaatggttttattagttgagggatgtctggtatctggttttgcgattgggggacgattttgtatctcgatgacaagttgagggaccttgggtgtactttttccgccggaaaaatgccgcggcaaattcaaaaggggccgaaatttttggccaatactgttttcttgggtgcccaccgataaacccgattttcagaaattctggaccctgtttcggcgaaattttgaaccctgtccttctccaccttccccaagctgcaacgcaccccgaccacctcctccacgaagcccgtggccgccggagcgccatcctcgccatcgtcccatgtcagccgccaccatctcgtcgccatcgcaagcttccgccgccgcctctcccgtcacccacgcttgatgagcaccagaatccttttcctctttccctctgtcacatgtcgtgcatgctgctgcatcgaacagtcaccgccggaccgtgcgctgccactccccagccggttggctagtgagccctcgcccctttgttgtggtcgtccgatcaccgtcacatcggtgctgcatgggttccgcgtcggcgccacatgtgcaccatgtggtgcgctcgcccggccacgtgtgtccgtccctcttagacagcgatgcgtgggacgcgcctgtcggcgccacgtgcgcaccatgtggtgcgcccgcccggccacatgtgcccgtccctcttagacaacgatgcgtcggacgcgcctgtcggtgtaaggttttccccccccccccttggctggcatcataaatcaagtttattgcgcaataaatcatatttaacttagttaaatatgatttaatgaagtataactacagtgtaactgcactgtaactaattacagtataatttctatataagttaggtataaagttgcatatattattttaataattatatacaaattatattttagttatagtggattatattacaattatagggggtgtttagatctaggggtgtaaagttttgacgtgccacatcaaatattatatagggtgtcgcatagagtgttcgggcactataaaaaaaaactaattacagaatccatcagtaaaccgcgagatgaatttattaagcctaattaatttgttattaacaaatatttactgtagcaccaaattatcaaatcatagagtaattaggcttaaaagatccgtctcgcaaattagtcctaatacgtgcaattagttatttttttaagcctatatttaatacttcatgcaggtgttcaaacgttcgatatgacaaggtaaaaaattttagggtgagatctaaacagggccatagttagatttgaaatttttttattaaaaacttactacagttttttagatagtctgttaaataaaagcacttgtgtatgtacccatattgaagacacaatatccatattaattatgaacatgcacacgcacaaatatgcagcacacatgtggttcacacgatgacaaactgaattattcactttttacatactatataagtagatagctcgatcgaccgttgctgcaaattacgcacaaaccacgccaaattgttcactttaggttgtagagcttgtttacatcatcgatgatgattaagctgctgcgcgtgggcccccctgctcgtggcgtgggacccagacgatgctgagcttggtgaggaagtggcacacggacacctcccccggcttgacgccgtgcgccacgaagaacgggttgtccgccctccaccgcgacgtgtccaggtggcacacggcgagcgcctccatcttcgccggcgaggccgcctcgccttcgccgtcgccgtccccggtggtcgccgccaccagcgtcaccgcgtacgcggcggtcggcttggtactgtggcagtagaacacggcgtacgggtacgtcaggtcgtggcacgccacgacggcagccggcgccggctccgacgacgacgacgaaccggaaccagccatcgccgagagctcccgcacggacgtcacgttgtacctcccgcgccgcgccggcgtggtcgcggcgtcggtgggaaggtcggcggcggagaacgcgcggacgtcgcgcgtcccgaggagcgacgcggcgaggtcggcgagcgactcgagggaggtggcgcagccggccttctcgcccgggagcagcgccgccgcccgctggccgcaggtgtcgagcgcccaccgtatctcgcgcgccatggcgagggacgccggcgcgaacatggcgaggacgtcggcaaagcggtcggcggagaacgggatggcgtcggcgacgtggcgagggaggaaggccggcagcgaggtcgtcggcgggatggtcggcgtgatgacggagcccggccgaagggcgtcgcgaaagaagaagacgtcggccagttgctgcatcttgttgccgtgtgcgtgaacatggcgtccatgatccattcctgcgaatgaaccaacaacgtagaatagctagaggtatgtatatcgcctcaaagagtttgagaaagaactggcagtacaacttgtgagataaattttggtagttccgttaaggaaatgcatttcttaagtggttaagaggtaaaaatttgaaattcaaagatagctacattttaacatggaaagagtatgtattaagatctgccaatgcttgaaatttctagaccggtgaaccatgtttattttagggtgaatatgatccctatagtttcgcttcgagctcagtttagtccttgaggtttcaaatcgttcaaataagtctttcaaattaatcatttgggttaatatagtccttggacccacaaaaggtgctacgtgagcatgccaagtcatcctcgcatgcagcgaacagcggtatgaataaaataatcattctatccttatataccatatagaaaagaaagaaaaaaaaagaaaattaatgtttcacacatgtatgtatatgtctcagagagtttgaaaaagaattgaaagtataacttgtgagataaattttggtagctcccttaggccttgattggttaatccctgtgagggacggattgggggagatttattccacacatattgtggtgtggaattattcctcctcaatcccctccaatcctctttaatcccctctaaaccgaataagatcttaaggaaatgcatttcttaagtggttaagaggtaaaaatttgaaatacaaagatagatatatattttgacaaggaaagagtatatattaagatccgccaatggttgaaatttctagattggtgaaccatgtttattttattattattacaattatccactttgtatctttgagttacaagcatagtgaactatatatatatatatatatatatatatatatatatatatatatatatatatatatatatcatatatcgataggctatacaagattaagaaagtcatcaaaatgagaaattttacactcctggatgatggagagaggtgacaaatatatttttaacataaaatttagtgtctcttggtaaccgagatatgtgatagcatcgctctatcaaaatgtgcgtgcttagacaattttaagggaaacacaaaaggttgaaaggaaaacaacttacagtatgaataccctaattgcttttctagacgcattcataagttatatgaaagtataacagacaaacttgctattttcaaatattctcaccttcgaatgtgtgttgataattcttatgtgcgaatctcgtagggaacatattgcttagatttacttcatgggcatatgacacttgaaactttttgagttcctctatacgtgacagctatgtacaga

SEQ ID NO: 16705 - DNA, 19008 bp, Oryza sativa
ttgtatatagtgtatcatgaaacacctggtataccatggtccttgaggtatcatgatacacctggtatctcaaggtatcatttggtacctcgagacatcattcggtatcctcaaattatcacctacggtacccttgaggtatcatttggtaccctcaagatatcgcccgtggtcctcgaggtatcatgagatacactcggtacctcacggtatcatttggtacgctcgaggtaccatgatacatatgataccctcgaggtatcatctagtacgctcaaagtatcacctacagtatcctcaaggtagtgcccgtggtcctcgaggtatcatgatacatatgggttatacatggggatttttttaggtatcaggtatgttatagtgatacatttagtctctatgctctagaaagagatatcaagtgattcaaataaaaaaacacaaagaaaggaaaagaatagtgaaaagaaaaaaaaaggaaaaaaaatgtatggttgggccgtggcccaatacacaggagcgcaacagccctaccgggccagctggcctatccatgtactcactctatcctataatataagacatgtacacattccaagattcaactttaaaaacatttaaccaacaattattataatataaattaaattttatttgttaaaattattatcattggattgacatttaaatttactttaagatggttataaatttgttgcaataaaccttatagtatatgagaaatttaaagtcaaagattagttttgaagactgtgccaatggttgaccatgtgttatattatggaatggagggagtacatatgtgcaagtgtaggagtccttgtggtctagctagccacgtaccgacgtatgtatgtataggagtcctcgctaaacgtggtggcttgtgtggatggaagcgtgccatgctagactgtcccgttgaagaatggtacaccgttctttaatatttctatctcagcaaaccattaattcatcaacagtgtgccaacatgatggtactagttttgcagtttttattaaattaataatacttcacaaaaaaggtcgttcattttctgggttactaaagatgtaacgagcaaatttcttgttaactagatctggcttatgccttttgttaatctcctttagtccactgtaatagtaccaatttgagttccctttccttagcttcacggcttgtttgttgaatactatgtgattgtcataaccaccatgatgattggcatgctcatgcccatcttctggattgccaaaggtgtaataatatgaaaatttcttcttagctaggtgaacatgatcatgtccatgtgcgaggttgccatagattgaacgtgaaaatttgttcttagctagcttcagcttaggctttttgtcaatcccattcacttcgctgtgttggtataaatctgaagttttcttctttagcttcatggcttcatagttgagtaccatgtatttgtcattgtgaccatcatagtaaacatgacggctaactgctgggttgtcataaatgtaacgtggaaatttcttcgtaactaggcaaacatgatgatgtccatctgctaggttgccatagatgtagcgtgaaagtttcttcttagccatgttcagcttagattctttgtcaatcccatttgcttcactgtgttggtacaaatctgagtttttcttttttagcttcttggctttgtggttgagtaccatgtatttgtcattgcgaccatcatagtgaacaaggtggtcatttgctgggttgccatagacgtaacgtgaagatttcttcttcactagattaagctcaggcttttggtcaatccccttcactgcactgaactggtacaaatatgagaattctttctttagcttcatggattcagtattgaataccatgtgattatcattgtggccatcatagtcaacacgaacatgcctgtctgctgggttgctatagatgtaacgcaacaatttcatcttatctagtagaatatgatcatgaccatgtgatgggttgttattgttgtgacgcgaaagtttcttgttggctaggtctagctcaggtttcttgttaatctgatttgttccactgtaccagtacatatccaagtttttcatctttatcttcagagcttcatactcgaataacatgtgcttatcactatcgccatcatagtaaacacgatcatacccgtctgctgggttattatagttgtatggtgaaaatttcttcttagcttggttgtctagcttgggattcaatttgagtattgagctcttctcatcagcccccttggctccactacctgatgtaagaaggagattcttcttctggttgcctgtagatacatgcacacgatgtcacagttcttgcattcgttgatcattataaactgaactaggagttggttattttcaccactgattttaactgtaaatgaaatctttattcttatgcgacatataatcttccccaaaggttgctcattcatgtactgttcttgtcaaaacatatctgacatttgtcagaatttacatgggaatcttccttattctaattctactacctccaccccaaaatataggggtagtgtggtgtaatcagcctcacatttgttacaaatttataaatagtgccattttacagttcgcaaattaatatacaaagtgcagtaccatggcacctttcaattaaatactatcacaaataaatgatgttttgggaaacaatatgatcatgcaccaaggtattagtttgattatgaataaattaataactagtataaaacgtataaaaatgaaccaaagtattttgaaattttttgaagataaaactagccataccattttcaagttgaattgaaatattcaaagagatattgatggtcaaagtatattgattgcatgcattacaaacattacccaactagtaggtatttaaattctatctttttttctagggacgcaatttgaagatcggatatataatttaaaatgcatatgcaggcagaggcctggattttattttcaattattaaaacaacagtttcaaatgttatgctacatttgcacaatcaactataaggcagtaaatttatctgcatcttcatatactgttgatgaaattggcaaaattcaacacttgcaacccctgtacatacgtacttgaaacattagtattttgtacgggattatatatagacacttaattttagtggacattttggactgtcaatgtccaaggcatatgttttggttacaggagagattacttactaaaacctcatcaactttgtttgatttgagttatcaccttataaaaaatttaataaaacttgagcaagtgaacggtattattatattgatcaagtataactatatattgttaactttccatgtttatagcattaacttcaaataaaatatgcatttggtcatgctggttttgagtgtgattttggctgtgttgtaccaccttgtaattaaatttgtactccctctgttccaaaaagaatctaatcctagagtgaacatgtgtctagattcattattaggattgttttttttaacaaagctaggggcccagcttttcaattacactagaaaatggcgcaccagttggcgcgcttattaattataacctgtatataatacttataacttatttagaatatatatttgttagtttttgagtttttctacaattttcaattttatcaattttatctgtttttaaaactcatggaaaatagactgtatatattttctggtttatttagaacacaataatttcgcacaattgtcagaacggctagttcaatgctcgtaaaatttatttaggatagagagtttagttttctactaacttatcgaaggttaaaatatttccaaatatcataaggaaatttgatgtattttggtaaagaaaatcacaaatctgaatatttttttctatctctaggggggtatgtgtaaacatcataatttacccaatagagtttcatatgcacacaccatagcaaaatttagtttgatatatgcacatgaattacatagcaaaattacttgtccaacttataaaaaaaatagcctacttgataataagttttatcttagggccatttataaacactccaaaccgagggcctatttgtaaatttaaattttttagaggaaaaagttcagaaaattgttttggtagaaccggacatgttttttttatcctctgcataatttttacctggggtgtgtaaaaatcataatttgcccattagaggtgcgtatgcatatcatttagcacaattttagtttgatatatgcacatgaattatatagaaaattttaatttgatgcccattgcctcatgccagagcaaaatttaaacttgataaaattagttgcgagctacctatcaagcaaaaggcacccctcttgctattttattttctatccacatttcattttatttctcgtttcaacgggtgaaaacaatctatctattatattataaagatagcttgaaaatgatacggtatttgctttgatcgcatagaaattgttacattaattaatataaaaagataatagttgtatatacataatataatgattgtatttatattaaatgtcacaaaactacaattatttggttaaatctaatcatgtttttaaaatatgttacaaaatatattgaacaaaagctaagaattgcaaatttaattctataattaaaatatgttgcacaaaacaataattgcaaaaatgaagtacatgtaatcctagtgatatttgcgtgggactttcgtcgagtttgggtagaatcatagtcggtgatattcggtgcaccgtactaccgtactatgtaggttatttgctcagtgaatcatagtcgaaaatactcattatttctcatagttcttgttctatgagtggtagggtgcaccataatattcaaaaaatgctatccacttagtatactcattcgtcagagtagcttggacgtaccgtcaagagatagaagtgcttgctcaatcacattgagttagtgaaaagaccacttggtttgatggtatgattgatcttctacgtccattataattaccacattgaatgtatatgtcagatatacttatagattcaacaaacttctagttcacgataagtcatctttagttaaaattcgcacaaataattccaatatattttatgcaattctatatattttaccgcaatattaattaaaaataataaaagcattacaaataatcaataatcataaatgccataaataaattttataatcatgaatatatgaaatataatttcagtgtattttgcaaatttacaatgccattcaaacaaatattccaaatacagagggccatttatgtattttctagaaatttcagggtttaaaacgcaaagtttccaatgcagaggaatatgcgattaatttttggaaaccacaagggcctttttgcaaaatctatggagattttttccttcttctctactttctttcctccttccttatctttccttccttcttctatttacttttctttccccttcctccactgatggcgccagcgggtgcagaggctggacggacggcaacggcgcggtgggtgcaaaggccggtgaggcgctgcggccggccgttggcgtcgtggccgggtgacggagaggaggaggccgtgtggcggctccgtgcgatttggaggccgggacggcgtggtggggctggctgcggcctcggatggaggaggcggtggcgacagctgcggccgctcgcgcgcgcggatcatgcagcggcggcttaggcgcgtggatccggtggcggcggctgctcgggcgcgcggatccgggtattcccccacacggatcctgagtcggcggcggcagcgtagtctcacctccccacggtggcggcgtgccctctcactccctctccttcccgtccctttcccctctcttctctatcgccggcaactcccacaggccggatccggcgtaggcgtcggtggcccggttgcggtgccttcccctccaccagatccggcggcgagaggggaggcggtggctgcccggtggcgggatgattatttagatgttcttgtgtgatgttttagtgaaaaatttctgtgatgtttttcaatgtttcctatgatgttttttggtttgggattgggattgattgatgcggggtggataaggtcgatgcatcagctcgattaggagaggggaatctgttgttcttgaggatttttattcaatgtgatttctttatctactactgagtcctgactgttctagatgaggtccattggatatttttttttcaccgttgatatgacatcagacggccacgggaggggtgcgcatacgtggccgcttctccagccgagaatcccgctggggctcgaagcgtggtgccacgtggcccaatcactgggcagggttagaaccgtgcaatcgtatatagagatatgtaggggcagacctaggtccaaggcaacatgggtcatggcctggcgcgggttcataatccaatgggtctagctagggacagaatagtatgggccagcttgggccttaattagcctatgccttgtccgcccctataactatgatgagatcatatggcggtataataattgtgtgtgaaataatggtatatatatagagggagtgaaacttggaacacatacatcattacaatcaacaggtgacgatgtcgttgctgtaaaatttactctacaaattatgtgaagtaattgttatataaattgaccaacatcggtcgaggagcagagtgatctaatatactccatgcatttatttttgtaaggtttattttgattctataagaaatcaaattttgtagattttgaccaatgtaaagttaggaaactcaaaagtatatttaattaatgcataaaattaaactaaaccatacgctttattcatacaattaatattggctttatgagaaattgatggctaaagtttgatcatgaagacattttataattactatatgtacatttaaagtagtaagtactacttcaacaaagcataggagttaaacaaacatttataatatgagtgaggattgagtaaagtaaagtaaagtatttcttgtattgtacaccatccccgcaatccaaactacaaattgctataagttgtatagtaccacctacacattcgatgattaattatgcatctcctctactatttttataaaaatagtagaattttcttacgccacatgtgtccgatttggccaacattgtctccactcgaagcaatgagagtctgcgtccgattcctgcgtacatcgtgcaacgccgcacgtttgttaccaatttgcgttgccggcatccgattggcattgatgtcttctctgcgtagcccactatatttccttccatatctcgcatgatctacgttgccgagggaggcgacttgacatgagacgggctgggccttcctgcatcgaccgtgccatgcatatagatcgaatccgtttcagtccgaagcaagagactacgatggaatatattgacgtgcaatcctttcgcgcattggcaaataaaaagggacgatgatgggataataaacaacaagacttaactgtctatctgtataggttttgcatggatgcaaaaatcatagcaagggctcctattttcatcaagcaaataatggccaactcgtcgaccgacctcgagcttcctttctagagtaggatatactgcatatacttaatatgtgatattaacattgcttcaacccattacaacgcatgagtattttctctagttactatataattgtatcccactaattagcttaaatattttatatgtctttccacaggcttcgtaatgatcactaaatcatacccgtacaattagattcattagtaaaatcatagctgtttgattagatctatatgtcaatctctatctatatactattataaaattggagatgtttctgttggaattttggtacgttatccttgtttgagttggttgtatgtcgtccgtatccaattcgatgcgaatctagaataactattatacacccatatcccatcccaacccaaccctaccggccaactctatcccgcgtgcctccaatcggcgccacacacgaccctcccttgatcggcatctttttttctctcccttttatttttatttttctcattttttctcccgataatcctaatactctccttctccttctaatctcgtctcatttatctttttctcttccaaatttccctcctcataaatagtttccttttgaatttatcattgtttaaggtgtgcatacgacaagtttgttactctgcaaatgctttccaactatagtaaaaaaattattaattgaataatcaaaatttcagtctttgatcgatgagtatagcaaaatgcacatgcgtcaacttatggaatggccacccgattgatttgtgaagctatggaaagacgtacataagtgattcttcgtgtgatgacacatgaagcacgcacaacccggttgaatgctatatatggtttctgactttgttttgctattgatttgtttgtttaatttcggtttgttgtttaaattgatcgagttttattaatcgtgaaaattattttcacctgttgcaatgcacatgtatttttgctagttatttaaatgccagaccagcccggaccaacttctacaaacaaatgagtccatccagaccaacaaagtaaaatcagctattggcatgtggcacaatatactagtatgcagggacttagaccatgtgcactttttccatatgaagatgctagggggatgtgtttggttgaaaggaaatccctacatggatatgaccatccaacttaactatgtttggttgataggaaggacgaatcatgaatgagaccgttataagagagaatatttcatgcagatgctggatgagctatttcggaaatattggccggatgagaccatccaccttttctaatcttgacaataatgataattaatatattttgttgttaaatagtaattaattgtcaaggtttgtgttgattagagataatgagtcattttgttgttaatttgtgtataatatggagaagttaatgataactaccgctaatatagaatatattatgttattaataaaaactttcatatttccagttattcatccacatcaatctaaccaagtaagaaactaaatcattcccatccacctaacaaattaaacaaaaaactggatcatatccctaaaaaattagatcatcatagctactcaaacttgacaatcaaccattaatctggatcataattcctggtcatggcttatcccttttgaaaattttgttaatagctagtccctagttacttctgttaagattgttctcagatacgttacaatgagcattcacatcgatctactcaaacaagtaccaccataatacctggggttgattgtcttataccaaaaactcttatggttttgtgcaacttgaaccataataccctgtattttatataatttaatatgtttttttatgcaggtgttaagtaattggtgctaaaatctagcactctattttggaagaaaagaaatgagaggaatgcatataaccagtaggaatcactatgaggtgctatagcctataggctgcagtattttttaattacttagctatcttaagcatggcctatggttccatcttggtgtttatatctagctactactatgcaaatatattacccttttatagagagagaattaccagatggttgtgtcaagaggttgagtatggctgatggtattggagaattgggatgaactgtcttccagtatgccatcacgtcagccgtgcggtctggcaccatcatcgtcatcttctttgcgctcaacaacttcctcccctcgccaactccgaccaccatcacctgtcaaccaaccaaccaaccatcatacatcactactgatgtagccaagatgtgttatttcaacaaaagctttcatagatgattttttcaatttatacacttaaaaaaaaaactaaaacacaactaaaccacccactacaatatcacttgtaggctacacgggccaatttcacaccacactgcaggttgcaaacaggcatgggtattacgaatctcccccaaagattctaccataggataacccaattcccgccacctaccagcttggcaaggaacaatcaaggcatcgttcaacacacatgtgaactatgaaagtatatatagcctgtgataatttgtgacatatacacaaacatcatatcgtgtagagtgtgattcaaaaaagtaaattattccttgcaaaaaggaaaagaagaaaaaatatatcgtgagtgggtgaaaaagcatggatgtaagagctcaacttaatggagacaacacttacaagaataaatgagaggagtgacaaaagagtactcattgcttagtctcagataattttagcattggctgcttatagttcttgctcaatttggtcaggactagcacaagaggtatttataggctagcatcgctatcacgatcacgtacaatcatctgctaaaaaacaaagaaattgagaaatggtggcaggatctaaaaattaattctgaattaattttccatgctggggcgcacatgctttttttacactgtatatgtattaaattcaaataaaggaataccctgtgaaaacagtgtaaatccactgcaaactttaaaaggtattaccaaagtaacttttcataacgtctatgtatcttattatataaaattttacaatggcgaaagatataaaatcatcaatttaaagtagtatggctagaaaactacatgaaatttagtaaatttacactgtataaatgtaatacatacattgtaaaaaagatggaaatccaaaaatgatcaatcaattgaacatctaatctataccttctataaaactacaatccactaatcacataaagctcaaaatgcaagcataacagttattagttaacatacaagtagatcacacatcaacccactaagcactaaaagatcaacatgcatagtaaatactaaaacttaaatgtaactacatacattacctataaattattattttttaaagctcaacatataaaaatgttaattcattattactcatatcatttccacaatatttatatctaaattcattcatcatttcaacatcatttaatacatattcattcatatatcctgtagcaaagcgcggggtgtcacctagtaactgctatacaacaatcactagtattctcgattgacaacctcctcaatccaagcttccatctcgtggtgcttggtcacgcagttcatacgagtgaacgaaagtgagttttactatgaacttaaggatactgtgaacgatctcctttcagaaatcactcctgttgagaggccctcctcctcccttttttctcaatatggaagagaggcagaagagaaatccagagatagctcaactttttcatggaaaagttggggatcgaatgcaagattgagtccctgctggatggaatggaaacactagaaagatcataagaaaccgagctcaaagtgaatcgcaagagaaccccccatcccttagaaggatttgaagctgtttagacactcatagacaagtaaaatccaactcaggttcctcgagaagtgaagtgaacgagcaaggtaaaacacaatcaagttaggaaaagagtctttcatgccaaggtgaacatagataggtagagttagtttattttccttaattaccagagagaagacttacatgcctgtttgactccgcatatatacccccattaaaaagagctctgcatatagatattcgatgacatgtaaatcaaccattttttcctttttgataatcctacggtctgctcttttccctggggtgctggatatgttcttcattgcttccgacagcaatatttcaacctgagcggcttttcctttatatatgtaggtattgcaatgaaacatttgttcctagtaaaatccctaatctaatcttgctagttagatctagagacaatgatgaaattcgtaccacttaatgtgttgctatgaagaccagaggagctgttaagttactctagttaatttggccacagcctaatttgccattagtgtcacattcacaaactgctgatcacaactgtactaaattttggcgactgtctgggcatataacatacagacaagtggtgtaataaaatgtttggcttgattcagttgtaaaattgaaccaaacagttcctgaataaattgtgcagctaaccaacaaacaagcccctcaagcttcaacatcattttgttaggtagcagttatgtttcgtttggatggtctcttgtgtgttctgtttggaggagtttttggcagctgtagttttcttgaagtcaaaagcttgtctaaacaatatagcttttcatccagattcttagaagatgtagttatagaatccagaaaataaactagattctcaccagctgaatttctactaatagcttcatagaatctaaagctacctaaacatgcccttagatgatgccaccagtgggagctattctattatcctttttagctagatgtgccatgactatgggtttgtttagccaatcttaaggttttagctagacgatgaaatctgtttgttgaataattttctatgtagtatgtttgtttcttattttgaaagaaatgtatggcatggttcctataactttaaatttttaatgtataatgtcattgacttttggagatatgtttgactattcatcttatattaaaaaataactaattagcaagtgtgaagaaaatataagttgtgcttaaagtagctttagtaataaacaaaccacagtaaattaaatgatagctacgcaatccttttagtaagaagaatttgatcaaatgttttctcaagtatagcagcatcatatattaaaaacgtacaggaggaattatagcacccgagggagaaaaagagggagcgaagggcttccagcagttcaatgggattgtaaatacttttggttttttcctcctttcaattaaattcccgcagttcttctgccgtcgtttctgcttaaaaaaaaaagggcttccagctgagtttcatgacagcgccattaattgattgttagcccgatagaggctccacgacaactcccaactaatatcatgaacatttatgcatacatgatctgacgatcggtatgtgctactgacttggaaggtatagaaggtttggtatggatcgaccattaataacacgttggccatattattaattagttgatgacctcaacggtatctaaaatttaaagtgtgactttcaaatacaggaagttagctagatggcatgtatgccattaaaattctgtttgtcactcccctttaaaagaaattgtttgtcacaaatagacagttcctatttcgaactaacacacaaatatgcaactgggtgacaaatgtgcccctactttcgtctgttcaaatgatctgggtttgaacaatgatttttgtttgtgtacttaaccaggaaaacatcctctcaaaataagaaaaatattgttgggaggaaggtgtagtatagtctattcatgatattttactagaattaattttacgatccatctattttactagaaattaatttactcacattgtttaattgaaaagacattatccaatataatgttttggaatagcttaaaatttatccaagcaaatatatatggacaaaagggtccagtttgagttttagcaaatgtattttgaagcgtattttgacttgtgtttagggtaggacacatgcctcgggagatttgtcatccaatggacaatgacacattctccctgggtttggaataataagcatgacatacttgtgccaagtgaatttttagaggcttatttaggatcgagagatgttcctttgaaatctttttttttcttataacctgaggagatccaaggtgacaagtcggccaccgaatactgtcgccacttccggagcatggatgatgcgatggccgacctcggcgaacctatcaccgagtgcacgctagtcctcgcactttcacgaggtttgaataaaaagtacaataatctgcaaactgtattgcccttatagcgtcgcttccccaccttcctcgaggcatgctctcagctgcttcttgcggaaatcaacaagggacaacagaccaccagaaccgccattgccttcgtcgcctccaccaacaacggttccggtggagctgggtctgtcgtcactgctgcatccagcaccaccaactccacctccgggaacggtggcaacaactgcaatcactgccatgggtgtggcaatggagatagcggcaacggtggcactgctcaggcctccgaacaaggtggcggcggcatccaagccacccactcaggccaacaggctgcgggagagtggcaactagtcccaacaccaagtcacgccgtagcacaccccttacaatccctgtgccgataccattcaaatatcaggccatgctctcagcatgctgggccaggtgttggcggtccttaaataccaaatgaaacactggacgtagtggtagggtttgttactaaccaattccacaagtgttggtaaatatttgtatgtagttgattatggatgaaagtacacctgctgtgtaacgaaattgtcctccaaacgtcagaacatcgtctcctactccagcactaaagccgagtatagagcatttgcaatgttgttgttggaacatgctggcttcaccaacttttgcacgagctgcattcacatcccactcgaaccactttggtctattgtgacaacatcactgcagttcagcaccagcacatcaagcacgtcgagattgatctccattttgtccatggttgtgtgactactcgcactattcaagttctacatgtgtgaactacatcccagtatgctgatatattcacaaaagggttgccgactgatgtcttctttgagtttcggtctagtctcaatgtccagcctgttgacgttgcgattgccgggggtgttagcatatctcatgtatatcgcatgttttctttcttttggccagtcctcccaatatccctcccaggcatgtttctataaactggttgagtaggatactaggataaggatgattatgtgcctatatgtactcggcgttgtgatcaatcgatattgtgttgagtccatcaatctaagagtctgttgggccactcctctcaggctctcacgatgcctgcgcctgcacacgctcttgcacttgacgtggccgatctcacatcagtcatggaacaccaatctatggagcttgcatgattgtgacgacacctgatctctatctgcaactctgtgtctccattttctcatcctggatccaatgggtggcggtgagaacattggggatattatggaataagttcaccggaggtccctcaatttaacaccaagattttttgagatcccttaaccacaaaacaagaaatgtgcacccctaaacttatataaaccgtgcacataaggtcctatggcagtatatgtgggtggtttcgctgacgtggcatcctagtaagcaaaaataaataaataaagtacgtggggcccacatgtaagagagaaaacgatatgggcccacatcccttgtttcttcccctttcttctcttctctcgtcttcttcgatgggccgagacgcgcggggcgacggctggcgagagcggccgcggcggcggcggcggcaggcgaagaagtcaggcgcggtggtggcaggcgaacgcggtggcggtgggcgagagcggcggcagcggcgggctaagcaggcaggggcggccggcgaagcaggcaagggcggcagggttgagcgccggcggccgcgcgtgcccaccgtggtcctccgtgtccgcctcgtcgtcctctgtggttgcgccgccggccgcgtcgttgaggcggctgctcgtcgcggtggtcttgttcacgtggccgagcagagcggacggcgggcggaggagggggccgcaacggcggaggtggccgaaggaggagcgtggcggcggtgggcgagctccgcgggcctacaccgccagccgagccgtcatcgtcctcgtcgtcggccgagccatcctcatccgcgccgagcgccgcgcaccgctggttccccctgccaactacaccctctccgcgtccccgtccgcatcctcgcgctctccgtctccgaccccgacgtcccgctcagccccgccgtcgacgagtcctacacgctctccgtcgacaagtcctacacgctctccccgccgtgctcgtccgctcgcccaccgtcgtgctcgttcgctctgcccgccgccgtgctcgtccgctcgctcgcaggccgcgctcgcctgctgccgctcggctgccgcgcggacccgccgccgcgctcgctcgctgcccgcccatcgctgctccgccctctccgccgccagcgtctacgcggccgcttcttgccgctgccggcggcaacggcactcccggagtccatggagctcggcgacgacgcgttgagcgagctgcaggcggccgagctcgcgtctttgctgctgctgctgcaggtgcaactattgctctcctgggttagcacttgctcttgctccatctgtgtgacgagctagcgcgcgacgaccaccaagattgcttgctagtggaccgccggcctcactcagtgaagaagaagagaaagaggagagataaaagagaagagaaggagaagaaaagcaaagaaaaaaaaagtactattgatatgtgggccccacgtacttttttaattttttttttactagaatgccacgtcagcgaaaccacccacatatactgccatgggacttcctttgaacggtttgtgtgagtttatgggtacacatttctggttttgtggttaagggacttcagaaaatctcgctgttaagttgagggacctccggtgaacttattccggatattattgacaggagcagtgtggagccaaatccgccgctgttgctgattgctactccatcaagggctcgagctgtgtggatcaggccgcttccgccgcttggcccactccactagcttgcctacaccctaacacagcaaggggtgggcacatggctacggtgtaggtgcccccacctaggtgaaccctcactttacagtgtagattgcaacaacaacatgtaaattacaacaacgattcttctgttaactatttcgacgaacctgcagtttaatctgaaaatttaggcaaaatgtgaccattgcagtctttttcttctttctcaaacacactattccagtcttttggaatgaccctaaagctgatcagttaattgtgaaggaaccctctacttcgcagaagcagaaatgatatttggcatatactttgcagaaacagaaacacaacttggcggtggctggtttatttagaaatctctgcttggttttgatggcaagcatggtaatttcagaattctccaattcttgttgacaaaaaaattctgctggttgaacatggtgtgatagtgatttgagacattaatcaatgatggattatctgcttgcctgttctttctgttacatgagttgtggggtgtttttctgttaaattaatctaggttgctctcttgatctgatctagacagatcctgagcaaaggttgcaattaggaaaacaaaaagaaaaggtgagagagggtgctagttgaagttattgaatggcttagtatacctgttgactgtagatcagtcaattttagttcaaatgtttattgattttgtcatgtatactgtactatggtttgtgaagaacaagaagaatttgtatttggtctacttaattgatctaaattatgtagaacttcatgattttcttcagtgcaaaacatttctaaaaaactgccaattgtagctttttttcatttttctttgtatccccataaagaactaccataacttttttttttaccttgtgcgaaatgacatatgcaattttttaacaaagaagcagtcttatatcatgcgtgtgaggccatatatcaacattttcttcagtgcaacagtcttttctattctaatctgctactagaaaatcatgtgcctcacattttacaggatctttgatgatatgaatgcttaaggatgctattttgaattgctggttttctcagcaagcaaaagttgcatggttttgtctgatcattttttattacttcacaatgatgatagataggatattgcattgtgttgtctgatttggacattcttgaactgcagccctttaaacttatatttttcatattgtccttacaaataatgagatcttctcatcaaatgtttctagacaaacactgcttactacaggggaatctctgtgctctttatccaatctgcagagatgagggtaccagggagttgtacaaggttcttggtgccacttacatattgttatatgttatactatttaatgaatgtctaaaacacaaggaataggtcccccatcatagcaataagcttctgctttatgttaaaaaaaaaacgattctatgtgtgaagctttgtgatctcataggcaactagagaggtaaaagcacatggtaaacctaggttccactggtggagaaatgctctttactcccggtttagaaccctttgtagtcccaatttttcaaccgggactacgaatccgggactaaagatcgctatctttagttccggttcaaataaccaggactaaagatcaatctttagtctcggttaataacaccaaccgggagtaaagaggggaatctttagtcccggggatagcggcagtccctcgaggtcccttttctttcttttttttttcattgttaatttgctaatggctagagttaatccctgt

SEQ ID NO: 16706 - DNA, 8118 bp, Oryza sativa
tcaagttgtttgggaatattggacccaggcatattaatgccatgaaagaaaaaaaaaacccgaacatgcattttcgtgttgaggctcaccatgagaagtcaagaattggggaaggagtgcatagttgtgtatttgcccgtgcgtcatgatattcgggcagttagtggaggcattcaagcacttgaggtcggtgttagcaattgatgggaccttcttgaccggtaaatttaggggtgtattgctcacaaaaatagggacattgtctgatcagccataatagagaagtgtgtataatatctgataagcacccaggcatattgaactccatcaacaacgagatactagggcatcaacccattcaccatagatggtgcacgaggcacctatgcactaacttctatatcactagagctacccaggatcagatgaatgacctcgagcgcatatgtcaaataaacaagaaagttgtgttcctatgtgcggtgaagtgccccatgggtttggttggaaagtgatcaaagaagtggctagaggacaatatgccacttaaggttaaatgggccagatcatttgataccgatggacgtctatacaacttcatggctagcaatatggtcgagagtttctacaatgtcttgagaggcattcaaaaattctttttatgtcaaaaggagaatgtgtaataacttttttataccaagagcacgatatgagaggagagatgagttgcacaagaaacgggggcgggtggggtaggaaagaaaattcttgacattgaaaatagaggaggagcgagggaggggggaatgagtgaagagtctagtggagacaacaaatgttgataaatgtgggtgtaattctttttacatcaagatgaggggctgtgaggcgcactattaagtagcgcactgtttagcgcatattagtttgttttttttactttacgcatgcatgacctatttagttttatatttacatcagattttctttcatatgaccgatgaaaggtctgagagttttataaaaaattaacagcaccatacatttaaaagcaagaagtaattttttttattagataaggatattttttacctggcctatacatccaaccgtgtgtatatatatatatatatatgtgtatatacatatgtatatgtatatatatatatatgtatatgtatatacatatatatgtatatgtatatatatgcagctatttaaattgggaacttagccatacgaacaaccaaatctaaaattcactcctatggagatatatttgaaggatcttatggtgctaggaataattaaatgtgcaaccactatatcttccattcactcaagtacattcttgtcacatcacatcttattctcacgttaagctcgcgctcttagtatgatttcacgtgtttctcgcaggcgtggttatttgtcacatcaagttccagatctcattcaaatgcatttcgctactaggtaattaagttaataattacatttgttagaagtgtatatcacaataataaaatgcaaacgcatttccaatattgctgattaaataacacttattctaaaagaaagtaatataagaaagaacatctccaaacgattctaatgaggattgagctggatagcggggataacaggtactccctccgtcctataatataagggattttgagtttttgtttataacgtttgaccacttgtcttattcaaaatttttttaaaattattatttattttatttgtgacttactttattatctaccgtactttaagcataacttttcgttttttatatttgcaaaaaataataaataaaacgagtggtcaaacgttgcaatcaaaaactcaaaatcccttatattgtgggacagagggagtaaaaatgaagggagctaggagagcgatggatatatgccttcctagctagttcccacacccctcttagctacggaactaaaaataacaacaacaacataataacagaacacataaaaaaatggattagtatgattttttaaagtaattttcctatagacttttttagaaaaaaaatattgtttaatagtttgtgaagcgtgtgcgtgaaaaacaagttagaaaaggttgggacattcacataaaaactcagcctaattaagctggtgtttatgtcacttttaggtccgtatgttttgatacaccatgaacagtagtgctccccctctcacatcgtaaaaagcagtgctccctcgtaataattcagtgaaatgcaaatcagtactatgttgtgttcttaaataatgtagaataaaaataaaaatatactaccgttgttccaaaatataccattataagatggatacatgtattaagaaaatgaaagtgattaaaaacatgttgtgattgattgagaagaaaaaaagaaaaaattaaagggaacatagttgtaatttgttgaaaaaatatattaaaaaattagctttattttggtacaagttaagtacatatctgggttagaagcagtgagaaagaagtgagaggattcattcgatcattcgtcgccagctacgaaaaatctacaaggacaggaacaaacagatggatgtttcgtcgccatcgcatgcggagcgcgcggtgagccctgcctgccgaatccacgagatatcatatcaaccctgcagcactagctgccactccgtttggtgcagcgtccataaccaaatctagaaataattgccatttccaattaaataattgcacgtgcactgcatgtctggttaataattaaataatcttcgaaagttttgacaaacttgacccggtccattgtcgagataagctctttaaattaagggtcaatttttcaaattttcgcggaagtaatccctagctaactagctagctgaccaattaccattgtttctttaatatatgacttatttggtttttcaaatttatttgactattcgctgaaatattcatgcaaagaaatcacaaacacggtagacatgcttaaagtacttttgattattagtattttttaaatttacttaacaaagtaactaataaataggaaaaaattctatatgtcccaaaaacattggatagaagttcattgaacaccctaaactttaaaattaaacatccaaccaccgaacattgtcataccattcatatattacagacattggttttttatattttaaagtttaaacgaggggttttgacaaaaataatataacatatgcttacataaaatccatcatccgttattagtttgtacagtaatgttatattaagttcgcactcatcccttctttctataaagctaatgcccactaaacacctagagctcaacatgtaagtgttgtatttattagtactcctaaaacctagatgcaagcatgccacatcaacccattaagcacacaaatctcaatatgcaagcatatagtaattatatctacaatttatttcattctaaaactaaacatacacatgctaaaccatcattctcaaattattttcatattatttcaatccaaattatttcattaattctccaatatctaatatatatcccgtggcaaagcgtgggatatcttttagtttatataggagtacaagtgaaagaaataagggggtaaagaagagaatcaagtgaagatttaacatatacatccaagacatatgtcacatattcaaactcatccattgtatatacaaattatatagtaatcatttttttaaaccatcatatgggctgcatagatggtattataaactacataggattaaacgtctggttttaaagtttagggtgttagatggactatcatctaaagtttacggggtatatggaatttcttccccaataaatattattcaaagtttaaggaaaaaaatctacatcatatattagaaatggagaggtatatacgtgggtttagactgatggtgtgatattatctttcacgttatattttaataaacacggatgacctataacatgtttattttttttcctccgaggaatggccctcgtaaccatgttgtctattcagatctgcacaatatttttataattaatgatttctaatatagtatacatgacaggctatcatcttactataatagagcgtatggccccatcatttggcttattacggaataagccaaacgacatatttgcaaatgaaaaataatttgtaaataaaacttttttatatgtgtttttagtgatctaaaagcaaaggctaaaaagaaaacttcggtgaaaatccctaaaatcatgataagtataagcataagcgaaaaatgaggcttgtttctcccttgttttctcatgatttcacatcatcatagcatactccctcatactataaaattgttcatgcgcaagctactccctcacctagtcgattaattatattggccgcgtggtcactagcatgcatcatttcgttaattaattaattgctcttacgtacccttccattttcggtgtataaataggcaacctccagtggacatggcctcttcagagatacatataccatcaactcacgtaatggatgtcctcgtactactcatctcactgatcctcctggtgagtgtgaatttgctgttaatttagtttagaaattaacctctgaagatacattctgcgtgacagttaattgattatatatatgtttatatgcggcaatcaatcgtatctctcctgtcagtaatttttaccaacgtaacttaatttatcaaggtatatataccttacaaagtgtaaaccctgcttactactcttacttattagtatctctgctatcacttaatttttttttcatttactcggaattgattgctttacattgtttgtcaattatgttaggctttgttcggcaacaatatacagtgttttcttttaaaaaatattttgtgtttctaaatgaagagttagctagctagttttggaatatgtaataacatgggaagaataactgtaaactagcatgcactacccagtacctacatagagtgcttatattatggtatatatacacattatttagttttcatttgatttattgtctagattagttttttctgtacttcatatgttggtgagtatacatgtcagttgtaacttaggtgatgtcacaaattatattataagttgcaacaattttggaatgcacgataatcataaatataaggcaaaatttgctacacgacacgtaaaaattgtgtaattagctgagggacaccgcaaaaacgtgacactgccccaacacactacaaaaactgtgaaatttgctgtaggacaccgtgcacattattttatcattttctagctgaaagtggtgagaatatttttgaaatgcccagattgcccccgcacgtcaccacacacagacaaaaaaaacaattctccattaggatggccgaaggggcgcagctagctgcggccggaggggcggcgcgagcggcggggcacggcctggtggcggcagcgccggtgcgacgggggcgcagccgagcggaggaagagttcgaccctggcgttggcactgggcacggcagaccgaggatggcacgacgatgccagcggctgggcggaggtagcgcggcgttcacggcgtggacccgaaggcgacgacatcgacattgagggcatggtgctgctacagcctgcttctggggcgcgcggtggctgccgtcggaggaggaggaggaggccagctggcgcgacgagccgctgatggtcgcgccggacaggctggacgcgctcgggccgtacatgacgggcggcaccgctggcaacgacgccccgcggatcgaccctcccgccaaggacgtgtcgttgcttccacgctgcagtgcgctggttgccgtcgccgagaaggaagtactgagtgaacgcggccgctagtactgagtgaacgcggcgcccttggttgaacaaaaagcaacgagaaagagagagaatgggagagagagaaaagataaggaagaataaagaaaaaagaaaaaaaatgaaggatagaatcgtacttacacaggtgtttctctctccaattcctccggatataataaaattatccgacgggtgtccaacagcaaattaccggttttttgtggtgttctttagcaaatttacgttcttgcgatgtccacaggctaattatacatttttttggatgtcctgtagtaaattttgcctaaatataatgcagatcggaggaagcagcggtgcaaacatggcggttgctgtgaccaaaccgtccccaacagcgatggagtattggcagaaaaaattccctgagacacccatgcccccagccatactagacctgctgacaccactgcctacaggtctctatctttctgctgatagttattaaaccaagaaatatttaaatttatatggttaaaatttaagtacttgttgagacaaatatattgctagatataatttactgtacattaaatacaaacatttaagaagatattaatacacagttttgaaagtgtaatataacaccactttttcaaaaagactagcctttttttcccaagcctcctattacactgctagtaaaaatcgattttcgcaggtgatctaaataaagaggggacgagtgtgttgtcaaaaatggtttttttaactactatgagatcatatagttctttttcctgataacatggaaaaaagacggacacacaaacactatcatgcacatacaatatatatatgagtgtgccctcctaaaacatttaggaagtgaggaagattgggaatcagatcgatatacatatatataatgatgtttacactttattctgttagcagttaacatgccaatcaatttcctatatcaagcagaatacaagaacaataatgctattgagttatattacattgattttatcgtctgcccattagcagtttggaacattgtttgcaaggaacgaatggtactgaagttggatcctatatattattgattcatctaagaaaactaaatatttacctttcatatcggctacacgggctacaaagaaactaaaggaaagatgtatgttgtaatacgctggatatcttatatatatatcaactgaaaacaaaaagaattgggccacattagctgcagaaggactcaaggaagtttctgtgtcatatggaagtgaaggtaaagaggagcctaagaaagcattccccatgggacgatatatgttagacaaggaacgagaaatgacttcatgtatagataaaggttagaacgtttgaatttggtatattgtatttttgtatatgtcattgaaatatataaagaactaaataaattgtttctatatgggccttgaactagagacaaactcaaagaagtccaggtattagagaacattagcgtattgtatatttgtaaaagttgttaacataaaaagaaaaaatataaaaatattttctgtattgcctatgaattgtagaggacctcagagaagtctcagtgtcatatgactcaaacgtgaaactaagcaatttgttcccaacaggtatgcacatcagaaatatatactaacaagcggaggttacattagaacttgtggatgttcatgttacatgtagtgtatatatgttgcatacatgtatatttggaattataaaatgggggcatatgagttgcagcgggactaaaggaagtctccatgacatatggaagtgatggtgaagaggagccaaggaaaacattctctcaagtagggtatatgttagataaggaacgcaagaagtcttcagatgtagatgaaggtacaatatttgagagtgcattatgtgttctgtgttttctctatgttgttgacatatttggaaaaactacataaattatttctacatggaccatgaactgtaggggaactcggaatagtctgggtgtcatatggcccaaaagtgaaactacacaattagttccccacagaacataagaaataaatatacataaacgaagatgatattatttggaactaaaggagattagtgtaatgtattgcatgtctcatataaatgtctattgaaaataaaaacaaatgagccttacgagctgcagatggactaaaggaagtctcggt

SEQ ID NO: 16707 - DNA, 5440 bp, Oryza sativa
  unsure (1)..(5440): unsure at all n locations
ccgctctttganaatcgatattcgagctcggtacccatcggcgtcaactatagaggaactcaaagaagtttcagtgtcatatggccatgaagtaaaactaagcaatttgttccctacgagattcggacataagaattatcaacacacattcgaaggtgagaatatttggaaatagcaagtttgtctgttatactttcatataacttatgaatgcgtctagaaaagcaattagggtattcatactgtaagttgttttcctttgaaccttttgtgtttcccttaaaattgtctaagcacgtacattttgatagagcgatgctattacatatctcggttaccaagagacactaaattttatgttaaaaatatatttgtcacctctcaccatcatccaggactgtaaaatttctcattttgatgactttcttaatcttgtatagcctatcgatatatgcatcggcatatatatatatatatatatatatatatatatatatatatatatatatatatatatatatatatatatatatatgtatatatatatatatatatatatatatatatatgtatatatatatgtatgtatatatgtatatatatgtatatatacatatatatatagatacctatatatacatttatttatatatatatgtatatatatatatgtatatatatatatatacatatatatatatagatatgatatatatatatatatacatatatatatatatatatatatgatatatatatatatacatatatatatatatacatatatatatgtatatacatatatgtgtatatatttatataacacaagaaaaaaaaaatatatatatatatgtatatgtatatgtatatatatatacatatatacatatatatatatatatacatatatacatatatacatatatacatatatatatacatatatacatatatatatacatatatatatatatatatacatatatatacatatatatatacatatatatacatacatacatacatagatacatatatacatatatatatagatacatatacacatatatagatacatatatatatatatatacatatatatacatatacatatatatatacatatatatatatatatatacatatacatatacatatacatatacatatacatatacatatacatatatatatacatacatatacatatacatatatatacatatacatatacatatacatatacatatatatatatacatatatatatatatatacatatatacatatatatatatacatatatacatatatatatatatatatatatatatatatatatatatatatatatatattcaaacaaatgcgagattattcgggactaaaagatgttagtgtattgtattctatgtaagacatagatgtctactgaaaataaaaataaatgggccatacgagttgcagagggactaaaggaagtctcggtgtcatatggaccagaagatgaagataagaaaagcaaagtattccctgcaaaaaattggtcaaacaatgaatacgaaaagtatttacacaaaagcgaaggtcagaatatttggaactaagatgtatgttgtaatacgttggatatcttatatatatgtctactgaaaacaaaaggaaatgggtcatattagctacagagggattgaaggaagtctctgtgtcatacggaagtgaaggtaaagaggagccgaggaaagcattccccatgggacaatatatgttagacaaggaacgagaaatgacttcacacacagataaaggttagaacatttgcatttggtatattgcattttcatatatgtcattgaaatatatagagaactaaataaattgtttctatatgggccttgaactagagacaatctcaaagaagtccgcgtatcatatggcccaaaaatgaaactaagcaatttgttccctactgggtatgaacacaacatgtagtatataatacatatacacgcaacagaagctgaggatatttggaactgtagggcactagtgtaatatatttcatgtatttcttatatacatgtatattgatttttttttaaaaaatggccttatgagttgcagatggtctaagggaagtttcggtgtcatatggaagtaaaggtgaagtggtgactcggaaagcatttcccatggaacgatacgtgctagacaaagaacctaaaaggaatctgcacagaaacaaaggtcagaatatttttaagtacagttgatgtattgtattttcatatatcatattgacatatgcagaaaactaaataatttttttctaaatgggcaaccaactttagatgaacttagagaagtctcggtgttgtatggctcaaaagggaagctaaaaaatttgttccccactgggtatggacataagaaacataagcatgcaaatgaaggtgagaatatttgaaattagcggatattggtgtaatatatttggtctatatcttatatacacatgtttattgaaaatttcaaaaatgggatgaatgagctacagcagatctaaaggaggtctcagtgtcgtatggaagtaacgatgaagagaagccaaggaaagcattccttagaggagggctttttttaggcaatgaatatgaaaagtctgtacacatagacaaaggtgagaatatttggaagaacatttggcgtattgtattttcgtaaaagttgttgacatatatagataatataaaaatattttctgtattgcccgtaaattgtagaggacctcaaagaagtctcagtgtcatatggctcaaatgtgaaactaagcaatttgttcccaacagggtatgcacatcagaaatatatattaacaagcggaggtaacattagaactagtggatgctcatgttacgtatattgtgtgtatatgttatatacatgtatatttgaaattataaaatgggccatatgagttgcagctggactaaaggaagtctccgtgacatatggaagtgatggtgaagaggagccaaggaaaacattctctaaagtagggtatatgttagataaggaatgcaagaagtcttcagatgtagacgaaggtacaatattttggagtgcattatgtattttgtatttttctctaggttgttgacatattcggaaaaactaaataaattgtttctacatggaccatgaactgtagaggaactcagagaagtctcagtctcatatggcccaaaattgaaactaaacaattagttccccacagaacataagaaatatatatacacaaacgaagataagattatttcgaactaaaggatgttagtgtaatgtattgtatgtctcatataaatgtatattgtaaataaaataaattggccatatgggctgtagggggactaaaggaagtctcggtgtcatatggaagtaatggtgaagaggagaccagcaaaaccactcctatgggaggatacatggtagatatgaaaaacgaaaagtctctgcaagcagagaaaggtgagaacaggatgtgtgcacaattcatgaattaatatattgttgacataatatagaaaactaaatgaattgtttctacatggactgccaactgtagaggaactcaaagaagtttcagtgtcatacggttcagatgtaaaactaggcaatttgttccccatagaacacaagaaatatgtatacagaaatgaaagtgagattattttgaaactaaaggagatgttagtgcaatgtattgtatgtcttatataaatgtctattgaaaataaaaataaatgagccatacgagctgcagatggactaaaggaagtctcggtgtcatatggaagtaatggtgaagaggatacaagcaaaacctttgctatgggaggatacatggttgataacgaacgtgaaatgtctctacaaggacagaaaggtgagaatagaaagtatactcacaattcatgaattgtagttttgtatacattgttgacataatatagaaaaccaaataacctgtttctacatgcatgagctaccaactttagaggaactcaatgacatttcattgtcacatggtccagatgtaaaactaaacattttgttttccacataacacaagaaatatatatatgcaaacaaatgtgagattatctgggactaaaagatgttagtgtaatgtattctatgtaagacatagatgtctactgaaaataaaaataaatgggccatacaagttgcattgggactaaaagaagtctcggtgtcatatggaagtaatgatgaagaggagacaagaaaaatcattcctatgaaaggatacatggaagacagggaacacgaaaagtccctacaagcggagaaaggtgagaataggaagtatgcataaaattgaattgataagtatattgttgatataatacagaaaactaaataaattgtctctacatcggcgtcaactatagaggaactcaaagaagtttcagtgtcatatggccatgaagtaaaactaagcaatttgttccctacgagattcggacataagaattatcaacacacattcgaaggtgagaatatttggaaatagcaagtttgtctgttatactttcatataacttatgaatgcgtctagaaaagcaattagggtattcatactgtaagttgttttcctttgaaccttttgtgtttcccttaaaattgtctaagcacgtacattttgatagagcgatgctattacatatctcggttaccaagagacactaaattttatgttaaaaatatatttgtcacctctcaccatcatccaggactgtaaaatttctcattttgatgactttcttaatcttgtatagcctatcgatatatgcatcggcatatatatatatatatatatatatatatagttcactatgcttgtaactcaaagatacaaagtggataattgtaataataataaaataaacatggttcaccaatctagaaatttcaaccattggcggatcttaatatatactctttccttgtcaaaatatatatctatctttgtatttcaaatttttacctcttaaccacttaagaaatgcatttccttaagatcttattcggtttagaggggattaaagaggattggaggggattgaggaggaataattccacaccacaatatgtgtggaataaatctcccccaatccgtccctcacagggattaaccaatcaaggcctaagggagctaccaaaatttatctcacaagttatactttcaattctttttcaaactctctgagacatatacatacatgtgtgaaacattaattttctttttttttctttcttttctatatggtatataaggatagaatgatattttattcataccgnttgtcgctgcatgcgaggatgacttggcatgctcacgtagcacctttttggg

SEQ ID NO: 16708 - DNA, 667 bp, Oryza sativa
  unsure (1)..(667): unsure at all n locations
atccgtagtcaatgtttgcggaatactgaatcaatggataatatgcttcaaaataaagtcaattacctccgtatgagtcatgttcttgagcggcacggctttggcccacttggtgaagtaatccgtagcaactagcacgaacctatgcccctttgatgacgaaggataaatttgaccaatgaaatccaaaacccaacctcggaacggacatggtttgatgataggattcaacacggcggcgagcgccaactgaacattgccgaaccattgacaagcttcgcatcccctatagtattagaaacaatcttcaatcatcctcgaccaatagaaccccgctctcctaagcaaccaattcatcttgtgggccgattgatgagttccacaaattccttcatgcacttctcccatagccactttagattgatcttcatctaaacacttcaataagacttcatcaagcaatgtgtatttgaacgcctctgggcgaattttccgattaaccttacgtgtaggatcggtcatatatctaatcaaaagaattctccaatcttnctcttgttcctgggcataaatgtccgaatttacaattaattcggcctttgaatcaattacagcgtgcccccagcgctctgtccaagaccagtcagaccggccgtgcaaggcttgt

SEQ ID NO: 16709 - DNA, 24758 bp, Oryza sativa
ttcaacgtgatctaacgtacgcacacaaagaaacgaccaaataagcctataataaaaatactacaaataaatggtaaaataaatattgtgaatcagagcccgaacaaaaaaaaatgataaattgagagttaacttaatttggaatggcaaacgatttatcctagggttatgatttatggcatgtgtaatagtggttgcaatttgagagtaacgctatagacaacaaaggtgaaaactgaaattgatttggtgttttagagcttgaacaggaggaaaacaacctaatagaagtgtttggactggttttattgtggttgggcactatttaggtggttttgatggggttggttgggttcaaccaataggaaatagtgctggccggcactgtttatcttcttcccgtggcttttctcgtgattaacagaagtggagagaaaggctccagaacttaagtgagggaacggcgacggagacgatagcatgatgtgttccacaggctgacacccccacaggacgtggacgctgggctggaagacaacaaagctagccggaacgcaagttctagatctgcagctatggtgacatcgggcatggaagtggcagccccggtggcgaacgcgggcgggtgagcgcgtcaaaacatgttcccggatgagaaggttccatttttgtggttagttgatagaggtgaagcgtcggccatgccgaccacggtggcagccatggtgacggacaggagcacgatgggagctcgacacaagcaaggaaagaaggttggggaaaattctcaccagtgagaggtgatcctgctggtgctatggggaggaggcagaaaagtcgacgacggcgaaacgggtgcacagccggccttggccctggcaggagaaattttgggatgaaaacgtacgagattagcacttgatgtctacagaggaatagcagacttcggctcgttcactttgaaggagagaaggactggaggaggagggaaaacaaaggagggatggctacgagcagctgcgtggctgtttcggagccgcacggcacgacggccattggagatcggcgcgtggttggcgcgaggcggcacgaggctgcacaaggcggtcatgagttgggctcagggtggcacaaggagcagcgtaggcaggtgcaaggcggcacgcagctagcgcgtgcggacacgagcaggacacagggcggcacgagcggcggctagagcgaacgaagcgagcagcggcttggctggggtggctgcctcggctgggccaggacatgagctagaacagcccaacacagagagtgacaagggaaaaagaaatccgggatatgggctggaatgcaaggaactcggcccgagaaaaaacacagtgatctatttgaatttttggagagatttttgcatagaattttggtaggatattttttaataggaattgatgggatttggggtcttagaatatttgcatgatgactctgggataacttaaaataaacacgagctcttctgatgattttgggaattttctttgggatatctcggattttgtttggagagggaaactaaacaaggttatgtgggagtaggaaacttagagcgaacaaaagaaatataaggattgggagactccaattcgaaagaacgaagaacatcgactttaaatattttcgcaaaaattttaccctgaaaaatctagtatgttacagtatgtgatacaatcatctctatgattgtctctagggcatatcactaacactatgagccgcccacatatatgagtcccatcctatccaccgagttgatcaagcaagaacagacttgcgcctcttgttcttgcccgatcagctaaagaaggtgtggttttgctccttttttttttaaagattgaagcctgcaaggtaaatattcattatttctcactccattcctctcttactttatgatttgaattaccatgtgctatgtatgcatgtaaaattatgtgttgtttttagagataattcttatcttttttggtgcccattaatctcattagatctattctcggatgacatgctaaatttgaattaatgttttcttccatatgtaggatcgaattactagaactaagccaaccagagaggagtgaatggttggtgtacccaaaaaatcaaactttttacggaattaaaagttaccctcaaatcgatgtagatcggtctgaccgcgcctgtgctgccggtctgaccgatctggatcacccggtccaaccgcctgaaatcgcctctgcctcttgacgctgccgccggtctgatcggtgtgtacccgccggtctgaccgccgtgatgccgtcggtctgaccaccggtgtttcgtcggttagaccgccgaacctgagcaaacacaaatcgaagatctctcaaagtagatgacaactttattacttctctctgtgtttacaaagtgcaacaaccacactccttatgaaaatctcaactaaactcgaaaccctaactcaactatcaactcaatgctctcaaaagcgatactgggaggccacgccctccctctctatttatacatgaggtagacagtctaaaactacgaacccaactcatacaagaccacactttacataaccaattgtaccaaatttggactccttccaaattcgacttcgtatcccatacgcacacaatatctccatcgtatgccatatggaaccttcaccaaccatttgcattgaaccctagcctaagtataccgcatgatatctgatcatcacggacgtcgccttatccccaagtcgactcccgatccataaccggcaatactctcccgaggcatcaagtcacctacatatgaatcaaacaaagaaaccatattccgagaccaagctatctccaacttgactcattgttagcaaacaacagtattacatacatatagtatctatctagaagccataaacatgaaacaatcatggatatccaaacaaacaacccgaaaccgaaaccgacatagagtcggctagtcagactgcgggctggccggtctgacagctcgatatatgccagtctgaccgctcggtatatgctggtctgaccggcagcacttacccgatctgaccggtcccgacaaagcagtagtccctgttcaccgtctagaaatccatcatctccaaaaccacttcgccaataatctccaaatatcaaaaccaataatcacagatgccaattgttcatcacaaaataataatcaaacacactttgattttacgccatatctatgctatcaccgttagtcaattgttagtcaatctccgttaaggacaagaaattgtttgtcttttcgttatcccatatcccgtaagtggtaacctcaaaatattttttttctagcatatgtggcatgagtaatagcataacaaaattgcagagaatccctgtgtggtggagatggtactattgggcaaacccagttgcctggagcctctagcgtctgacttacatcgcagttaggggatcgggatggcatgctggacaccggcgaacccataagggcattccttctgcggtactttggtttcgagatgggcttcttgaagcttgccgccatggctgttcttggcttcaatctcctctttgctctcatattcgtagtgtccatgaaagtgctcaactttcagaatagatgaacatcattgaccatctcccctctttcatgtacttcctgggcatgttagccctaaaatctaagctccaataaaaagaagaaacaatcttcttgtcttgaacgagagctagtctatcttttcaggccaacttgtgttgcaaagatacttgctttacttgcacaacatttcggattgattcagtgttccaggacgcatcagattatggaatacatcaacacttgcagcatccacgaaaacgtacacaaacagttggtgatacttaataaaaatgggagaaattaacatccaaggctccaagccattgaattcggaaatcctaattggcgatcgatcgtctgggacgggggtagcgatcaattcccctcccccctccctcactccactggtttccttttttggtaccgcattacttttctattttagtaaatttatgcacctcaagtttatacacctcaagtttacacatctaaagtttagagacccaaagtttacacatctaaagtttagagaccaaaagtttatatatccgattcaaatttgaatttgaattcaaaattttttatatatagtatttctatacatctaaagtttatagaccaaaattttatagacccaaagtttataagtcaaaagtttacatacccgattcaaatttgaatttgaattatatctgatttaaatttgaatttgaattcaaatattttctatatatagtatttttatgcatctaaagtttatagacctaaagtttataagtcaaaagtttacatacccgattcaaatttaaatttgaattatatccgattcaatttgaatttaaattcaaatattttctatatataatatttctatacatctaaagtttatacacctaaagtttatagacccaaagtttataagtgaaaagtttacatacccgattcaaatttaaatttgagttcaaatttgaatttgaattcaaattttttatatatagtatttctatacataaatttttctaactttttgtttttttaaaaaaaattatgtggtgtactgtagtaggaagagaagaaggggaggagaaaggggggagagaagggaggaatgtatcgagtatagggggaggggggcggatatgatcgctggatcgatcgcccgcccattagggcccccccactgaattagatcaagggaagggtttctttgcatcctgtttggcgatggcccaatgtgaagccaggaacaagcccaacatctggtgggcgttggccttcggagaatgattcggttttctgggctgcatctaaactttgaagagttttttttccccttcttttgttcaccttgagattcgttttgaaacatattacaatcgcagtcgcttacaatgcgcgcacactcaccactataaaggcacatatgcacaccctacgcctatgacgcagtcgctcataacgcgcgcacactcacctatataaaggcacacatgcacaccttatccctatgagcacctccggaagactgagccggcatatattgagattaacgaagtcaccataggtatctcactgtcgacgtgtatgtcacttactactaaaagaataaatagccataaatgcgagcacctatatcaagtttaaaacttgaaccagttgaactatactctgaaaagctagctattgagactttttttaaggggaaacattacttaaggaaagttgtttttctcatcttctagatttagggttatcttctaaaatctgtaggtagtaattgtaaaaaaaactagagattttacagaaactacatgtgttataggattcctcaaaaggggttcaatttctaattattttttttctttgcgaagaaaagggttacaagatttagggtgagtttgaggagaaggagattgggaaaatatgcaaaacgaggtgagccattagcgtattattaattgagtattaactattttaaatttcaaaaatggattaatatgatttttttaaacaacttccttatagaaaatttttgcaaaaaaacgcaccgtttgttagtttgggaagcgtgcacgcggaaaacgagttgttttctcaccctatctcacatgaactaacacagccttacagctcttgcttatcccttcctaagcattctccccttgtctaaataaaaggattttttttatatggcagtagattataatttggtagtgcaacaacttacaatttcggtacagtttagtcgtaaaggtctgacggctcatgtttattttggcggttgaaaaaccatggccgaataatgccagtgaagaatcaagcataaatcatggcctcatgggtgcaacaactatccagccttcttgtgttgtgagacagatttttgcatcatacagttaggtgttcagccaacctaactttgagagctcgattgaatgtgtgctttttctataacatagtatgattcttctgtcctctaaaggaacatccgttcttttcccttttatttttttttgaataaactgtattttgttgtacggcacacggggtacacagatgcacctaacagtctatctatcaatcaactatggctggttattatacatacatggtgtgcttagctagagcaacctaatataaccaccgccgtccaaggttagatcgccaaattaagtgacggaattccacaaaacagaccaagcgtacgtataatccgtactccctctctcgatcggtcataaaaacatgtactccctctgtttttcaagccattcatattagaattagaattttgaccaccgattagatcattagactaaacttaacaaaagatttactattatatctaagtacatggtacactttagtaacataaaattattttaagtatttttaaatattttttaaaaagataaatagtcaaattttgaaaatgaatagtatccgttgtcatttatttaaatatgaagggagcatcttttcagcattgacgggtatccagaatataattttgaccattgatttctacacaataaatacttacaaaatctgacataataatattatgaaagtacaaatttgaacacataagtttcacacgcccagtctaaatatttgaaaagatatattcggcacactatgtatgttttttttatgttctaacatagttggatctaggggtgatcatgggaaaaaatattaacccaatttatatatatatgcatatataaaaatacttttgaaaaaaaaaacaaaactcttttattgatatattttttgcggggtcttttattgatatattatgatgcatatttcatcaattcatacttctaactttggtatgtttagggtatttaataaaattatataaatttgatcaactatataaaaatatatgatacattgcgttttaaacgagttctttgcccagtttgctactagtaccatgagctaagatacaacaagtaaaagtctttcgcgtggcgcgtgactcctgtgtcgtgagaaagtcgtcatggcatcttgctctgtctgtccgtagtgaatctccccgtctttacgctcggatcgatcggtttccgttttctctggcccatgccaacgcacccagcagtcgtactgtcggctgaaaaatagcaattttccatgttgaccaacttgtcgactataaaaatatttggtcattctggcaaggagatgctctcccctacccaccggttcatattcataacctgctttttctttagagtattttgttttttacatgcttttgtgatagattatggttatgtttagctcacactgaaatttggaagtttggttgaaattggaacgtgtgactgaaaagttatgtgtatgaaaggtttgatgtaatggtaagttggaagtagaaaaaaactttgaaactaaacaggcctatatatgggtgaagtttgtaggtgacctagctaggcagctagctatattttgcttctgagctttgtttggggtcatataatgtctaaacgtcaagtactacctgagtcttaaatatttgatgttggtaacgtcaaataaaaagtagagggagtatattagcgataggaaatttggtttataagtgaagaaggtcctgtgtcccagatttaaataaaagatatgtgtctttccaagaaaaagaccagaagttaaaactttacaaaagtggtataaatggatttgtatttaaaagtattttctatgatattaattccatagtcgttgataatatattacgaaagaaattcatatcatcaggattttttgcactaccgctatgtcggtgacatgggaccgggagtatcatgactagaggcttgggcaggagcaatcacccacgaggtctgaccccctcgggggggtcgggtccgagggtgatgtggccgcccccctctttgtctccccgaggggtcggaccgctcccgtttcggccccgagggctgaggcgccccgacctcttgggggttttgcgccgcgtgtctgggttaggcaagcgcagcggggctcacctaaccgcatttattgcggtttggtcaagcgcgtcacgccgcatgtaacgcagtgcagcgcgctcgtttatccggtctgtgaccagtcacagaccgatcagatcgtggattaggtggcgacaggcggtctgacacacgccttgccccatcccgtcaagatgagagcctccaagcactcgtccctagccggagccggcgtgttacctcctggagatggcacgttggtcccggtcagatatatgccaggcttcatcctaaccattacaagcaagatattgtatgaagaagggcaaacatgcagattgttaaactgacacgtggtggacaagaatgaccgatttgtaaccggactgactatggtcatgtcatcagcagacagccatgttcccacgtcgcgcctgcttccggcggaagtggaggtaggtatgggccgtcccatcagaaggtcattcggacggcagccatacaaatctccgtccattaatgaagagaagtcaagttggagggaagggaggatgagtcccgacacaaaagaaagagagggagagatggtgcatgtggtatccccttgagatataaaaggaggaccttgcccacttagaaaagggggaaaaaacgatcccagaacgatcaggggctggcaggcactttgtagcttcttcatacacagatccaccaaaacacaggagtagggtattacgcttctcagcggcccgaacctgtatacatcgcccgtgtcttgtgctttttccattctcgcgaaccttccacacacagaccaggagtttagaacctcacccagggcccccggccgaaccggcaaaggggggcctgcgcggtctcccggtgaggagccccaagctccgtcagttgtttttttcaattttgctatatatttgtcgaaaaattttctcctaaaaatttgacaaatgtaaattacaatacaatcgtagtataattacactgtaacttatataacttttacataattttaaaccgttagatttgtttcaagatttatgcaagtgaagaaggaaaaaagtcataacacgcacacatgtgagaggattcgttcccacgacctccgtttcaccaagatagcatgttacgtagagattttaaaagttacattgtaattacatgcaagttacagtgtaattacatggtgattatattataattacatctgtcaaatttttgattgaaaatttatcgataaatatataggtaatcattttttttggaatttatgatgcaataggtagaggagaagggaaggagcatgcccgatcgctctcggtgatcacccacccattagccctccccgaacaaatcaagtgcctgccagttgggaacaaatcaagtgcaaactcttcattattcataaaaaaatcattaagagaacactacttgtcaatacattgatttcttgtgttgctatcacaagacaattatttttttatacaagatcaaaatacactcatatatattatgatgaaaactacgtgttgatgaatttttgcaaacgtatatagtaatagtattcttatctcacaaccacaaactagtcgataagagatccatgcatgcatatgtacgacagtacaagaccagcctcgacgttcgtgcgtccggccgatcagcaagcgccgacgcggaagccgaagacgcccccgccgacgtcgtacaggacctcgaacgtgcgctgctgcacgttgccgatggtgccgaaggccttgtcgtcgcgggtgggcgcgaacgcgaggcagccgccggacaccatgccgtgcgcgtcgaggtcgacgacggcgccgccggcgaacaccagcgcgacggtcggtatgctgaccttgtccaggccggtgaagttgaagcacgtgtcgagaatgcccaggggctccgccctcgcgtaccgcgtcatcccggctcggaacgccgacgacagcgccgcgtacgccgccggcggcagccgcgtgatcaccgtgccggagtccaccagcgacccggcggcgaacaccgacggcgacagcccgagcttcttcccgcccacggcgatgtcctccagggccgcgaagtagtacgtcgggaccttcttgctcctgagcatcggcgtcgtcgcgaaccgcgacgcgccgccgccgccgccgctcgccggcgcgcccagcgtgaggaaccccgacgaggccggcgtcgccgggaggcagtagaagaaggacttgccgtacctcgccgccgtctgcgacaccggcgactgcgcgtcgccgccgaggccgatgaagccgtcggtcttgtcgtccatgccggcgcccagcttggcgtggctgcacccgaactggaagcccctgacgacgtcgaagccggacagcgtcagcacgtcggagctgtacgtcccggttgtgttcgagccgtcgccgtacttgacgatgtactggcaccgcgacttggcgtcgcagccgttggcctcgccgctgtcgccgagctgcgcgcacgcggcggcgctgcagttgaacgccgcgtacgtgctcgacgcggccgggtcgaacagcgcgccggcgtgggcgtggcacggcgacggggcggggcacggctcgcactgcacccacgacacgtcgctgccggtgtcgatgaccaccctctgcgtcaccgccggcgagccgagcccgacggagatgacgtactccagcgtgtccagggaggagcccagcgtggtcggcacggacaccttggacgactggccgtcctcgccggcggccgtgccgttgctgccggagaacttgcgtcggatgtagtcagctcggagctggtcacggcggagcagctcctcgtcggttggcctcttctcgccggagttgggatccgccggcgagcatgggccgtaccggtggctcaacgtcaccgagctcgttccatctgaggatgacggaatggtcgctgcaaaaattaaatttcatttcttaggaaatttgaactttcacaagaagtatattaaaactttcactgcatgcaaagtatattaaactttcactgcatgcatgaaattttagttgcagaaagatacgagagatttttatggacagttcactaccattgggctcagagcagacggccctactaggattaaggtcaagaaccttgtaactctattcatttcctgcacgagcaacgaaagaatggtaactgcacaagaggagcagcaacacaagcgaaacagaagtcattgctgttcctttgcttcgtcctaggtagctaaggctatgggcaaacctgagctagatagatgcagcttcaaaaccctaccttctctatatataagaatcggagatcgattttcatcctccgatgggacatcctctcgtttctttcatttcatctaaatagttataaaaaaataaaaaaactgataacatagattaaatatgatatatatcacttcatagacgtcaaattcgacttttaaaagttgtaaaaaaactgaaactagttaacatacaatcatagttgtatttattgtttttgttacaatatgtaaaagtcgaattttaaactcgcatatctatggagtgatacatgccatattaatctaaattatcatttttaaaaaaaaaagtataactatttaggtgataaagagatattttcttgagggatgaaaacaccttctcataagaaactatcttaatcacagcccattcagttcagctgatatgctaacaggttccactagccaataaatattatagattataaagttaataaatagtaaaaaaactatggaccaagtatagggtggcacgaattagaaagtggattgtttctgtccttcgagggacatcctcttgttttcttgttttatgcatggtatttaaaaaatcataaatttttgttaaaaaaagttaaaataaaaaacatacaagttgaaattcaacttatacaaatttgactgtgattacgcgttctatccatagtcaaatttattttttttcaatttgtataagttgaatctaaacatgtatgtttgtgatgaagcgatatatcacatatttatctattttactatttttttaaaaaaatgatgatttttagactacatgtaaaaacaggggacattcttaaatgaatagagtttccccacgaattatccatatgcatctccattaactctaaaaaagacagaccccttgaccgagactcatagttgacccagtaaatcaaagttcttgcattttaaaactagatttaatttgttgaaagccatagcaaagaaatgcaacctaggcaagatcatcgcaagtacgtcatgcatgtatagcaaattaaatggcgacgcgcaaccgttagtatgagaaaaatcattgctgtcacctgtcacagcattctctgttcattttataaacttctttaaccacagaaatattaacatcccaaaaaatcagtaaagctatttaagttagcaagcaaaatatcccaaaatgagaagtttggattttgaacacaatatatagcaattagaaaaaaagatcataatacgagcaagaaagaaaataaaaaactaaataaaaaatataaatatcagtaacatttttcctgttctaggtattcaaaattctatctcgatctaaattaaattttattaatggagaactttttggatcacatttgatattttttatgcaacatttaataagttcatggataaagaaaggcaaatcttttttttttaagaaacgactcgcacccgatggtgcaaaattttatattgatatagcatgaaagatacaacattataacctttggaggttaaccgggaaaaaaaacaaaaacaaacacaccagcaccgcacgctggcagctcctcacacaacccaaaagaaggcgctagcaccaagccgaccgccatatgcgtgcgatcactgctaaactttaaggggggttgcaaatatttcccacataccgactctgtacagaagatagtcgaagtttatggttatcatcatgtagaggtgttgaagagagggagagggcgagagagaagaaaatacacatactcatccctcctgacaacatgatgatgacaatcaagaaccgccaacaatcaaaccgagagaaggcggcaaaggcagggaacaagacctcctaagcaacgtcttcaaggaggtcatgacatcctaggtgccaccgttgtccatccaactagactggtttttccagccgatgagatttgcaagtaggaggaagggtagctgcttgacaacggcccaaaaggggtcacggcgcccgaacacgttgtcattgctggctcgggaaatccaccctctcccacaccttcgatgccaccccagaactcctccgcccaacaatctctatcggccggcagctccaccacacccggtgccactgggccaccttcacgaccgacgctgcattccgtagtggcgtagagtcgttacccacgttgaccactatctcggccagcactgcgagtagccgttcctgccctctgcaacagccgcagccttctctgtccatgtcgacctcaccttcaccaaatgcctgctataggctcgtatcgggcttcttgccctttggccctggtcatggtggtctcctcccgtcgtcgcccacgtgggcctcctatcgccgcaagccatcatagcctcccgctatcattgctcgtgctgacctccttgccactaacccccgtggcatcttgttgctgctgcttcgttgcactggctgctccggccagatccggcacaagggccaacgaatacacacacgggccgaccagacctagctgtggtagagccggatccgtagtctccacgtcgtcttccctatgctccacgcaccaagccactttcctcgcgctgaaggcgaggcaccaccatggtttagtcccgccgccgccatcccggttgaccactcaattctccggtggcgagaagaggaaaaaaaggggagatggggcagcgagcgctagggttcaaccccctaggtaactctcatgtgcggaagaagggcaaaccaattatttgtatcatttttctctaacttgaatggatgctttgcatatggattgaaaaactatcgatcggtgagatggtacttttcagatttatgtgttcattcccgcaaaaaaaaagatttatgtgttcatttgcaatatcatttggctatgagagaattttcaattgtgtttttctaatacctaagtggctaagtcatgcttatatgcgatgggatttatcaaatttcctcttaaaattactccctcagcaggacaatatagtatgcattttgatatagaaatgtcaaactttttagaatttgatcgagtagtcaaattatagaatatttagtatataaaaattattctaatatttatattttaaggtgattttgcaaataatagagagctatgaaaagatatatagaatgagcccaatgcaaacaaggctcgaaagaaccgaatgaaatacatatatattttacgaggaatgcatggtcaaagttgactaaatgacttaaaaattaaagtaaatgtacgaaagggataagatcttgttaaattcatctggtgcgatgctgccgtcatcagggcaggaagtgatacatgaattgaatcgtacgtccttgaatcttatatactccctacgtactctaccatttaaatgcaatcacaggtttttttacaatatttaaccatccatcttatttgtaattttattattattattattattattattattattattattattattattattattattattattattattattatataatacatgactagtactttatgcatgattttttaaaatttttttataaattttttaaataagacgaatgggcagagggagtagataacgtgattggtttacattgaccggtgttctaccgctgttagcctgttttgattttgatcaccaacaaattttaagagagaatctattctatacaattgagtttgttcgagttcaataatttgtcattaacattttcactttctataatatatttttgactttatcaattattctacaataagtcattgggcctggggccttcttttcaaaaataccaaaaatacccttatggacatacaaggttaacaattaatttatctcattagaagtttaaaaaatatatgaaaactttcatgtgacctccttacataacatggaaatttgtatagaatttctttcttttttacatttttattttttaaaaaatataacttatctgttgtatgctatataaaataattttttattgttgtttttagtataaatcatctttcatacactacataagatattttgtgctattttctcttatataagcaaattctctctcatataccacatgaaaatattttctttctaaaaaataaatataccagaaaacacttgaaacatgtacacaaacttccatgttgtgtaaggaggtcacgtgaaaattttctctcttttttttaaacttttgatgaaataaatcaattgttaatcttgtatgtctcaaagggctcaaaacttagatttagatatgcaaacacgagattccctgtaatctatgacgggctgtccctattgtaggtattctcacgcccaatgacgtattgtagaataattgataaagtcgacagtatattatagaaagagacaatgtcgatgataaattgttaaagccgaataaactcattggtatagaagagattctctcaaatttttaagagagaattactgtttgtgccaggtaaagatgcatagctttatgtgaaaaccttagattggaggtagtccaaagggaaactttgattaaaaaacatgtctcaaactacaatttactcaaatttaaattatgaagttttggccaaagataattgaagatcatatttagatacagcatactttcatagtacagtttattgctaaaatataagtagtcaaacattatatagaaatagagtccagtgacaattgtttaagaaccgaggttgctagatgtagttaatgttatttcttattctcttatcatgcaacaatataccaaatatttataactattggatgattaatatatagtctaataaattgtccttcttctttatttttgcttctgtgacgaaggtaatcacatcgattatttttagccttcatccagagtgtatgtctttcctgctatatatagcttgcaccatctcaattatttctagctttttgggacaattgattaaagttcaacttgtgaagagcacataaatcacgtaatgtaactataaaacaaatccatcttgcaacccataattgcccattgtcaacagtgcatgcaaggttatcatatagtatattttaatagcattggcagtttttatatggtagaggcactggacttttgacgttgtagtactttagattatacatgttttacaaaaatagatcctctagaaaacttgtcgtatttgactacacggagggactttttttttattcaactgtgctaatcttggtatggaagatacataatcttggtatggaagatacatttaatacatgtttctctcaagttatttagggcctgtttagttccaaaaacatcacattaaatttttagatatatgtataaagcattaaatatagatttaaaaaactaattacacagttagaggcgaaatcgcgagacgaatcttttgagtctaattagtccatgattagccacaagtactacagtaacccacatgtgctaatgacggattaattaggctcaaaagatttgtatcgcggtttccaggcgagttatgaaattagtttttttatttgtgtcaaaaacccctttcgttatccggtcaaatgttcgatgtgacgttaaaaattttcttttcgcgaactaaacaggccgatgtgacgttaaaaattttcttttcgcgaactaaacaggccggtatagacctctacctggggatcagctaggtcgtggtcttgcactactacacagaaggttttcccatgtggtcgaacggattttcgcgtgcagagattcgggccgtctggagcaattcgtctgcgaaaattgctatttgtgcgtgcgagcggcacaaccgcacgcgaaaatccgattttcgcgtgcgggtgcttatgtcgcccacacgcacaaataaaaaaataaaaaaaaacaaaattgaaaaaacaaaaccctaaccctagccgtcgccgccttcccatcgccgtcgtcatcccgtagtcgccatcgccttcccgtcgctgtcaccgccttcccgtcgtcgtcgccgtcgccatggccagatccgccgccttcccgtcgtcgtcgccgttgccgtcgccagatctgccgccttcccgtcgtcttcccgtagtcgccgtcgccttcccgtcgccgtcaccgccttcccatcgtcatcgccgtcgtcggaggcccgccgccaccgtcacgccgccggatccgcgcggggggcggccgccgccgccggatccacgcgggggcggacgccgccgccgttgcaccaccggatccgcgcggggggtggccgctgccgccggatccgcgcggggggcggttgccgtcacctacgcccaccacgcgccgtcatcgccgtcgccgtcgccgcgggccaccgccctcgcctacacccgccgccgtcgccgtcggtgcgggccgccgccctcgcctacatccgccacgggaggagaggagagaggagtgaggagaggataggaggggcactgaggagagataggagagagagcactgagagaataaaggagagggatgggaccgaggcatggaaaaaggaaaattttgaagtgggtacgagggaaaggagggatgattacttttgcgttcttaataggcccgcacggaaaaattggtttatttttctgtgcggttcatttaggaggactgcacgggaaaattgatttttccgtgtgggcgacagcctgacaccaggcctctatttttctgtgcggttccacttacgaaccgcatggaaacaaaaggggatcgcgtccagaaaaatcaatcctctagtagtgttggcgctcattgttttggctctgacctctctcacttaagaacaactcctttctttagattaaaataatatattcatttgttttctaagttttagaaaaactgacatatcagtgtatcctaattcatttccgatagtttatttcaaaacacacatattatagtttaaattggacaaaaccacatggtgacacataactctgggtattataatcctaaaatttcacaaaatcacattactgatcattttgactttgatctaacatattttttagttatacaatcagatcttaaatttataaagaatttatccatcatgtaaatgataaatccactttatagaattttgatataggagtatgttaaaataattaatggtgtaatattgtaaatttttagaaacataataccctggattatgtgccatgtatcaaaatccacgtggttttgtataacttgaaccataatagataacattttataaaatttgctcttacttttatttttaaaaactcatttgggaggagaatgtgggtcccccccttcatgctttcagaggtgaaagttgtgaactttacctccccacaagcaaatccattagtgcatgattaattaagctttatctggaataaatctaaaagtattaatatgatttttaaagcaattttcattttatttttgcaacacacatgctgtttaacggtttgggaagtgtgcgcgtgaaaacccgaggaagtagaagttgagaagaggtgaaaatgaacacaactttaagttttattgatttgctttcgtattttctgaaaaaaataggggaattaaattatggcgcatgatttgtaattgttttctcaaattttgatacaggattttggtatgacaaggagggagggaaccatatcctccctaattaagttggatgacggcaaatttttcggagcttctttttctttaggttctatgtttacgtttatgttatatatgcaatggaaccaaatattttctatatttttttacggtttgattaaatgcaccgctggagatagcctaattgtatcgatcaaggatttagattttcgttgaatggaagctcataaattcaatgtgtttggtttaagggcaatacttgataggacttgaccatctatggttttcggatgaacaatccattaagggtttgtttggttgggtggatagaaagggttaatattttgtttggttatattagataaactcgagggtggatagattgagaatagtaaacaattgattaataatgaactactcattaacaataaagtagactataaccaatcgagtatgttatttagtaataataatcttattgtgataataccaatgatgcgaactaaaccaattatcactaatcaaataactaataattaattaaggtcagtgaagatgggtagtacttcgtttggccaattttaccatatgacctcgtccaacagcttcctagaatattcctctagctatcatccacccttattgtcaaaccaaacaggttcaaaacttaaaatggtcatctcctatctaagactgtgtttagcttcacaccaaaattaaaagtttgaagaaaaaagttgaaaatttatgtgcgtaggaaagttttgatgtgataaaaaagttggaaactaaacaagggctcaggataattatttactccgaatgtaccgtacatggtatgaagagggtcaaccttctagttttttctcctctggtgatgcacatgcatcagaaatgctcaaaaaaaattataaaatcatatggaatttttaaaactttgactctgatgtttaatacacttagtttaaaaatgtaaaaatggtgcttgtaaatttgtattgaaaaatactttcaacctcttataaactcctcgtgctttagaagatgataccccaatataaaactggaccaatgtcaatccttcatatccatatcaaaaagtcaaacatcaagtagaatttttaccgaatgaaatgttagtctatatttctttacccaactcttgaagctccggattcttcctttacaaattgcacggaagaacatcgccagagttatttatccaattggaaatatttgtgcaataatatgaacaggtcttggctggtttgaaatgttaaatggagtatatctacactaaccaaacaacgatggcaacacttatacataagtgcatgtttatacgcattgaaaagcttatcctttttgccattttgtgccactagccgcgtttgccagttcaaatggcggttgccagactgtataaagagtatatatagtagtgaaaaatcgagtgacgattgcctgaaataatggccaaatcaaataccggatgcttgtacgcatcatcgatcttaattactactacctccatattttaatatatgacgctgttgtctttttattcaacgtttgaccattcatcttattaaaaaaaattatataattatcatttattttattgtaacttgattcatcatcaaatattctttaagtatgatataaatattttcatatttacataaaaattttaaataaaacgaaggataaaaattgataaaaagtcaacggcgtcataaattaaaatacgaatacggagggagtacgtactatgtcaacttcttgctgagtttggtgatttgtgacattgcaagagaggacttggcgttgcctcgaactttctataaggtcgatcggtcgtcgtcgccatatatactaggcatcggtgcaccatcattcaagagctatcgatctctccttgaaaatataattgatctaccagacatctgtccgtgcaagatcagacgatgacaccaaaaacacgatgtttaattcataacggtgcagccaaagtctatatatatctccgaagcacacatcacgggtgtttctcttcaattagcatcaaccggctaagccggccaatcgtacctattagtgacggcttcgagaggtggtccatatagcccttgaggccttgaaccatccactaccacagaacccctaatacaagtggacactataagtgtcgaaagtggtaaaacaagcacctatagtatcgttcccgcctacccgcctgctcacgccaccccgcctaaaccctgaaaaccaacaccttttttcttcaaatagttgctggtttttaaaaagatctttcacctattacctctgtcagagaaaggtgccgttttgtatataaaatccggcaccttatattccccagcccatcggagtagttggtgcgggacccaccctagaaccggcatctttttggtgaaagagattgattttattttaagaaccgacatttttcacccttcacctcctgaactatagctgttgggggacccaccctgtaaaccggcaccttttgtactgtcaaacataggtgccggttttagtgtgtagggatacgcgtaagctacgatagcataaatcaaaattttctaccgcgtaaaccaggaaccaagcaagtcttagatcatagatcgttaccactcgacgcgctgcgcagtagaagaaagcgctaagaaggcaaaggaaccctcacgatgtagcgcgcgttgatgtagaggaagtagtcgatcgcaccggctcgaccttctcctcctcgtgcgttctcctcgccgtgctcccacgccgatcagcaccgcagagcagcggcgcctctatcggtatccacacgtatagggacagaacgccacgtgcagatgtgctagcacccgcgcgcggctaaggttttgctcggggaggggagcggcggctagggtttctcacgtgatgcaatacctccgccggtcacacccctcacgaatatatacgatccacgactcgggcctccaaggcccgtaggatttatattcggatccctatccgaattaagctcatattggatatccatccattccccttattccagcccattaagtgtgtaaccctataggttcatatacactcgcctgtaacccgaaaactctttttcggtccatgtgtcaatagtggtccctagccgaatgtattgacccaccggacatacataaagatcatatcggctgaacctctagtgtatacttgtatgaacccctttgcctcacgatatcgattaagcttaaggctagatatgtgccatcctctaatagctcattcactcgaacttgtgatagattatatattacttgtgattgactcctcaatcacctttggcatggccatgcactttcataatctataacatcgaggggcctagggatatcttttcataggaggggcaaatcccatcttgatttttcatatcccactacatgtttcatagcatacccgaaaactacttttataactacccaattacagagtagcgtttagcagtctctaagtaagctactacatatgttgggaaccatgataatctcaagtctaaggattcgacaccaacactaaatgagatcactgatgacagaacacatatggctcttgcagtgtctcatgttgggtctatccaacaatatgttccccaacatgtgtccacattattaatttagtatctctataccatgatccatgagacataatcatcaattaatacatgtgctgattatttaaacatatttgttccacatttgatatttgatcagtgatcctttagaaatagtgacatacaacataaagaatctcatgaaagaatcacatattcattaaccaataatgagttatctatttcaaggaacaatatcagataaatatgtaaacatagtatgtgtggggatacccggtttgagtatggtatcccgaaaccacccaaccgtccaggatttcgatcgcgcacagattgatatacagaacaactttcgatacgtatacccaagtttttatagaaattattacataaaagataactaagacaggttttaggggccgacagggcaaacacactccccacaaacagaagacccatacacaaaataggataaaaacaccacaggcaacgcctgagagcagatcgacctagaacaagaactcgtcagcaccatagaattcttccccttcctgcgcctcctcagggaagaaccgatcgtctgaaccacattttatgcaagaggtgagtaccgaggtacccagcaagccacatccataataatacaaatagaatatgtgcaaggcgtacaaagaagaatatagttcatcaaggaggtttcataacaagcctattataaatagttttttactactttgtaaaacatttcatttgcaaacagttgtaaatcattattttaaaatagtagcaatattaatcaccattcatcctcatcttcatcatattccatattttaatttaaaatctactcataccatgataaataggaatcacccaatgacatagcttcttaaccggaagcacggcacattcgaatgatttaagactcatctctgcagagactgcctagctttacccacctgatgtcaacagcgagctaggctgaggacaacatagccgttcgagagtcccacttactactagttactgcccagtgggatattgatccgtcctagcagtcgggcacttgctgggcctaagcaaggctagacggtcgctgctttcatgggttccaccgttgcggatcatgtcaacctggcagaagccccttccacatgtccaccccaaacctgctcatagagccaccctacagtctttcatatagtgggaccatgtactaggctaagtctgattacttggtcctgtggatgggcgcaaattacatcattttccatggcataagggggtagtccttatatccgagggaagccaccaaaactagcacaggcccgtgcatactttaagtgtaaatatacactttcaacaaaataattataacaatatgcacggcctaacacaccacaacatccatcttcatccggaattaatcttccatatcactccaggcgagtgactcatatcaaataacatattttatatcacccgacacgccaccacgtgacaacgggtaaaccatgtatatgagtatagatattttgtggtcttatccactagaatattattgtgaagtatataaatctacacctaggttatcaaaggacgtgatatagcaattcatggatctggccaataataacaatgtaatattgggtaataactaaactaacaagtttattcaaaaataattcatacgcaaaataattttataaatactcaatgcataaaataactaagtggttctctactaggtttcaatatgatcaaagattggaactgtggcttgccttacggaacgtggccttccgaagcttcagcgtagccttctaggtccacttcaattcccgtgagtccggtgggatcttcaacgtgatctaacgtacgcacacaaagaaacgaccaaataagcctataataaaaatactacaaataaatggtaaaataaatattgtgaatcagagcccgaacaaaaaaaaatgataaattgagagttaa

SEQ ID NO: 16710 - DNA, 979 bp, Oryza sativa
tcattgcaaagctcagcccctactaattgtatcttttgtgtgatttttctaatatctagatagtgataatgtatactgcctcccccttcttttcttagggaaattctaaccttttcagcaaataaaggaggtaaaccagaaatatatttttctttccaaaagtcttgattaggttctggtagggtatatagttttgacaagaaagtatctttataccatctaaaatctgacattgttttacattttaaatttatcaattgttctctatttttttcatagatatcatgatagtttccagcaaagtgataaattatgttatagattagagtggctaaggcatcagaaatgttaccggttggattcccattaccatctctatcaggtaatggccttccttgatcatccctcttaactgcgcaaagaatctcctgtctttgagtttcatttaaataattattccaccatccttttaattgaccagaaaacccaatgacaatcatattggcagcttctctttctttgtttccattagctatgcaggcattagcatacataatcatttgatgacataaagtaaagatttgatattcagtaaagccatctaggttccattctacaatttctttgccattgtaataagtcatattttgaatctgaggcatttcctcaaactgtaggtctgcataagttggtcgagggtaataattcctagttgtggaagtaagagtagaaggtttaaaaatcttgttgactatatcatatttctcattatcagaaatctcattgatgtttttatttacttttaaattatttagttttaaggctagctcattgactagttcttcagagattgcgggtccaaaagccttttgttttccaaatttgatgttaggatcaattgttgggacaaacataggactaacagactaaaaactagaagactgagaattagaaggaatatttatttttacctcaggtc

SEQ ID NO: 16711 - DNA, 595 bp, Oryza sativa
cggatggaagtcaagtgacataacagatgctgaatgacccgtgaaagtacggagtgaataacttgtctgcacataatcaaatgattagtcactacatggttttaggttatggaacatcttgcaatcactatcgcaatagttttttttgaattgatatcacaataagctattagcaccctaataggataactttgcaataaaatataggaaaatgtccattttacaaaattgaactcaagaaaaaagtcttgaaatgatcacctcaaactacaacactagacattttctagctcaaacatccaaacagtttgctttacagttgtccggttgggtttgtagttgatggttgattcccaaacttaaaagttcaatgttgtaaagtggagcttttttttttcttaaaaatatatatggtgaaaaggagtatacattgtcagcatcccaaacccgcacggttttgtcaaaggaagatgtagcaagccgtgacatgcttggactaaatcgaacatccgtaatcaatgccgaatgttcttctaatgaagatgtaggctttagagcaggctctgtacaccataaaagaacctgcgcagagtaa

SEQ ID NO: 16712 - DNA, 4854 bp, Oryza sativa
taattattcggtgtgtgatgaacatatatatggatcggtagaaagatgagaaagaaatggtgagggtattgccctctgaccacacttaattaattaccatgtaccacgatgccaaggcttccgaggccgaggaagagcatgaaaatggcgctgcacttcatgttgtgtggtttgcgaagtttgtggtatgtaactatgaactattgtatttgtgtgtgatgactgctgaattggacctttgttttgtgtgctgatggaatgcaatgggtcctaggtaatttatagatgacgaaattgctggcttagtttagaagcttatctttaccaaagggagaaaccccatccataatttgttgggtttgattggatgcttattataaaccccgagagattaattaggagcgtatctttgatttgctaaggatagcaatgtgtaattacgaggattatgactggattggattgcatatccaataggttataatagtatttattattaccttactatactaaaagactagtgcaatatatgggcctgaaaaaaaatcatattaggcctttaaaaatgaataagtccactctaactttctcaattataggaccaatctaattcgtatccctcaaccgtaatactaagggcatgtttagttggtgaaatgaaaattttttggtatcacatcgaacgtttgaccgtatatcggaaggggttttcggacacaaatgaaaaaactaatttcataactcgcctggaaaccgcgagatgaatcttttgggtctaattaagccatcattagcacatgtgggttactgtagcacttatggctaatcatggactaattaggcttaaaagattcatctcgcaatttacatgcaaactgtacaattagtttttctttttatctatatttaatgctctacacatgtgtccaaagattcgatgggatgtttttgcgaaaagtttttagggaacctaacaaggcctaaatatcttgacccttcaactattaaaaccagagtaatttgactttttcgagtacttttagatggttttcactaacgtggctcattgatctggtccagtcagcatgtacttttacatatcttacatatcagtgcccctttctttctcctcccctccccctccctagtgcccatatcgccccacaagcaaggaggtagtcaatgacgaagtgactacgggtagcaatgatgagcaactggcgcgctctccgcgtcggccctgccgtgctaggagtagccgagccaccggcaacgcaccagctggtgagcatcaaggacgctacatacgacgagtcgctcgtgaagggtgcaccacccacccagcgacgtcatcatcgcgtacctacgtacccaggctaagcggcatcagctacgcaaggtgcttgacacagtagaggcgcaatgagatttcaccatggagaaaatgaatcggtagtatgtggggctcaccgtgctgatcgagcaggtgtggataccagcaaagcgacaggtaggcggagtggtgacaacccgcggtgaggttaggggcggctaagacatgtttaaatgggactaaaacttttaagtgcctatcacatcggatgtttgataactaattataaatattaaacgtagactattaataaaacccatccataatcttggactaattcacgagacaaatctactgagcctatttaatccatgattagcctatgtgatgctacagtaaacattctctaattatggactaattaggcttaaaaaatttgtctcacaaattagctttcatttatataattagttttgtaagtagtctatatttattactctaaattagtgtctaaatatagagactaaaattaagtccctagatccaaacaccacctaagcaaggtgcccaggtccttgaggttgccgccaatttgcattgcttcccgcagtaatccttctacgtacgcgaaatctatttcaagagcgctctcagtttaattctatagcgcgacgcatctcagagccgtctaattgtgcacgtcgtcatgatgtccacccacgttggtgtctttttcctttcaaataaagttcacgtgggtgtctttttcctattcaaataaagtttcctctcaaattacttatccgatctacaatccgattataccattgtgttcgttacaattaaatcttaacaacaagatcttacatgattatgttccggtgtaaaagtatttatatttgtaaattacttttattatatacataagttacttttatcatatatatatatatatatatatatatatatatatatatataaaagttacttttagatttgactaaattacttcttagacatataaaagtaaattcaataaaatctaaaagtaatttacatatattctaaaagtaacttaaaatacaacagaagtaactttgtcacgacattagaagtaaattcgttgtaggggataaaatatgactttttagttaattccataatttgtgctgattaatttaatttctagatagagtcatgtttttatctctacaacagatttacttcaaatgacatgtcaaagttaccttcgttttgttctaagttacttctataatatatataaattacttttatacttactgaatttacttttatagtttaagaagtaacttagtgaaatctaaaagtaatttagacatatcataaaagtaatttgtgatttttcatcaaaagataatcatgtgagatcttgttgtaaagatttaattacaacgaacacaacggtataatcggattataaatcggataagtaatttaagagaaatttctctaagaaggaaaaaaatacatagatattgagtgtactagtagctttttttttttaaagaagggtgtctctctctagcactatccagctagcactctcggtgtagttgtgtccttctacataacgctttagagactaatctttcatttgagaatgttgtggcttcaatgtgtaccttcacgacggagatggtaaccataagcccaataactgatatgtaggtcccatatgttgacttagtcgattggattaggtcaatgagcatgttatagaaaccatctaaaaagcagctgaggtagtcaaattacacgggttttaatagtttggggaataaaatacctggtattgtggttgagagatacttcctccgtttcacagtgtaagtcattctagcataaatatagaaaatgctagaatgacttatattgtgaaacggagtaagtaattagattgaacatatattgagggagtaaagtgaatttatttattcccttgaaaaatgtgcttggatgggctggtaacccactagagctactgtgctcaaagggaccacctatacatttatcgacaaattttcttctaaaaatttgacaaatataattatagtacaatcgtagtgtaattacactgtaacttgtatataattacactgtaatttgtatgtaactacagtgtaacttgtatataagtttcacgtaattttgaatcgttagatgtattacaaaatttgttctggtgaggaagaaaaaaaaatcacatcacacacatatgtgaaagaatttgttctcacaacccccctttcccgaaataaatgttatggagagatttttgaaagttacaaaaatgttacatcatagttacagtgtaattatatgcaagttacagtgtaattaccctacgattgtactataattatatctgtcaaattttgggtgaaaaatttatcgacaaatatatagcaaattcggtgctcaaattgggccgtttcacctagaaacttaaaaaggaaaatctcctcggtcagccatatttttttttccaacgactatcgaaatttctatcgggctcgcgatctcgctcgctccgctacctcagtaaggttcttctggttgctttgctgcaatccagattgttgtccttgccatcttgctccctcacaagctcacccgattgatgccacattcctggtctcggatcggcgccgcttccgttccactagaaagcccgcgttgcgtcgatcctctcctccaccactgcaacgaaatttccctactgcaacgtccctcgcctcgatccatagcacattagcaccacctttgctgccacctcgcttgcatatgcctctgttgtcttgctggcattcatatgtgccaggggcattgtcccgactcctgaggccgtgtgtgcttcgaatttgttgccggtttctactgcttggtccatgagtccatctattttaatttttagtctgcaaatttcatgcattattgacactctttcgtcaattgatattgagactttaatcccccaacgctcacaagtataatgctccataatctcttgatttctggataatgtttagtattacccttctcccaaatggtcagtgtagtagggacttttacttcactggtaacttagggtaacagtaaattatcgaatcatgcaaacaggctgtaggggtgaaaacggtcggaatcggtagcatctctttggaaacgatactcgaccagccggtaattgatcatatttatcatttaaactaggaaaaggtatgaattaccccccctaactatcgcggtcgtctgaattaccccctgaaccacaaaaccggacatttttcaccctcaactatacaaaccggatgaattacccccctcaacccaatacccggtaggtttggtccacgtggcgtatgcgtggcagtccagtcagcattatatatatatatgtgtgtgtgtgacccacccgtcatacactcttcctctctctctctcaatcttccccctctctcacggtcatcggcatgcgg

SEQ ID NO: 16713 - DNA, 4463 bp, Oryza sativa
gcgagagagaaatcggagttcatcgtcttcaaccggtacagtgcggatgttctccgccgccgcgctcgcctcgcccgtccccgcagcgctctcctcgcccgtcccagccgcgcccgcctccgcctcccatccccgcgaggtccgcctccgccgtagaccgccggtcgcccgagggagactgggagagagagggatatatatatatatatatatatatatatatatatatatatatatatatatatatatatatatatatatatatatatatatatagcccagggcagtgactaggggtctagtcaccagatatgaggataggaatgcttatctatatgcaatctttgatgtgagattagtatgtgacaattggatggcaatccaggttgttaaattttttttttaatattattatgcaaacataaatgcagtactggaaataaagatgtaaatacaaattatgtacaagatataaaattagatatttagaacataataggtttatatagaacggtccaggtgttcattcatataccttgataggttgaaggtagttccttctgaagattacaccaaggacttggtacaacacgttcgtaattatacaggtacaggactctcacaaagactcttacatagactctcacacttagactctcatgagtcttttatttaggttatactatagtactaacactttgatggagtggagtggagtgtgatggctggtggagcggtgagaggaacggttgagtgagatgtgttgtgtgtggaatgcgatgcctctgagccccttatatagcgctcggtagagaatcttcatgatatctcttcttgacttcaaagagttcatgatatccctttagacttcatggagagaatctttgatgatgacgcttttgaccttcaataaagatgtcataatatcgccttttgaccatagacttatcttatctagaatagtgtagattccttatcttgaatagtgatctttgtcggggatgacaagatctttattcattatcttcgttgattatcatgggtgctgattgcaccgtgtcgatctctgatggctctgttttctgaaaccactgagccaggcttctgtagtaacttttcttggagcattcatttccaaaatccggtttaattatgtgccctgctcccttgaagtattcataactttggttgtagaatttgctgataaaaatccttgtgatcttgttttggaaaaccagctgatattcataatctgtggtgatagcttcttcaatttctgcagcttcagaaaataatctccaattttcatgattagcaattgttgtatatatttcttcctcttcatccgatagtttgctaggaccgtcttcttgaaaattaaattgtctattcatgatatatatataatgaattgctggacgaacaggtggtgtgaattttggtggtattgaggagaagataattctgtatcttccatgtccaagtctcctgcagatatctttcacagcgtttcctaaatcagattgaaggatctgatcgagggttgcatagatggaattcacaagaccatgatctataatggtttggagagatatttcttcatggttgtatgtgggtaggttccggaatctttgaagatttatctcagctttgagaaccaggaatctataggatgggtcagagattgcctgatcatctagccttaagagagggagcatatatatgattactcgtatggctgggtttctttctctcccttctaagagatcaaagaaataatcttggagtccaaggaatattttcatttgtctctccttaaacttgtgccaaacaagatcgaggatgtcttgcccaaagcaggataaggtttgctccgttttgaagcttaatctgggctggagattttcgtatgtagtactcatgggattttggcttttaagtttcttttggcaagaatctttgtaggcacaagatctacatggtgcttttggctgggtccggagtatatattgtggaaggaatgaattgggatgattatgcagtatgtatggtgtttggggaatggtatcatgcctttttgtggatgatgatggtttattatgtggaaaagattgcaataggttattgatatttatgtggaaagcaaccatgctcgaagcaggatctgttgagatcaaaatcttatctgagaataccttggtattcttatctgttgccatagattgttcaacttccatgggaagtttatcttggccatcacgggatttttcctcgcgataatctagtaacatctcctcatgatgagggatatcttgtattttagcccttttttctgttatcttttgatctgagggcacgaaatttttgaaataatatgccaggccatttaaggcatgagctttttcttttttgttttttgtctgccacaagaggtttaataacccttgttgtagctctgttactctgaagttgtgattaaatcgttctccatggcctctgggcagttggggcagtctccatgaactcatattcgtgagccattcagacttctgtgaagccatttccctgcatatatattcaaaatctttagtagcttttaataaatatctatcttcccatgacgtcttacctggcaagtccatagattttggaagatatgatgggaaagaattgtcatgtaaatatattgtattcacaacttgttctctcttggtctgaataagctggtcaagaatctcatctgtgttagacgaaaatcttaggctcacctgtttgtccattatcttaaattgaatatcttcgttcgtgacaaggaaaggacgaataagtgataaaaatggtgttcctaaaataacatcttgcttaagatttttaacgagtaggaaagatgttttaatgcaaacttcagatatgcaaatatagatttcagggatttgatattctactgttaaaagccttccatctgccccacgaattctgtgggcggctttatagaaatatttatgagggataataccttctcgaatgcaactgacatcagcaccagaatcaattaaagtaatatgctggaagtaggatccgtctataaaacgatacataacttctgtgtaccatttttgcttcatatatttttgaatggttccaacaacatgatcatcttcttgaattggttcgtccttttcttccatatggaatccttcttttgattctaacatgtatagacgctttcttatttcttctaaatcttgtttcataattttttggtcttcgaataggctgatcaaatctggttgctcattcttctttttctgttcatctaaccttttaaacacttcatcaatagagaggaatttgctcttttgaatatccttttttagtttatccttatcagttttgactcttgaaaggaatttttcgaggactcttcttttttcttctggatcttgaatggtttcaaaagtatcgagaacaaattcttctaaactggttaaaacgagtatattttcatcagactcttcttctgaattatctggctcacaacaagagcaaccactgtcttggcaacaattaatttctgcatttttttcttcatctgaacttaagtcattgtctatattatttagtattgcttcaagtttttctttaacgtcttctgattctgaatctaacaaggcttggatctcttttttaactttggatttgaaacatctgttagctatgtgtcctttcaagccacatttgtaacaaatggtttctttgctttcagtgtcttgtgttcttatattcttattgtaaattctttttggtttccttttggtagcttgaaagctcatcttgcttttatcatttggttttgtcatgggtttggaatgggtttttctttttctatagacataaggatcttgaaaaccaaactgatagcaaaaatctcccatttctcttttaccaagaatcctttgttttttgagttgatctttgatttttaggtcattgcaaagctcagcccctactaattgtatcttttgtgtgatttttccaatatctagatagtgataatttatactccctcccccttcttttcttagggaatttctaaccttttcagcaaataaaggaggtaaaccagaaatatatttttctttccaaaagtcttgattaggttctggtagggtatatagttttgacaagaaagtatctttataccatctaaaatctgacattgttttacattttaaatttatcaattgttctctatttttttcatagatatcatgatagtttccagcaaagtgataaattatgttatagattagagtggctaaggcatcagaaatgttaccggttggattcccattaccatctctatcaggtaatggccttccttgatcatccctcttaactgggcaaagaatctcctgtctttgagtttcatttaaataattattccaccatccttttaattg

SEQ ID NO: 16714 - DNA, 1479 bp, Oryza sativa
ttagcatacataatcatttgatgacataaagtaaagatttgatattcagtaaagccatctaggttccattctacaatttctttgccattgtaataagtcatattttgaatctgaggcatttcctcaaactgtaggtctgcataagttggtcgagggtaataattcctagttgtggaagtaagagtagaaggtttaaaaatcttgttgactatatcatatttctcattatcagaaatctcattgatgtttttatttacttttaaattatttagttttaaggctagctcattgactagttcttcagagattgcgggtccaaaagccttttgttttccaaatttgatgttaggatcaattgttgggacaaacataggactaacagactgagaactagaagactgagaattagaaggaatatttatttttacctcaggtcttcctgttttgtagccttccataaggattgtctctattcgatctgtttgttgaccaagagaacgtagagatatatttgcataattttgttgttctaccaaatgtcctatgtgttcaacctttgctgtttctccatatgtatttttagaaatactttttagtggacaagcttttcctccattatgagataattgaatggattcaaatggaggatgaacagagtctaccttgtttccactggctgtctcccattctgtagaaaccttcttgataacagttaaatcttctgcttcggatttttgctctttttttatcatgttttttcttttgaagaattcttcgaagtgtataatctggctattctcgtaccagtcaaagaagaaaatatttctcctttgttctctcatttcgttatgccaaacttctcttatcttcattctgaatgattcgtcaacttcttcaaggtatcttttagtcttagctctatttttggggagccttatttctctcctaagcaattctttgtcaatttcaaattcttcttcttctaaagcaataacaaagccaacatcaagctcgataacattgatatcgaagtctgagattgaaggttcgtcggagttgtcttcataggtagcatagacaacattttgaggttttgtcctaggcctagaatctagactgacagaaggtctagactggagaaaggctttttgttttgaagcaaatgttatctcaacatctccgtctagtgtttcaatcaaggattcgacttccgactgatccatagacttaggttcaacagcttgagataaaacccatttctcaggcagggtgatctcatcccatttcagggttttggggatagtatgtctgttattaggattggtttgaaggagagtggttaggccttttggtgtataatgtttggcacaaggtgctaaagttgtcatggctttgtagtaaactctgtgtgtgtgtgtgtgtgtgtgtgtgtgtgtatatatatatatatatatatatatatatatatatatatatata

SEQ ID NO: 16715 - DNA, 7465 bp, Oryza sativa
ttgccacgttggcgccacgtgtgcaagcttaaaccaaaaccacttagaatagtgctcaggggggtaattcgtccgatataaatacttaaaggtgtaaaatgtccggttttgtttttcatggggtaatttagacgaccgcgatagttcggggggtaattactttaaactactcaatgtcaaaattaatacgatatagaaagaaagttagaaaaaacaaaaattataaatagccaaaaaggatacagtcggaaacggtagcccttacacggaaacgatggtagcccttacacggaaacggctatcagtcgatcaggaatttcctaaccgtataatttatacatctctgtgttcgctcacgaggcttagaaaattttacattaatatttaaaccattgattgtggatgttccaaatcgatcataacggtattgattaaacaaaagagcccacataaaaaataatttataaatagccaaattcagactaaaaaatgccaagggagattcacgtaaaacacaatacaaaattaattgaaatttggagtaaaaaataaaataaaacgagcaattcatttccaaaacaaattccacggttataatccacaaatcactaaattcggaatataataaaatagtgagaaaaagaagagaccatattaaagcggccatgttaattctaattcgtgacaaaacataaaataaaattagaacttcaatatcatataaattccaaacttaattaaaccgaaaacacccgggcatgactctacccactaaggttcaaatcttaatgcgcacaaatattacgtatatgcaagttgagcattaacacaattttagtgagatatgtgccactgatttctacattagagcgtgtgttagcggacgcatttgctgtggcggatccaggtatattcggtggggttggctgaccccatagtttgtacaccctacaaaccttttcaggtataaattcaaaatattttgagaaatgatcccacttaaatacaaattactagtaattgatcccacgggattaaattcgcagctccgccaccgcgcatttgtggggatctaagtgtgatgttacgtgtgtgtatgcaagtgtgctatgtaaaagaataaaaataaaaaaaacatgtactcatcaaacatttaaaaaggtgtgcatttccgtatagctaggttttggtgctatgagagcaggtataatagtactgactcagccggcgataagaaccaccacatcagtattatcatacgtggaggagggagaaagcatgagagagagtgaagcgagagcttctgcaagcgccggacgataacacgacaaattaggcaagatgaaatattttattcgctttgtgggtctatagttcagttacttgatcttatatgcatatgcatactgtgtggtttcaagtactagtttagttttaatcacctgtacatgcaacaattaaacatattcttgcttccgtaaaaccaatatagaaccaatcttttatataaacaatctacagtattaactttagatgacctgatgtactaccgccgactgggtactttcactgttagccttgctctgaaatgggtttgttggttggcttgaaggccgatatttcgtggggaagcagcttgacccagccacgccacgcgcccacgcgaacttacattatactcgtatctacatgctcccacatactcggaggcacgtactagcttagtttgctggaggaagaagaaaccagatgattccacgaaaagatctctgtacacgttgatttcgcccgtcggtcgccgcgtctccatcgcatctcgccatctcggagaacatcagagaaaggcacaatgctctcgtgttcgtccaatggccgctccaccgctccgttgaaaacagtcgtaactgacacgtgctcccgcccttttcttttttgtccatccaacaaagatgaaaattcgccatcgccacctttgtcaaacagcacatgccaaattccctataaaaatggttacgcatacgatctgattctccaactcacatacgactgaatttatcatttatcatcggttgtaaacggctacacactgtgtgtatgagcatagtttttttattaatttatggttttgcagggatgaatccagtgtggtagcggcggggctcgagcgtctactactagcatgaggatcgtaggagacccatgaaacctctacaaaacttttttttttataaatttcttttaccatacttcgatggaaattgtctcgctatttctttctgatccgttaggccctgtttagttcccacgcaaaaactttttaccatgtcacatcaaatgtttaaacacatgtatggaatattaaatatagataaaaaaatactaattacacagattgtgtgtaaattgtgagacgaatcttttaagtctaatttcaccatgatttgataatatggtgctacagtaaacattggctaatgctaaaataattaggcttaataaatttatctctcagtttaccagataaatcaatttattttgttattaaactatttcgaatgaatgtattgatgacacgtcaaaacttgaaacggcgccttattcttagtcagtgcgagtatccgacccgacgccacgcggggcgccgcgcccacaggatcgagaatctcacgggggtgcagagtgcagactgcagaggctggcacgggggccccgcgcgcccaccggcccacggcgcgagagccacagaacccgggccgcacaaaaatatctctccccctttgcctccgcttttatcccacccgacgatgcatcggacgctcgcgaacgttcccgacgccagatatttcccgcgcgccgcgtcgcgccgcgcaactcttcccgccttccagcttggcttcgcaacgcttcggctatcctcttctcttcttttggttgacacgatcaaagatattttccggcgtccgcgcccatatatatgcacgcgccaccctccgcgtttcgcgaggcctctcctcgacgtcgcccgtacattctccagccgcgccatcgttctttcacttcacccccaatgttgttctagcccccgcgccacccaagatagatagattcatcgcgatcgatcgagcgggaggtagagactagagagggatagtgtgtgctgctgctgctgcgtcggagtaggatatcgcgatcgatcggtcgatcgggcggatgcagcagggaagggggaggaggaggataatccagggatcgtcgtactacgccgtgctcggcgttcaccccggcgcgtccgccgccgagatacgcgccgcgtaccaccgcctcgccatggtgagtgcgattctgcaacacacccggtctggttttcctgtggtttggtttcgccggagttggaagcagagcatctgagcatatatggcgctgacgtgatttgggatttggtgcgtgcagaagtggcacccggacaagatcaccagcggccgcgtggatgcggaggaagccaagagcaggttccagcaggtgcacgaggcgtaccaaggtaatcaaaaagcacaaatcctctgtttctcgtgcgtgtcctctgcaatctgcatcatcttcttcggacgaatttctgaatacgaattttttttttgtctgtcgcgtgcgaatgcagtgttgtctgacgagaagaggagggcgctctacgactcaggcatgtacgacccgctcgacgacgaccaggaggaggacgtcgaggtaatccactaagcatcaaacttttctcatgcgtgctttgcttctttttcttttttttttttgatattgcgatggtttttgtgatctaacttgctgatttgcttaccttgcgacaccaccagggcttccacgacttcctccaggagatggtgtccctcatggccacggtaggaagagaggtaattaaatttgatgaccgatttaagccgacacgagcgattcgatcacaaatcagctatactctagacccaaatgcagcgaaaagagaaaaattcaaattacaaaaatttccgatgcgtctaaaacctgtgttaatccacttcgtgcaggagcccgtgtactgcctggacgagctccgctccatgctggacgggatgatgcaggatttcgcctcgtccgaattgccttcgcccagcggcggcttcttcgccggcgcgccctcctcgccgttcgccgacaccggcgccgcgcagcagcagcgcggggtcggctccgcctccgcgcgcgcgcacgctcatccccaggtggtcggcaactctgcctgcctcagccggatggccttctccagctactgagatcaatttttgccagcggccgcaacatcatcacctgcatagattagctagcctcgtcgacatcgagtgagagtgagtagtcggcggcggtgcggcgccgccccctgctgccgatgaggcgcgtcagcgtcgtgatctcatgaaggtgcatgcagaaaggtggcaaggcagggcactggaacaaagtatttctgtttattttcttgtcttgtttcgatgggatgggctctgcagcgagaactgtctatactgttccgagtgtaccgtgacaatgtgatatcacgggactgtttgcctttgtacagtttcatgataaacaatctgaagtagtagtaatgaactagtgacaatgatgatgatgatcgtcgttgttccgttctgttaggatgatgggacgatccctttggtgtgaaactgcactcgtgtttcgctttttttttaaaaaaaaaaaaaacgtgcaccttatcttcctctacaggagtaaaccgtagaagactagtccagagaaatgaagttttttttaaaaaaaatacagagattgatcaatactgatatatatctccagaaacatgtaattttgaattgaatttaaacaaacaaaaatgttattttttttctacttagtaattgaacttgattctctcttcgtttcaggttataagacgttttaattttagccaaagttaaactattttaaatttgattaagtttatgtacaaatatagtagtatttataataccaaattagtttcattaaatcaataattgaatatattttcataataaatgtgtgttgagttgaaaatataattattttttctataaatttagtcaaatttaaagcagtttgattttgaccaaattcaaaatgtcttataacctaaaattgagaaattgagggagtatttatctgaaatcatatactattttaatattagttgttcggtgatatgcagaaacaggaagacgtcccacaaatacacttccccgactggcactagttgttttggacttgttcacctgtggccaaggtgcacggaattgaatgacaatagaatgaagcttgaagttacatctagaaccgaatatattatacttcagcaccaaaaagagaaaaagaaccactaatcaatcctgttcggggcatgctctcccgtaaccagagcacttaaagtcttaaaccccccgagatattagcggtagttccacgctcctaccagaaacacaataagaaaaggaaaagaatacacgtcacgtacaccagcacatctaacccagtcccagttcatatatatatcacattcatgtccaatgcattcctgaatcacagttaaatcttaatcctaccactaatcctatgcaaaaagaaaaaaaaaacatgaggaatccaagccaaatgctgcgactgctgctgctgcgggtggcaatcctcgccgccgttctcgcgacaccgtcgctgggccgagtgatagggggcagcaagtgcaagtgcctcatgtgcgtctgcgacgtggacccgcacccgctcccgccgtcgcgccaccacccgccgccgccggaggagccggagccggagccgacgccggtgaaccaccactaccctccgccgacgacgcccgcgtactccctcccgccgccggcgcagccgtacgggcagtacccgtacccgtacccgtcgcaggggcaggccggggcggcgtactggccgccgtcgacgccggcggagatgtacccgcaggtcagggggtacatccggtccgccgccgctcaccgtcggcgtcccggccacggcgggctctcgtcgcgcttggtcgtcgtctccgtcttgctcgtgtccggcctaatgccactgctcgtgtagtcgtgtgatcgtgtctcctgtgttttcgtttagtacggccgggccgaccgcgccgaagtttcgcggcctgcgactttgcgaccgcagcatatgttgcggctgtcacgtttactgatttggcatgtaaataagattacaactgtatcgcgtcaacacgtttcaagttccattatacgtgagaaaatttaaggcttgtttaccttataggcattttcaacttttcaaaaattttaacaatccccaaaacttgataagattacaaactaaacatatcattacagtacaacttcaccaaaatttgataatttcataaccttcttctactctcaaaacttttaccgaaattttgaaaaacatcaaaccaaacatggccaaaccttattgttaatgctaaaatttggcgttacgaaaaattaggaggtatattttagcaatgaagttagcatgccttttaattccgatttgaaatgtgataaactcaattccgatttgaagaaaggtatagagttcgtgaatttttcacaggaatgccagcgcaaacgaaacacagtgatgaataaatttggtcgaacactcgagaaacaggtgcatcgacactgtcacggctgcggcttcactgttccattgttgtgtttctatccgtgttccgtaccacgtggagggcattcgtttgtcgattctttttgtgtggccccaccataaacggagattacaggattattctctccgtcaatcaccagattacgcagttagcgattaatcctaattagcgtggccctccagggaaacaaaggcgccaaataaaaattaaggcgccaaaccattagacagtttttcagaaaatagattaagctttacatatggcacattattatcggatcacaatcatcttcttcgcaacaacaatggcctctctatctaatcttccaaggtcaatcaaggtcaccgattcactgcatgaacaagtgacaaccatgccgacggaaccagctgcctctgctggaatgtttgtactgcatcatccagggacaagctttcatggtaacctagaaggggaattagagacggtaagacttcataatgttttcactttcttttattagtaatcattgagacttgatcactacaagcacatcatatctccgttcagtaaatctcatagaagttttgcttcttttctattagcccttttttttctgtaagtttcatgaaagtttttcttcttttctaatttgtctcagataaaaaaacaggtatattaatcaggatcctagtaaaattgaagctactc

SEQ ID NO: 16716 - DNA, 2938 bp, Oryza sativa
  unsure (1)..(2938): unsure at all n locations
tttgttgttctcgtgcaggtactagttccaacttatatttacaaagtttagtgttcatatagaattcatatactgagttagttttatttaacaataggtactcgtggtcatgataaaagagaagaccaaatttcaaattacggtcagtgttttagtaggccagaaacacgatgtatgtgccgagcatgcatgaagataagtcttagggatgatggattgtattgcatatatgaattcttgcacgagcataaccacattcttgctactggaagtcaggccctttacttaagatctcaaaggaaaataactgaagcacagatggcaagtgctgaaaatgcaaaatcagtaggcatttctaataaggctactattgatttaatggcaaaagaagcgggtggatatgagaatcttggatttactcgtgaagacatgaagaatagattatattcaaagaggtcattgaaggtaaacgaaggtgacacagagggagtcttggaatatatggagaaaaaatcatcggaagatgttaattttttctattccattctggttgatgaggatgacttgataacaaatattttctggactgattctaaaatgattgctgattatgaagtttttggtgatgttctttgttttgacacaacatatagaaaactaaatgatggtcgtccatttggtttgcttgttggtgtggataatcataagaaaagcgttgtttttggtgctgcacttttgtatgatgaaactgctgatagttttgtttggcttttcaagacatttttaaaagccatgtctggaaagaagccacagactatattgactgatgaagacgcagcaatggccaaagcaatcaagttagtcatgccaaaaagtcatcatagaatttgtgtttggcatatgaaccagaatgcctgcaaacaccttgctggagttgtgaaggagtacaagaaattcaatgcagattttcagaattgtatttatgacaaagaggaggaagatgaatttataaatgcatggaatagaatgcttgaaaagtatgatctgcaagagaacaaatggcttgagaggctatnttacaaaaaagagcaatgggcattagtgtatgggagaaacacattttctgctgatatgagtggaacacagagaagtgagagcatgaacaatgaattgaagggctatttcagtgtgaaatatgacatacttaccttcttggaacactttgacaggttgttgtcagacaaaagatatgaggaagtcaaaaatgactttaagacaacccaaagtacaccatggccgaaagcagatttgacaatattaaggcacaacaagaatttatactccagcaatatttaaagtgtttcaggaacaagtgttgcaaacattgaactgtgacctatactggtgtacaaattaaaagttcgcggtaagcaccattagcatgttgtaaaattttctccaacagaaggtaaagtcaggtgcagctgcaagaagtttgaatttctcggaatcctatgttgccatgcattgaagatacttgatgttaacaatataaaagaaattcctaagcaatacatactacaaaggtggaccattgatgcaaaatctctacatataaagagcaactgcagtactcatgaagatcctaaaataaagttatcaacgcgcaggagagacttgtgcagaatgtttgttaaaatagcatctcgagctgcagaatctgatgaaacatacttaatggctgccaacaatgcacaaaagttagcagaagatgtggagaaatacttgagtataaggcctgatccagatttggataaatctggtttgtatcctactctgagttgaatagtacttatgctagtgactactatgttataatctaaatcagctatctcaaaaatattttatcataggcacagaggaaaatgttgacccgagtaaagcaagaggcataaaggttaaagagaaagccattcgtgggtcgaggagaccaattggtggttttgacaaggcaacacaacggagtaaaaagaaaaagagtgattcaaacacatcaaagtgtccagtacaagcagaggtggtaacaccatcactgccatacaccatgatgcaggtcagtagattcaagatatacacacacttggcaaaagagactcttattagtgctactgattattatttgccttatacagattcagggtcgttcagagattcccactaactacaatcacatgcaaatgccagactactatcatgttgaaggtgcttcattacttcagtcatctggttatttcagaacttctgaaaaaagtcaagggatgcagcatgaagagactgcacagacatttgatacatatccctatagcatgtttgcccatttaaattaaaatccccaccttttttcatattaattagcacctttaccaatttccaatcacattacaacttataaggttggatcttaatctgaattcccatatcgattcaagctgtcaaatcatactagtactttctcttgtattagcatcaaatatatggttcccaccaaacatgttgtttggctcatataaaaaaaatcctaataatttagaagcatcaaaatacaagaggtgtttgcaaaaatgaacttaccaaataaaactaccttaatgcagctgtatggtgaaaaaagtttcgatcttcaattcttcacttcttcaccatagcaaacagtagttgccagcagcaagggagttccacatttggtactgaccattaaactacaccaagccgacgagtatgcggagtgcagaccacgccaagccggcgagcccggccgccgacaacgcaagagcaaccatggttgcgtgcggccaagaggaagatgaggagagcagcagatgagcagaacttcagatgaactctctgatttggggacaagagataaggatgcagtggt

SEQ ID NO: 16717 - DNA, 16549 bp, Oryza sativa
ctctagatactactgagagcaaatagattgaaccagataaatttattcgagaaatgaaatgaaatttatttgtgaacagataaaatttagtttggttagtagttactgggaattgtattactgtgtgaaactattgaattggaaaacagtgtttgcctatttttgtgtctatccataaacgtcaaccttacttcataaattctcgttttatccaaactactaaaaagttgcagagatacaaatgtaggacaaattgatactacggtcatcaaggaaatttgcaaattgcaatgcatgacacacattgaaagccttgtttggcatcaatttcaccaaatttcttgagctttacaatatttcattctcagataatacgtcattgcttttctcttagagagttcttaaaactattcactgaacttgatttgttaattgacatcatgagttcttgattctttatcatctttgtttgtttcacccctctaaagcagacctcaagtcactgccagagatgcgtttcctacctgacccacctcccacgccaacaatttctccaggtaaacgttattcagcttgttcacttatcctgtgaccttttggccactgactccattcgtgagataatcctcatccgtatcatcctgtacttcgcctctgctcacatgttgttttgtctcaattttggggtatgtgcagctataaaactatgatagtagaaatttgaacttagtaataccacgaaaagaatcacatacgtaattgtgcgatcatggtatactgttacttgcagcatctcttctgttgagttgtaagacttgtaactgttactaccatttccagcatggagtgtcctgctgatgctatactatatgtataatcttctcatctttcagttgtaacagtactttttagctcctgtatgaccatgatcatatcgtctatttcatcgtttaatcacagtcacggcaacgcctatgtggactcgctaatctgttgtgaatgcctgtgcagctgccgtcccaggatcaatgcccccgacgacggaggagcgttcgacgcccgtgcctgtgccgccacaggaccggtctggatcggagacctcaactcccagccggaatttccttgtggtgttgttagccctaacagcagcagcagcggcagatttgatccagctgtagttctgatatgtcattgcccatgcccagtactcacgctcctgacgaacttatgcctgttgcgtctttcctctgtcggtcggctttggactcaaatcaggtggtgccgtgtgttgtacagatgcaggggaggatgatctctgagaaattttgtccggaatggtgatgttttctcttttggtgtgctccgatagtccgatccatggtatgtcagtacaagtgtgctgcttctggctatgtcatgcaccattgacaacattcatagggtacggatagaatatggtttatattctcccatagtcttcatgtcactggaagccaaagaagagcatttctgcagtcacacggtcatgcagcatccgcactcaatcgatgtagtaatatagagtccagtcgcgcacaagtcaaacagttaaacaaaacccgtttggctcaccttgtcaaaatgttggccatgcctgacgtcttcttctacaacctggccagctgggccgtttggttcggctcctcgcacctgattcacatatccagcttaattcctttaggattatttattctattttttaaaaaaaaatacatcctgtcaagaaaaatattctagtatttgcttagaccacttgtcttaaatagtttgttaaatttatttatcacaacatttaatttatccctattaaaaagtagataatctacaaaaaaacagtccatccaatattttctaaacaaagccttaagttgaacgattagcgaatggctggtgcaacaaaatcaacgtagctgcttccccatttacgttccaagatggccagcctatgtgctaactgctactaccttcatcgccacaagtcaactggaagtaggcatcagggttaccttctgcagaggcaacccagtctagtcaagcccagcaacttgcacaacttgaccaagaaggcaagaacacacacaccctcgcttgcttaaattctagctgaattccattcgattctagtctcactctcatgtaaagccacagattgttcaaacctctgcattacatatacccaagaattctcagaattacagatttgcaaactgcaacatccactgtggatcataggaggcgaaattgtgcaaacatatttggagttaattaattctagcaagcacgtagtgacgaaagtgcaatacgcacgcatggaaggatcgattggtgccaaggtgtgccggagcgtccggtcatgctgggctcaccggtggacgaggagctaccggcggctggcgccggcgccggcgacaccgaggcggcggcctgcggcggcggcggcggtcggcggaaggatcaggctgggcaggcggccggcggcggcggtggcgtggtggaggttctcgcagctacgtgcggacacgcggtggtggtggccgtcgtcgtcgtcgtcgccgtcgccgctgcagctgctgggtcgcgtcgtgggggagtacctcagctccgtgcgacgacggcggcggatgatgctggaggaacccgcgagctcggacgacgacgcgtcgtcggcggcggcggcggcggcgccgacggcgaggcttcggcgtgccgcgtcgaggcagtacggcggccgggtcgacgggagaggggtggtgctgaacctgtgcgtggcggaggcgctgctgctccggcggagctcgtcggtgaccaggaggtcgccgctccgggcgaggaaggctgcacgtacagggcgagcctcagcttagctcactgatctcaaaaaacaatcgatgatgcgctaccgcctaccgtgcgatactgcgatgcatcgatatcgttcgtcagctcaagtagcttcaatctacaacaactacaagactataaccgcacgatgcgaaccttgggagctgttcctgcaaagtgttttacatgatgacaggaggaattttgggaacaaaaagaatactcccttggttttatattacaaatcgctttaacattcttttttaaaaactttttaagtttaattaagtttataaaaaaatatagtaacatcttccaccgaaaactaacatattatgaatatatattaaatgttacatgtaactaaactaatttaatctcgtagatgtagctagattttttttataaaccaaatttaaagaagtttgaatagaaaaaaattaaaacaactataatatgaaatggatggagtaatttaatatgagcttcattggtgcaacagtggtgtgtcattttttttttacaaaagaaaatttgtttatgcccccaacaaattcgatctcacgtgcagtcctatttacagaggggaaaatgagcatataaaatagcaaaagcgtgtagcgcgcggctgcaaatcccgcgcacatgacgcgctgatgagtgatgacacgcgacagcgaatccggccgcaccactgtttccgaccggagatcgttaggtgcgatgcgaaccgatgcggtcgcagagattcacatctcgcgggtggagcccactcacattcttcaggaagaggggaatcgggaatcccatgtggtggggccgggctgtgggccccaccaccccgtcctccaccttaaaaagctttgtcgctgccatggcatatggcgtcggagtcgaaatccccccccaaatagttggtggtagcgatcagtaggcaggagaggattaggagggatcggagaccgacatggcggaggaagggcagcgcggcggctacagccggctcgccggcgatgaggaggtggctacggcgagcggcggcggcggcggcgactacgacgagcggaagctgaggctgctcggctacgagccgcagctcaagcgcaacctctcgtacgtaccccctcctcctcatcatccgccatactcatctcgttcgcgctcgctgcgatccgcgcggtcgtcgatccgtttcgattctcgtggccggatcatccttctgaacttgcggttgatcgaggcgctgagatgattggatttggtcgtgttttatgtcgttgtttacgtgtttattaattgtggtttcgtgttgacgcgcgatgggtagctagtagtacttgcttgcgggctttgtgcgcttcgctccctattccccaattatgaagacacgcacactttctaatgctggcaaatggaggaatttaagttcaaattgtgaaactactaagggcttctttaaaacatacgaatttcattgtattttcgtaggaatcagttcagtttctgtaaagtttctctaaacatcctcaattcgtaaggagacttaagaaaaaaaaaagaaaggatacttaagaatatcccctttttttttgctgtcactaggatgcagagttgcagactgtccttccccaatctattggagttttatacattatatatttgcttagagatcaccctatcccattagccaaacactgcctatatattttcttagagatcacagtagtatagtacacatagagttgttgatctttagtgagcccaaagtagttgaggcctagatttcaaactcgtccaacagggcctatctaaaaccaggccttctggcccatccccttcggcccatcagaaaacagacccctttttttcagttttttttaagaagaagggcactttttatatatagtatatacagcctttttaaattgtgatcttaattcatataaccactagactacattttctttcacagatctttttatatgctttttttgcatttcattttttttaaaaaaaaaagagggaggaaaagaaatgaacaaaggaaacagggaatcagcgaaaggtgtcactactgacaatttttggcgtgcaggctgctgtccaacttcgcggtgtcgttctcgatcgtgtcggtgctgacggggatcacgacgctgttcgggacggggctgcagttcggcgggccggcgacgatggtgtacggctggcccatcgccggcgccatgacgctcgtcgtcggcctcgccatggccgagatctgctccgcctacccgacctccggtggcctctacttctggagcgcgaggctctgcagccaccgccgctggggccccttcgcttcatggctcaccggctggtaagtatcagagtacctccctttctgcgtgtttgtttactaagcactccatagtaatttattatcaatgtactactgataatgtagtagtacttcgtaggttgatcacatattcctgtgagtaaatgtcaacaaaattaatctaatcatgctgctttagttgattaacacaagttttattattacgcttatgcttattcttataaatccaaatttaaattttaaattttaaaacttaattttaaggttgattttgtggtttttttttatcgcagaattttataccatttgcttttgaatcactaacacgtatataaaagttgagctttatatacaaatactttcttttaagatagtgaaaatggattatacctcctgcctatacccataaacagatctacagccaaaagccaaaaaaatctcagatgcaacgcctgcgtacgtgccataggttggtcaacgtgagtacgtgagtccttgctgtccgtggattacagagtacggagtcggagtagttaaaattgcaagtgtgggagcaaaaggcaaccgagccatgaacacgttctgtacgaatcagtcggccgcggaaggaagagccgcacttctctttttttttttcctccgtcttggtggcgcacgcacgtaaaaagatgtcggcctcgcgctcgcctgcttggtacgtgtcgtggctgcgcgtgcggcctctcgtccaccggcgtaggggtgaggcgaggtttttgcgagcggcggcacgtgcgtcatgcgatcgcgatcgacgcacgtacagacagagccatcgacgtccgataaacaggaggatatgggcgaaaagtcaatcccgaatcttttgattgcgcaaagtgcaaagtgcaaaaaaaagaaagaaaaaatattagttcttttggcatctctagcactccacggctaggcccataagagcacccgcaatggtaaagtaaggtgatatctataaaatatgtacatctcagcaatagactagattaataataaaccacttcaatgatatgtctacatgggtatctatagctctctaatcaattgtctcgtttttctctatagactatatccaggttagtagatagctttgctctttctcttcatttaatctcttccaagcaataaaatatgctgacatagatatcttgtagatagtttatagataatcattacgggtgccctaataattaagtctagttgagtgagtacgtacgttaatttgcacgtacgcccggctagcgaatccacacgtctctacggctcgtttaataaacacgagacaggttgcaatcaggacaaagcaaagagaggaaatggcgtgccaggctatatatgctcggttgttaatttcgtgttgtgtgccgacttcgaatcccgacatcccgtagacacgatccggcaatataagagcaggtacaatcaataacatgctataagatagctgtaaatatattttaaaaaattaaatgaggagagagaagagcaacggactacagatttatagccagctgtagcacggactctaagacgcagtatgcgtatgacaggtgggaccatgtattaatagtgtagtatgtagctattgtatgaatgagctattagaatggctatagataaattggagctagtagttggctatactattaaacttgctctaaggggaaccgttgacaatttaagatgtatacatgtctgtctattccaacctttcattctctcagtcatcttcaaagtctgtttcttaggtgcataatataggctctgcatctttcctatgagtctgaaatcattaatttcaaggaatggttaaattcaaacaacattttcttgtcagatactactcccaaccacactaatttccggttgttactgaccgagctatgttaggcggtgtttggttggagggattaaagtggtgctaaactttagtccctctcacaaaaatataagttcttaccatagggacttatacttttgtgagagggactaaatttagtccctagttcccaaacacccccttaaaatggttacagacaaaaaaaaataaaataaaaaaagaaacatagaaatggaaacgaaaacgatttgctttgccgcgtatcgatcatttctgaattttaccatgtccttacggaaattatttttttctatattgtggtaattatcgtatttctattttatacttcaatgtttccgttcgacatcaatatgtttatgtctatataatttcgtttttatgatatttctgatactgtttttattttcggtttcatcgttttcgattttatttccaagatatatactctatccatcttaaaattaaagaatctagtattgagtatgttatatcctaatactatgaatctaatattaatctaatattatgaatctgtacaaatccttcttacgaggaaaatatccacaatagtaggatggcagaaaaaaaagaaattgcctctttgtctcgtggttgactgaaaaacaatccatatcctgccaacccgtacgctagtactcctctgataatctgaattgaccgtaacctgatcctttgcagcacccaaaaaaggggtgtgtttagtttacactaaaattaaaagtttggttgaaatttaaatgatgtgacggaaaagttagaggtttgtgtgtgtacgaaagttttgatgtgatgaaaaagttggaagtttgaagaattattttagaactaaacacggtgaagatctagctggtgagtcatgtcgtagataagaatataaaaggttcttttacatttctttccataaagtgtcaaatataatttgctacttggtgtgcagatgatgaatcacgtttgcagactcgcatgtaacagaacctgttatttttataagcattttatatgccacctgacctgcgtacgcagcgcgcgtgctgtgcgtgcacattttcaccgaatcccatcctgcggtcctgccatctctgatgcacgcgactttatttttttttctgaggacttctacacgtactaaaacttttttacaaaacatttgcaaacaaaattttcaaccgtttaatttaatttcatggaagttaaaataatcttgatttactcacaatatgccacgtcagagttactacgtagagagcattttgtaagaaaaaaattagtatgtattatatactgtactttccttttttttcttattatatcccttgattgggtttcgtgttaaaattgagacatctacagtctgtgtcgtatgattcgaattcccatggggttggggtggcccgtacactagacgcccgaatccaaagttgcaaacctttactttagtttagtaggaacactttactttatgaaactataaaaaagagattacgcgtgttcatgccatctacttaaaaaatatatatctagcacgaacaccaaatagtaggagtactaagagcaagtttaatgaggcacaatcagcagacgataagagtgccacatcatctaaattcattcgtggaggagagagaaagatagagggagagggcaacaggcgcttctgcaagcgccgagctacagcacaagaaactatgcatattataggaaccaatgcaaaatcaatattgtggttgtttttctccaatagcatagctatggccccattagcagaacacacgggataggatagagagtagcaagttagattaaaaaatagaaaaagttaactacctagagaagtgtgtaggtagattagcagcctgctattgtacgtatcatctttattttctacctccggatgacatgtacatttttatcaccagttgatggcggtactattaaacttgctctaacttatttctgttcgtggcggctatcaatagtttaaagagcagcaccatgctgacaggcaaaagaagatattagtttagggagattcgcactcaccaggaagctcaatcaaaatagcaaaatagcatgactaaaacgtagtattttagtttttctttttcgttgtttgttatttatctcaattatgagattagtattgtatgcactcgtgtacttttgattgtgtatatttactagtggatatgacaattttttatccaatatctaaaacatatgctgacagccaaaagaagaagataatagggagattcggattctcgtcaggaaagctctatcaaaaatagcaaaacggatctccacccctcgtgggcaaatggggtctcgtctcctctttttttaggcaggagggagcaaggctagattcctcaccccaacactgtcgcagatcccaccatcttacctggcagattcggtatcagcgcgtgccagtccgcccggcgcccggaggtaaagcaaccaaccaaacaaaccatcacaaaccccgcactttcgatcgtgtacgtttgaccccgcaccccctctcccccgcccgcctctcggcttcggccttcggcgcgcttcgcctacaagtagtagccgcgcgcgcagcacaccacaccaccacaccacacacggtcacacgtctcactcgccgcgacctcccctccaactccaacctcgcccttctcctctcccccgcgcgcgcgcaagcgagcgagcgaagcgccgcaatgacctggaacaaggccccggctgcggacgccgaagccggcggcggcggcgacaccggccacgcgcgcctccgggagctcggctacaagcaggagctcaagcgcgacctctcgtacgtcgccacactgcccctctctctctctctctctcgtcccttttcgcccttttcttggctgactttaaaccggttcacgcgcgcgacggcggcgtgcagagtgctgtccaacttcgccttctcgttctccatcatctcggtgctgacggggatcacgacgctgtacaacacggggctcagcttcggcgggccggccaccatgacgttcggctggttcgtcgccggcgccttcaccatgaccgtcggcctctccatggccgagatctgctcctccttccccacctccggtggcctctactactggagcgcccgcctctccggcaagcgttgggcgcccttcgcctcctggatcaccggatggtacaaccgccattcttttttttactaatccatagcggttaattttttttgaccccccattttttaattactttactactgtcgtttgcctgatttcttgccttggttcggatcatgtgaattgggggcgcacgagaaggatcatgatacttgcatgtgaacggggtttgttgatttactaattgttaggccagtttttctcttttttttttctgtttcttgttgggagttcaagatatatatggataatgggaacattgtcaaaaagcttgattgtttttctttctcatgttcccttccgtttccttgttttctttctggagtgacatcaaagcggcatcttcaaaagctctgcaatcttctctccttcttttcctgctgaacaaaatcttttttgttccgcccaattagatggagagagagagagagagagagagagagagaagtgctgctaattcgtactactactttgcactgttctgatgtcgtattcaatgatgtggtcctattaatccaagtaggaatttttgtttcatgcgttttagtcaatgttccattctttgaccttgtgcagggagagcattgggcaaagtttagaaattttggttttgatgacgactgacgatatagtgtttgatcagggttaatcattgaagcccagtagcagtagttcaactgagtatatatattgtgctcatatcaacttcttaatactaaacatttagttctaagtagctctgggaggggatatgggtttacttcgcattcattggaaatctgtcacactgtcagcatatcccttctcggacaagtcctccatttctattcccagcaacaaactctcatttgagtactgatgatggtacttattggtcgtgcagacatagtcttcattctgataccactgaaacatgacatcaatcaattatgttcctttcaacctgtcaccataatgaattgggtatgatttgattccaaaacagttactttcagcatctaatcctctgttgttttttgcttgtttgtttctgtcacctgcaggtttaacattgtcggacaggtaaaccgaaccaaaccatcccttctctgaactttcagttcttatctgaatatctgaactttcttctgctttgcagtgggcggtgacgaccagcgtggacttctcactggcccagctgattcaggtgatcatcctgctcagcactgggggcaacaacggaggagggtacatggcgtccaagtacgtcgtgatcgccttccacgccgccatcctgttgagccacgccgccatcaacagcctccccatcacctggctttccttctttgggcagttcgcggctgcctggaacatgctaggtgacacctccctctctttgacctgacaattcgcataaattgaaggattcagtgattcgttctacagagacagacagtgaccagtatttctgaaggagatttgtgtggttttctgcaatattcaggtgtctttgtcctcatgattgctgtgccgacggttgctaccgagagggccagtgccaagtttgtgttcacccatttcaacactgaaaacaacgctgggattcacagtaacttttacatcttcgtgctggggctcctgatgagccagtacacgctgacaggatatgacgcgtctgcgcatatggtaagggcgaaaaaatgaacagctcaagagctaacagacaatgttgttgtgccaagaaatgtttctggccaatctgacattatggttcttttgctcatgattcagaccgaggagacgaagaatgctgacaggaatggcccgatcggcatcatcagcgcgattgggatatcgataatagtaggatggggatacattcttggcatcacctttgcagtgaaggacataccttacctgctgaaccccgagaacgatgctggagggtatgccattgctgaggtgttctacctcgccttcaagagccggtacgggagcggcatcggcgggatcatctgcctagggatcgtcgccgtcgcgatatacttctgtggcatgagctcggtaacaagcaactcaaggtaaaaaaaaaaacaaatgaatgactgaatcacaatggatgacattctagtgttctaacttttgtcggtagagcaacagttcactcactcactgctatatgtatccatattgttcttctgattatttttcgcgaacgtgatttttttttcgcgaacgctgttcttctgattaggatggcgtacgcgttctcgagagacggcgcgatgccattgtcgtccgtctggcacaaggtcaacaagcacgaggtgccgatcaacgccgtctggctctcggccctcatctccctctgcatggcattgccggtaagttcctgacaatcttgttcacatctcagaaagtttcagaaaacgcaacgaaacattgacaaattgattcttgctcaaaattctcaaatactgataataacaacaacaacaaaaaaaaactatgggaaatgcagtcgctggggagcttggtggcgttccaggcgatggtgtcgatcgcgacgatcgggctgtacgtggcgtacgcgctgccgatcctgttcagggtgacgctggcgcggaagcacttcgtgccggggcccttcaacctggggcggtgcggcgtcgccgtcggctgggcggcggtgctgtgggtggccaccatcaccgtgctcttctcgctgccggtgtcgtacccggtcaccaaggacaccctcaactacacccccgtcgccgtcggcggcctcttcctcctcgtcctctcctcctggctcctcagcgccaggcactggttcaaaggccccatcaccaacctcgatggctagctaagccaagattgaggttttggttttggttttcgccggtggatatggaaatgcagtgggagatggaagaatcgtcgtcgatgatcggaggcgtttcaggtgggaggagaagtataactgaagaacaggtaagaagatgatctggaagggaaacgggagcatatcatgtcatggtggtggtgttgtgattagttgttgatttgttcagcgaaattatattacgtggaaggggattatacattttatacactggttgtagattgacaatatgtactaagaaattgacgattcaattgaaggctaaaagcagctgaaacagttgtggaattttgagtgtgtgattgcgttattacgttgcaagtaaatgttcgcagatgtaaaaaatattaaaatattactactacatatttaatccatccatcttataaaaaaccaaccagtatctaacacatcctagtttcataaaaaaccaacctaatatagtactatgaatttggactagtttttttattagacggaggaagtacacccctgaggctttctgaaaagacgatctttatgacgcatggttgttgacacatgctaaacaactatcttaagaaggatcgactattttacaggtaaccttatcgttattttctacaaaatgatcggagatgccttcttacaaaggccccttatcgcctttctaaggctgagtttaggagatggcgctgagaacttcacctcccccacacggaaaacaacattacccattaacatgtgattagttaaatagtagcttaaaaaatctaaaaaaatagattaatataattttttaaaattaacttttttataacaaacttttttaaaaaaatacagtgtaacagtttaaaaaacgcgttcgtgaaaaaaaaagtgagttaggaaataacgggaaaaaaaaacacagagcagatcagcggccgccggagccaaaaccctctgaatcttcccgcggaagggaacgtgtagtaattcaggttcagaaatccacagaacttcagtactccaatacaaacccacccccaaattcaaatccgcttccaaaatccagcggcgcggcgcggcgcttccctccaattctccaaacccaaagccacccccccccccccccgcgcgcccaaaccatctcatctccgacggcgagcgagcgggaggaagagatcccatctcatccaggttgcgcctcctgattccgatggtacgtacgctctctcctcctcctcctccggttcgattcgcggcggtgctgaagtgtggctggattttgcggttggtggatgcaggcggcgggtgcggaggcggaggcggatgaggaggagctggagccgctcttcgactactcccgcgtgcagcccaccatggccttcagcttcgacggtacgcgtcgctgcggcggcggctgcggccatcgcatcgcttcggttctatcgggctagggtttttctcgcgtggggggattcgcttagggatttgtctctgttttttttttctccccgatgcgcagataccgacattgagaagtccgacatcttcgtccactgcaacaagcggcgcaaggtggccgacggcgacggcgacgccaatgccgacgtgagtgcgctcgaattcaattccagttttacggtgggggaaaaatgtttgacgcgctggtatgtgttttttttccttaggagaagggggataagggtgagcagaaggccgcgaaggctgccgcggtagtcgacttgggagaggaggattggctgccgccgccgccaccccccaagcccaagtccactgtcacggacgaatcagagcagagcagcgtattgaaggagctgaggtataaacctgtgcatggttccattctgtaagtttacctggtgatgccgtatgctgattgctgctttctagtatcatatcgggatccatacttggtactccctccgtcccaaaataagccaacctcgtactagtacgtgacacatcctagtacgaggttggcttattttgggacggagggagtatgtattagatgatgcggtgagcttaagaaagtcataccgtatcaaggtgtacagctgtgtttcttttatcaactttagaatgagcaactatattatattttgctattgatgaggaaagcattgttaaacaggtattgttgtttgatgcgagattattgaagtcaagacgttccaatttaaaagctgctttattaaatttcgcatcattgaacctaaagtgcttgtcttgtatagattaataagagtggaaggtagactgtactgttgttttcaccatcatttttccaagtcatggacagagctgtgcaacattttttttagatgatgcagatttagtgcatataaggcgaatgcactgctgtttatcgaagcactcagtgccataacaactcatgtttcatatggccagagtaccctttgcttttctgacagattagtgaccaaaatcggaataccctactgcatatgacatagccagcatgttatcccaatgagtggtgaaatcgattgtttctgacaatttccctagggaaaatagtctgcgacctaaagtttctggctgtagtctgcttgacggatttcgatcaggtgcagttggtaggtgcagttggtactgtgactgcaacttatgcagtccactgccacctgttagatccgaatctaacggtccacatgcacctggatactgtagatcactgtagcaaaaatattcggtattttgcgttgatactgtagctgatgatctggtccattcatcaccaaaatgaatggctgtaatcgcgtgcagtagttaacttgcagtcgctgttcatactgcaggtgatcccaatccctgctggacatccaaatatatctggaagttgaaatggaagtcctgtatatactatgattcttgcagtgatgttgtgtacggatttggaagcagtgctttgtttgttttgttttttaattaccgattcctagagatgtgaatttatgatcatctgatttctgcttacgtattatgcagattacagaagcaagcaatggcgaaatttgctgaatcagctgatgattttctggagaagttggctcaaactgctaggcaaaaggttgaggccagaataccaactgaacatatagatctagacaagtcacctgaacgacacgaagcaagagaaaaggtggtcgtaacagttcaggacaaagctggacatcaccagtttcggttatacaaggttggttttctaatggagtagcactgcttatattaccaaacctatatgatgttcttagacatttttaggcagttcgaattttctaacagatggttgtgaacttgtgataatttggcatgctcttctttaa

SEQ ID NO: 16718 - DNA, 24525 bp, Oryza sativa
ttttccttttgccaactcttcttttctcttggctttgtgaatctatcacgagcgtgactgcttttattgaatgtgtgcgtccaattgtttgtactctgtaaagaaagatagtatccctctacattatctaattcctttaaaattgggtctgtttgaggaaattttgacagctatagcttttctcagaatcagaagtttttttcaaacagtttaactttttattcagattctgagatgctacaagctagaagctaagtttaccaactagttgttttttaagaatattaaactccctcaaataatccctttatttccttggagctatcgaaaggtactactaatattctccatgttttggaatcatacatggttctattgtgcatctctgtatttttttttctattcccgtgttcgcaaaatcatgtgttaaaaagtagcacttgcattgaattctaccatcctcttagttatcttacgttcataaatcgatctcttcaatttttgttgcctactcccatcccaaaatgtgcaatttttaggttggtacggatattaagaaagtagattggaataattggaggaagtatatgattggttgagaagagaaattaggtgaaagaaaatggttgtgattggttgaggggagaagataggtgaaaaaaaaactttattttagatttattttggaataaggtattgtgttagaaatatctacattttaaaacatagacaatatctgctcactaataactgtttccctgagcattttaggacttccatttagaacaaaggaaatatgaaagaattttggattggtcccaaaagtttcgtatgaaaaatcttatgaaatgagccattacattggaattttggagaaaaacaaacatgatggatgtgtttgttatagctactttgctaagctctcaccaacacgcaaaccgctgtggataattagcataaaattaattaagtattaactaataaacctgaaaacagatttatttatttctttaaaacaacttcgatattttttttaaaaaaatattcaacaattaaaaagcgtgctgatattaaatgagagcagctccttcaaatcccaaaaccgagcgcatgtttgctccagaccatgagttgagtcagtagctaatccaaaagaaaaagaaaagatcttcatattcttatcagctaatcaggatactccctagtcactagctgcttctagattcattcaccagctggccaacgccctcgaactgggcctttagattcgaaccatgaaaacgggtacgagaaagataagacgatgcatcacaacacataaggaaaaagactaacagactttgtaacttatgatcagtacaaatcagagacatgttgagagttacagcacgccaacaaacatttctacagagttacaaacttcagaagctaatagagcagcatacacggtacaactgaagacaaccacaaaacacaaaccaggttagttcttgcacccaaagcggttcaagattttttttttttgttagctaccctcttttgtcatgtggtcacctggagcaagtcatttccagagcttgacaaacctatcatggcttactgaggcaaccttgcctgttgcgctcgatgctgctagcgctgcaactaaaccatcatgagcactgtggaccgtcatggcgttcttctccctaatgtcccagagttccaaagactgcacgacataaataaacaaacgtacactattaatcaaatgcactcacaaaataactgaactatgccaaacaagataagagacttgcctcgtagcatccaattactagcaaatatgggtaagaggggtgaaaaacgcatgactggaacttgttcccgctgcaactcaactcattcacaaattcaccgtcatgtccaggagcaaacgaccatattctgacactatcttcactgacagaagccagattgtcaccggtagaatcccaacaaagtgagtgaatattctttgtgtgcccctacagagtacagataccaataaaactttcaatggaacttgaacctaaagatacttgcaattgccataataaaaatattgtcatataaagcaagtcatatcaatcgagcaatgatctctaacatgtaactatttatattggagtaggtatatagcaaagaaggcattaatctgagtgcacagaagtacagaacagggctcaatcttgcagcttatatatacatcttattatgggaattgccattgtgggtttcttctgcaatactcctaccaggccagacagaaaaaccaatggaaatttgtccaaaagtaaactaaattatacctcaaacctaaagaaatttcattatcataaaacctactcatgaaatttttgcaagagttttcccccaaaatttagaactaagaaccaaaggatttgtaaatcaaatgtaatgggcttaaaaaaaaatccagaactgctaaaaaatcaaggatataagaatattcattggtttaatcacttttctgaacatccaagtcctaacaaacctatttatgatgcactgtaccaagtgaatgatcaagaatggcaaccacaatttggtacgagtaactagtggtagtggcggaggcatggtgccgcataaacagcaatgcagttaattacaagggctaagtgaatgcttccttatacacattctgaatgggtaaatgctaacagacctgcagagggtttctacaagcaagttgtgtctctccatcaagtatgtagatggccttctctgaggcagctgcaagatattttcccttttgaggttgaaatcgcatctgagtagcacctccctgttgggacaaaaatgattggaaacagagacaagcatcagaagttgaatgttaaagcagaagataccatgaaacacatgaagttgcattgcataccttaaagaccttaacaaaggtcaggcagctaccattatttatgctccagctgcggacttcaccatcaccatcacaggagcaaatcatatcttctttgttcggatggaagtcaagtgacataacagatgctgaatgacccgtgaaagtacggagtgaataacttgtctgcacataatcaaatgattagtcactacatggttttaggttatggaacatcttgcaatcactatcgcaatagtttttttttgaattgatatcacaataagctattagcaccctaataggataactttgcaataaaatataggaaaatgtccattttacaaaattgaactcaagaaaaaagtcttgaaatgatcacctcaaactacaacactagacattttctagctcaaacatccaaacagtttgctttacagttgtccggttgggtttgtagttgatggttgattcccaaacttaaaagttcaatgttgtaaagtggagcttttttttttcttaaaaatatatatggtgaaaaggagtatacattgtcagcatcccaaacccgcacggttttgtcaaaggaagatgtagcaagccgtgacatgcttggactaaatcgaacatccgtaatcaatgccgaatgttcttctaatgaagatgtaggctttagagcaggctctgtacaccataaaagaacctgcgcagagtaagaggcatgcgttaaagattttcatgcactaagaaatcaaaatatattgtgttaacaactgcacctttttatcatgtccaccagtagcgagcagtttgccatcagaggagaagtgacaacaggtaactttggttgcacttgcacgtgccttcgcaacttcagcaaaaccaaaccctgtataaacagatcaatcaagtgcgatcaagcagaagcttcatcatatggccaagagaaacaataagtaaaatcacccatatcatcttgattatgatctgttatggagacatttcttatttaatgtgtaatcagatgtgatgatagatatttaaaatgtaacagtggcaagcatgttttgccttctcaaaggcctgtggtggcaagataaaaaatgcagattattagtgagactatgttcatttatttatgactcctgttgattgcatacagcagccaggtatcagcaggatattaaaatacctttactagcatccatggagcgccccaatgaatccctagggtccatgtcatcctgagatagaaaagattcaacattttcatccaatgaaccatcttctagcaaacgatccacgtcagcctgaaattgaaaactttctgtggtcatgttgttaaatacaaatgaaaaacaagaataaaatttgggggttttaaggatatataacaatactaactgatgccctcagttattgcccgaatccagagaacaatctccaactctgaaaactattcacatttcaccctccacctcaaactatcgaaaccgttcactatgttggcagtcaaatcactaattctagtcaagtctatatagtatattgaatctctttgaatgagtaatcacttactcttgatacatatcttgtattgaatctctttggatggatggatgagattagaattagtgaagagtaaaaagttctttttcttggaacacagggcacagtccatattcgtagtactaggttactatattttaggacagatggagtaagcgagtagcactaagcaatttatttttattttcttaatgtggaaattctagtcaacactatagtgttaatggaaatctgataatcctaatgactaggatgagtgataagggatggagtgaaactaaaagaaaaactaagatttttaggaggggtgctgacatactgatatggtcaagacaatacctaagtatgggttacgcacatgctttgacacaggtcccacaccacaaaaaaccaatgtggtttaaggggaggacgtgtttccattggttttaatagttgagggacgaaagatgataggtcaatgttcaaggaggttttctgaatctaaattgtactcgaatggtcaagaatggagttgttccaaagaaaatatgtccataccagtgcatttgctggagacgtcaaacttccagcaccatcagagccaaacattaccaatggttttgcggaaccaccattctgctgcagctgtggcatagacattgcatctcctggtgtatgagtggaaggcgttgatggtgcagaacttggagaagggccagcagtatttgcagttcctgaactattggctctaccagaggatgaaccaggtttcttcctcttctttgtagtctggacaacaaacagcacagtttatgtgactcaatgactgtggtcaagttaatatttactcttcatattatcttaaacagtggcaagcgttttgaattcctttttgacgaaaggtgaaagaacatcagtagcagcaagggatatggtgactctgtcggcaggaaaaactacacaacaacataatttctgtgccaaaggacaatcaatttcagaccaatataatcaaagaatgcacaaatcacttagctccacagccttatatagtagattcatttccagtgattacagtaaagcacaaagcaatcagctgagtcattgaacaaggcttgagtttaaaactgaaactagcacacgatacatttcatggcaatttttgtatcacgtagaaatactataattatatataatatatatcaggatagaaacaaaaaagcagttagattccacaaaactgacagtgatcaattcagaccacaacgaacagtagtatattaggtctaagcattaatgcaaatggagcatggcaagcatggatgtgtacagataagaattatacttgatcaactccaccgaaagagtttggcatgcccccatcaacaggcatagttccgattcctggtttttcttgttggagaaactgatttgagctttgagactgctgactggagacagcaggctgctgaagctgtggatgctgctggctgttgctttgctgctgtaataattgttgctgctgagcaattttcttctactacgcagaaaaatccatataagaacatggaacatacaaaagagagaaaaataacgcataggaaggtgtccatagaatgagaacgatggaatcattacagtaatctaggtcaacttatatgcataaggtaagcatacagaaaagagcagaaatgtaacaaatactaaatgataaataaaccatcaattccatattagaaaacatagaacatagatattaggaaaattgatggatacaaggtaaatttgagttatcttctcaaaaatcgaacaggcagcattgtacttatctctgtaaagaactacaggtctagtataacagaaaaatggaagagagctgctaatccacattcagcaagaaattaagaaagcacaacatgcagtaactgcaaaacctagaaagtaaatctaaacaaacaaaagcttttacaccagtttaatggtggaataacacttgtaaggatgaaaaatcaaaagatatacctttatcaggatatctacatctccaccacttagactaggagaaccaatatttggaataatatcaccaccactgtttgtctgcccaacattcctgttgttaagcatcatccttaatcgtctgctgtcaacatcactagatgttggggaagccatattttgctgagcctgcaacataagctgctgctgctgttgcggggtaagaaaatgaatctgctgttgtaattgctgttgattctgcacaaatgacttctgctgcagaagtccagagcgaagttgttcaagtccctgtgaaaacaaaaagaaaaaaaatggcacatgaaaataagcaccgagagatagcatatgcagtcaattaataatagataccaatcacagtcgtttaccactatattggaaaataaaattgcaagttggtcccataattgctaccaatgatattaatgctggcatatattaccaatacacaaactgccacaaattaattacgtatatgcagaggaatagacccaaaaagaaggatggatttaaagttttaaatataagatgaatcagtaaggcaagtgtgaaatttgttgaaagatggtcaataaaataaaagtttcttggaattaggcgcttgccaatggcatttcttggattttctcataaaataaactgagaactacaattgcactatgcaaatggacagtgcaaacaaaacaaaaacaacacaggaaaacttataagcttatcttgctcagtagaagtgctacaagacagtctatgccattaataaactagagaaagcatgaacacccaagggagaaaagaccgctgcatttcctctctataggggagttaaacctaggcgcagtctattgcaggagcattaatcataaggaaaatgcataaaatctgtatttaagccaggcaatctatatagaaaccattcatgtccaagactaaagttactacttgatcataaactaaaccttaccgtgagtggccatcctttcagagtcaaattgtttccagcttgattagaccctgttaaaaatacatctgattaaggtatgcataacataaaaaagatcatgttccaaggtcctataattttacagcaaggctaataaactcttcaagattgaactaagaaaaaaaattacaagaaaagtaattccagggactatactgaaaacatgttaccttggacaccaataaatgacccctcaggacctgctgaccttggtgtcaaaatgggattcatctctgtcttgatactctgctaataatatgaataatattaggaatacatgttgacatttattctttttgtcctcctcgccttggaggtaagcatgttaggaattagagatacatgacagatcagaataaacagaagactaacctgagctggcccaggaatctgtggactcctggactgaacttgttgcagactgcctgacagaccaccaacagtaccatgcaaaatttgcctacaaaggaaagaagtaaactatctgagaaaagttacctcttgcagcgcatgtatattatggtcaatataaaacatggtgatgttcaataggcatctacattccattaaataagcaataaaatatgggaatgagatgacacttcagtatattttgttttggacacatcatttttcaaaacataactaaatgatttatatctacacaagtaattaagaaccaaaattaagagccaaaacaatgcatgcatgtaaaaaaaacagcaaaatgcagaagcagcaattccaagcataaataagaataacaaatagaagtgtgtctaatttatctccataactaaccaaatgactaaaaagaaaagttcaaaataaaataatatttttcgaccaacagatagacaactctgtgaatttcgataccagaagtactaagtgtagtgtggattagattacagtgaagctgtaacacgaatggtgaaatatcagctacaactgtacacggtataaagcttgttaaagtaattatatacttaattcacaaattcagcaggtaccctgaagattgtccacttgcagatgctttcaacaacgcttcgtttgaatcaagtagttgtccagcattctctccatatctttgctgaaaccaaagttcacgtgttatgataatattaaccacaaaatgaacatattggtgaggtgaggaatctatagaaacaacatcaatcaatgattatagataacagtcaaccttaattgacacctcgtccaaaccatctctctgggaaggcaactttaacctctcctcatacatttttgttgccataacatttgcagtactctggttttgccgcattaaaggattgtttccaggaagtccacttgcagtaccattaagaagatgagtaccatctctgcgctgttgttgttgctgctgctgctgctgttgctgctgttgctgctgctgctgttgctgctgctgttgttgctgctgctgctgtgctgctctttgtagcaacatttgttgcatttgtatatgctgtggttgctgttgtcgctgttgaggaggttgctgctgctgctgctgttgttgctccctggctttcatgtgctgagtctgaaagagtggtgagttgaagctgagttagaactgtcaattcagggaaaaagatctcttcaagttcatactaccataactaaagatgcaaatcagacaatttggaatatttatcgcacttgattacagcattagtaaaatatgctcccaggaaaaaaattgaatagcctacaatgtaaaaccgaaacaaaatataagttacaatggaattacctgcttgtggtggatctgacatacatataacacaagcagttgaatcataaagcaacaaacaaacagaaagaatcactaaccaatcaaaaggcagttattgacaaggtaaaatcagaaaggctcagtatctcacgcaaaatgagtcgagtcattagcgcaactaatcgagtattaattattattataaacttgaaaaatgtttttttttattttttttttgaaaacttctatatagaattttttttttgcataaaatgcactgtttggcagttcgggaagcgtgctaatgggaaacgagggagttgccatttcaatatgcagaaacaaactgagcgtaatgctttacaattcaagctgaacttatttgaaaacgccagcatggcaaactaaaatgcctgaaacattaaatatgtccataaaaagataattagatgcacagacacttacttcaatatatgaagccgcaacatctgaatgcttctcatttgtccttgctatgaaaatatcccaaaaaactgaccaccactcaaaaagaaaaccaccaggagcatcaatcgctgcaagaaacaagagttcagaaagttcgcgacatcctttactaacaaaaggtaaaaaattgtagcaaaactcatgacacaaatagcttcactcaacttgctgggaaatacataccaactggatccgaagagaccttcccttctgcttggaaggcctttgcagttgcctgcagatttctcttcataaagtagtcatatatgtagacatccagcctatttcagcaagcagtcgaacatttaggttggaggttagaaaattgccaaacatacaactcttttatccaagtacaagacaacgaaggatgttcaagcagagcggtgaataagaaactagtaggcgtagaaagaattataataaaaatgacaggaaaatagctggaaaagtgaacatattcaatggcccatctatctacatcaatgtacatccattttttcccttctagtttctcaataaatcaattagcatgctgccaacttcctctgcccattctgctataactgccctcatcttctctgtctccagtcactctgcccccagcttccctgctgcttctctccgcccccagcacaactatggctaccaccactactctgctttgccattaacttccattgccctcaatcctcccatgcagactcgtctctacctctaacgtggcctactctccttccatcccacaaatccactagattgccaccaatttcctggtgctagccatcccatcgtcctgagctctgcttcctccaccagctctgctcgctatcagccatgttgctctgcttcagcaacccacgtccgccaagctgtcacccaactctccgcttcctgcccctgttccaccagcttggactgctctagcccctcaaaccactgctgcagctgagggtacttgactcactgactggaggattcgcttctacttagctgacttcgccgcctaccactgctccagtttccatcttcgtgatattaccacattgtagaaccccacctccggcatggcaaaaggacaataaacctgcctctctcattgccacattgatgcacttttgtgctcgttcacctccctagctactttatggtaacctcgtttattcagcaaattacggactatttgtagtacgaacaccaacattccaccttcagaccgtggcagagtcgcttctttatattcaagagcagtggttcagttcctttggcacccgatgagctcttctccaggacttaccacttatgttttgactcctattgatggacacaaatccagcattgtcaagatatcagggaggaatagctgacagcttgttcgagctgtgtcacgatgagggttttagtgttatgaccacacgtcaggcccatggggcaggttaggcaggacaaattaggaatagatcaaacaaagctaagagattatctaattaggaaagattagagattagagatagagaacgaattagtttttataatatcaaagataagttccttggatgccaagtcagtcttccctatatggtatagagagggacgtcactaccgagcaacgggggtgctcaaaatcctgctgcctgctagcacagtgatgacgtggacatcaccagaatgtaacacgtcagtgcaaaactgtgaggtggcttcaagtggggaggtcttaatatatccgatataaaaggactcgtataccccattataattaagaaataaggaaatataatattaggtctggcttgataagagactcctggtgattgggccaagctcagcgatctcgcctttatccctgtctttcgatccttacaccatccatgaatcaacatcagttatattttgaaagaagcatttagagtgaccaatttccaattgaccaacactaaaatgaggcttcctagttattacttgtctatgcaaacataatgcttatatattacttaatcagtgaaagtatagcctagttaccagaagaatgggatatttccactcctcttcaaattcttatacagatcaaactgcaccgctttgatctaatctaacttgtagtagcataccagaactgctctatcaaatcatttcatccatgtctaagcgaaatcaagttattctctaagtactccctatcatactgtcagtaagtaaaccgatgtaggaggctaatccaggattccacagatcctgaaaaaactaatcaccgccaaacaaatcccgctcctctcttctcacgatcactatagctcaaataatacagtcgaatattcaaaacctactggcagaaatcatgttatcttattttcccaccggtattccaaatcgtacagagaagctagttatactgtatccagaacacagtcccgcaaaccaaaacagtgggttcgtccaataaacaaacaaagttcaaaggaaatccaccccccaaaaaaaagaaaaacaacatcgcccgcgaaaccctagcggccaaacacgccgcaacaacccttctcccacctagagcacaaggccggaaccggaaccactcacttcgatcccttcccgtgatttcatcttcaaaatcgccaaccccccccccccccgccccccagacgcagcaaaaaaaaaaaaaaactccacctcccagcaaaacacggcgtgaatccacgggaacaaggagagggaaaccccaaatcctcacatcttatccgcctcccagttcgtctgcgacatggctaccccaaacacggcggcgcgcccgcccgaaccccaccaaaccctagaagcgcccccacccccacccccaccgccccttgcccgcggccgccgccgccgccgcgcccaccgtccaacagacgccggagcagccaagccgacccgaaccgaggcggaggcggcggcggaggcgggtggtggtcgggagagaggggtgtggcgtgaggcgagtggaggaaagggggagaaagcggagagagagggagagagaggtggagacgaggaattcgtgaaatggacacgcgagagggagaggagaggaggagtgggggcgcaggcaagggtatatagtacactggctggtgacgtatcagcacacggagaatttttttggatatgtgagagaaaaaaaaaggggaaaaaaagagaggcgcattgaggaagggcggaggctgaggtgtgcttgtgcacccgcggaaggtagtatggcacagttcgggttcatcgcagttttgtccacttgaactcactcgtcacgtcaaaaagaataacttgaggacatgaaagttgtttttttttaacgggatagtaatcctattaactcaagtttaacgaaaaagcagtgtcacgtaataaaagtgtagagttattaggtttaatggtagctgctcgccaaaacttgttgatctgtactgttgttagattgagattaagatcatgggtatatctcttttcttcaatctccgagctaaccaagatccctatagaaaggggtggcgatagaggaagagtccctacaggctcaatggcggattcaaagtccggtacctcaagcagaggctctggatcacgtcattgtagtattttaaatttaagtgatcggcatgtctataattgttcacgtatatgtttgtcagatctctaaaaagtttctagacttgttactaaataggtctcaccaacgcagagtttctagggatatccctggatggaagatggcgatccagtttttaagggtgtttggttggtgggcaaaggtggatagggtggcctagagaggaaatattccatgaagatgttggatgagtgtatctggccaaattggtcggatgaggatatccacctttgctaatcttaatcattagtaattgattagcaataattaatgtattttgttgttaattagtaatcaacttatcaaaattagtgttgattagatataattggtctattttgttgttaattagtataaattatagctatattaatgataattaacatatattattattaattaatatgttattatttttattctatccattctcatccatccaaccaaacaagaaactggatggccatctccacccaaccaaaaaaagagtaccaccatatccctgtaaatatggatggccatatcctatccaacctcgaccacaaaccaaacacaccctaaatgggcctcaccaatacagaccgttatataataataagtgcaattagttgtggtgatggcagtttaaagagaagaaagggagaggtttattaagatttataggatgggtagaactttggagtaaccctagtgcctagagaatatatcatcaaggagtatcacacaaatagacaattcagtagaaaaatgcttcatactttgatttaaggaagtacatcatcaaggagtacccaataacaccatgacaatctataataagagatccattagttgtccacacgtcattgacttattacgtgtcaaataagtaaagggttcttatacttttactataaacttttgtattacaatatagcaaatcaataggctacggtagccttgagacctaagagtaaagaaaggcggagcaatcatttacataggtaaagatcacccctattctatttggcaggaattgaactaaacctatactacaacttaaaaggaattgaataaaacccttcctgtccaaatatgccctaagcaaatatgacgactaaatcagtaagggttcgttcgaacctctggttaggttacgctaatatgtttcacgcaaaacgacacagtcgtcagtgaatgattaattacgtattaactattacaaacttgaaaatggatttttttcaagaaacttctatatataaagtttttgcacaaaacacattaaacacattagttatcagtttggaaagcgtaaccacgtagaacgagaaagtagctcagtagagtagctaaatcgaactcagcgtaagcaattggttttaatttcaaaatctaccgctctttttattcttccacgttagtaattgggaatcattggaaatggacaattggtggatatgcttagctaaaacattaaaaaaacatggatgaaaaaatgttcacaataaattgacaactatatatatgtggttagactctaggtgttgtagtcaaattgcttctttccttcaaaagtctattacaacagtgtataacagattagccaagccaagccaattaacgagccataggccttgttttggagttggagattatgaaaatagatggtgagaaccttggcaagtattggcactactaaatttgatattgtagaatttgaactagcgtgggcaaaagttggtagcaaaccaaacatccatatgataaagttgccaaaattttggtagcaaacttgactacaatctaaacaaatcctacttcattttctagattctatggcatctagttatcagaatctttgtgagaatctggttgtttgtgaaaattatactcgaagaagctttaggtgcaaaaaaagcgtcctaaaacatggcctatagccaacagcctcaaaactcaacttagacctagaaagcacatagcaaaatatatttcttgttttttcaagaaaaaaatctactcaatacgttctccaataaaaaaagaaaagtgcccatttggccataaatatgcagtagacacctgaagcacatcaagaccataacttttttttcttccagcataacacactagcaattataagtccacgacaataatgatgagtccacgtcaactactacgagtttgcgcaagtaccacaaccaacaaatatggggcattcttaaggaaacatgtatgatgattaccagagattcacatgcagcaacggagtctgagagactgggacaaccataaaatgtaaatagggttagttctcagcacaaacggttcaacaatttggttagctgccattttgtcctatgattatctgcagcaaaaaagacatgttcctacaacgaagtttgatgaaggttgcaacttaatgtcatttccagagcttgacaagcctatcatggctcactgaggcaatcaaccctgatgcatttgatgctgctagcgatggaatcatgccatcatgagcattgttaatggtcacgatattcttctccctgatgtcccacagctccaaagactgcaagatgttaaccatacaaaaatttaatttaaaatatttttaaagtactataaaatgattatcttgaatatgatatataagagaacttgcctcgtaacaaccaatcacaagcaagtatggaaattttgggtggaagacacaagaataaaatttgtttccgctgcaaatcaactcatgcacacaatcaccatcatttcctgtagtaaatgaccaaaccttgatagaatcttcactaacagaggctaggtagccacccgtagcatcccagcaaactgaatggatattctttaagtgcccctgcacatgatcgcagacccacatgctccaattgagtcaaataccgaatgacatagtttgaagtattgatgtaatggtgggagttgtgggtgcacacaattaaatgcatatatacattggtgcagaaaccaaaagttatcactatttttaattgcaatatcaatattatgatgtcaagttctagaatatatattgcgttgaacacttaagaatgcaattccaccttttctttatgtcttaaataatccaaaaagctctagccaactagtggaatgatggtccaatgtgtaaatgcaaaacgacttctactaaacatagctgaacaatgtgtatactatattctgcaacagttctatcgatatgagaaattctcctagaaatgcatatgtaaaaagatataggtaaatatcattggttgtctacctgtagatcactcctataaatgtgcagcgtttctgcatctagtatggaaatcatcttttctgagacaactgcaagatatttcccatggtgaggttgaaatctcaactgaatagcacctccctgcgaagatatgataaaaaagcattcagggcaagttttagcttgcaaacaacatatatcaacactaaggaaaagaacaagaaaagaaatagctgatacatacattaaataccctaacacagttcacgcagctaccattatctatgctccagcaacgcacttccccatcactgtcacatgagcaaattatatcttctttatttgggtgaaaatcaagtgacacaacagatgttgaatgacctatgaaagtatggagagaatactccggctgcatagcatcaagatagtaaaatagttagtacatttgaacacatcaaagtgacattactataagagggtaattgacacaaatgaattacattgttagcatcccaaacccgtatggttttgtcaaaggaagatgtagcaagacgagtcatgattgagctaaatcggacatctgtaattatcatagaatgctcttcaaatatagctttaatgtttaagtcatctgtgaaccataaaacaacctgaaaaaaaaagataagtataaatatatagcctttttagcaccacaaaatccatagttgcttttacacacttttttatcatggcctcccgtggctagaagtttcccatccgacgagaaatgacaacaatcaaccttgtttgtacttgcacgagcttttgcaacctcgataaaaccaaaccctacaacaaagagaacatgttatgcatttagtctctgccaaataattctagtcaagctaaagaacacataactctaatactctataacaccctagtaaaggcatatcatatatgagcatttcaatcctcttgaaagcgaatgaatcctaaaacaacacatcccaccatctttgctttctgaaaactgaaatcttatcatgtctgttccacatactaagcaatgaatgaggaaattgtgcaaatcatttcatgacctttttttgctgactttgggtatgcatgctcgaacagggattgaaattgcattacactcaatagttcaaataggcatggagaccggttagatgttgcaatgaaatttgaagtgaagaaaagatccctatcaatgcagatgttgattattggaaacatcctttaggataaatgatcccttcaatatgtttgatctcacaagtggtgaggttgtgaaagtcttaagcaaagagaagggtaatagtttttcaaaaagacacacatttcttttataactctttttagggaggtgccatatgatactgcatatgatgggatggcatagattttttttcttgattgttttactatcaaggtcaataaaagttaaatgtacccaatccaattatgaaatatgatgctttgtgatatgtatactcactttctaaattttggttatcatcatcattaagtcagggtgaaatatggagatacctttactggcatccatgcaatgccccatggtctcctgaggatccatgtcttcctgagataaaaaagattctacattttcatccaaggagccatcttcctgcaactggtctacatcaccctggaattgagagatttttcatcttacttaccaagctatgtgctagtggcactttaaaatagagtggtatataaataccagtggatttgttggagagatcaagcttttggtgtcatcatagccaaacatagacaatgattttgatttaccaccattatacttcagttgtggcatggacatttcatctcttggagtgtgagtgaaaggtgttgaaggtgcagaacttgaagacgacccaacattgtttgatgttcctgagctattagctctttcagaggatgagacaattttctttctcttctttgatgcctgaacaacgagggacacattgtaaacatgcaatttgccaatctaaatatattggaaggcaatcgtaaatatgtcttgtttcatgagactaataggggcagaaccctagtggatacaacgtaatatagtatatataaatatataaaataatacaatacaagaatattatattggtaacaatacaatcctacaaggcttaagaaatcgatacaactccaaatatttcccagaaatgattaaaacaattagtagtagcgaaaagatatagtatgaagacatggaacagtaaagttccatcggaatagactagaaaaaaaaatcatatttgggggtatagaaggggttgagcaaaaacttggaggcgcataacgaattttctcagtagacaatgagagtaatgcttcaacaagcagaaacattgcatagtgtagtgtaaatgtagtatatatatgatctatgatatagagtttatgtagctttataaacaataaatcatatttttattataacatcatactcggttagctaatccaaaagaatttggtatgctcccatctagcatacttccgatgctttgagcctgttgatggtgaagctgattcaagctttgagcctgctgatgggagattgtagactgttgaagctgttgctgctggctatgaccctgttgttgcaactgttgtaaatgagcaattttctactatatagaaacataagagagtagttgataaacaaatggaaagaattcttgtccaaagcaagtatttctgataggtgtattataaaacactctaaagacaaatccctgtaatgtccttctcatactgcactatcagcatatcttattgtaaaatatctttgagataatttattctatgccattgacaacgcttggattctataatatgtcactaacaaagctcagttctataataaaccatcaaacaaccgttagttaaaccatcagtcaatcgttttcttcctcatatgccatcattgctagtaaactatcagttaaacttcgttaaagatgagaaaatgtccattttacccctatgttattatgcgtagtcatgaattttattggtcatgacccactactttttcttaatgatgaaaaatataaatcgcttgtctttttatcatccaagattattcaatgcgacatgtcattatgcaaaatctcaattttatccaagggctaaatggtcattttttgctccctattggagtttgactaacagtcaactaacaatgatgacatataaggaataaaatgagttgttcaatggtatattgtagaactgagctttgttggtggcatattatagaacatgcgcttttttcgatggcatagaatgaattgactcgatatctttagttgctttagcaggaaagcattctgcttaataaataagctatgcaaagcaccagggaagcttctaggctacaattgtgagaataaattaagtacatttagaataaaattttcagggtcgaatgaaaatgattaaaaaaagtatagaaaattgtttgaaatatgttatatagggaaatgttggtaacaagtaaaattgtcttcaataaaaaaactacaaataaatatgttcaacttttaatcagatcagacagaagtgccatttggataggacatgccacacctctaagcaaattggttatgcaacatctagaaagtaagaaactaatagcatcaaagcttttattggaaatgtaactagtacataaatttccagaattaggagtatcagcagaaaactagcatttccaaggtaggaagtcatagaacataccgctattaacatatctatcttattacgtgatccaccaatttggtcaggggaaccaatatttggaataatatgaccactattattattaatctgtccatctagatgaatggccatatttttgttgttatgaagcatccataatcttctagtctctacatcattagctggaagggaagccatgttttgatgggtttgcagcaaaagttgttgttgtggagttagaaactggagttgttgaaattgttggggtgattgtaggagcggcttctgctgcaaaattccagaacgatgttgatcaagccttatgagcaatgataatagaaagatgtatatgttaaaaaaaagttgcaagcttctagaatataataatgtgtaaatgtcatgttttgcactatacggaaaaactacatatgtatttggtgttttttttaaatttctatcgacaccatgcttctttttatttacataaacatagtgctcttttaacaccccaaagatcataatgtacaccaactagagaaaaggaacaacaaatggtgaccagatgtgggatatgaaatgtgcattggcatcttgagtaggacaaacaatcacaagactctcaatcacattttggcttgtgaagcggatggatctagtaacccgaccgggctgatgaatctcctaattttattattggtttgctcttagacgatataactttatttgcaaacaataaagtgtgctatgatggttttccttaaaagaaaaccaatcaaagggttttctcaagtaatacaacaaaaatgcacatagaaacattggcaatttctttcatgatgacgaggcatggctaccacccatgtcattgtactaaacaaaattccaatgaattttgtgtgaattgctaggtagagttttattggcacaaacatttctagcaattgttgtcggtagtttttaattagctgtcaacaaaatatcagtactcgacaagtccctagtccctccaatatagcaagctatcacaagaatagaattttcagatgcaaatataatatgaacatcgagcatatgccgtagaaaatgaaaatagctgacatcagacaattaggggcttcctatcataagtagagggtttttacttggaattccataaacatagaacgctaattaatgcatacatatttttattaaatacccatgttttttgcaatatgtaatttcctaaaataaatgtctccaacgtctcctagagaaaagaaaatgcacttaaaccaaatacaagataatagttggctctaaagcttaccatgagtgaccaacctttcagcataaaatttcttccaccatgattagatcctattaaaatgacatctcaatttagcttcaaaaactaaccaataaaattatgcaactttgcataccaataacaatcgcctgaagaattcaacatgaatcaaaactcatgtaattttttagactaaaaagcggtacgagttttgaactaaaaaggaaagtgaaagttgaaacatgaattatttactaggcaaggtagaacagtaattcaagggttcaagctagatgaaaattaccttgtagaccaagtaatgatccatcagaaataacatctctatttgtcaaaattggattgatcctaattttgatattctgccaagaatatcatgataagatgaaattggtaataatcttttttcttatgttattttgtatttggtatggtgagaggtgataagcagtatacaattcaaattaacctgttctggaataggaagtcgcggacttcttgcctgaacttgttgcagagtacttgataagtcaccaatacctccaggcaaaattggcctgaaaggtatgtgtcaatactatatgaaagcacatgtacaacaagttgctagttgctacatgcattgaacatccaacaagtcaacaagtaatccttgctggtatggttattaacttcatttctgaatggcttaaccatgattcatgtatcatggcaggtctggataagctatgaacttacactattaagaataaagctacatagcttacacgccataataatattataagtgtacacgcaatgcaatacccaataaaataatatagtgttcctaatgtcaaaattctaactatgtgcatacatatacaaaatgaaattactaggtgcaaacaaatgtatatcatagcaaactacatgcatgattaagataataattttctaacaagaacatagcatacattgaaaaagaataaagaatcacaattactttaatttagtagtgtgttgcatctactaagttctagtgatctttgcaagtaaactttgctgatgttagtacaacaaaaaaaaagtgcaagaaaataccctgaagattgtccacatgtagctgctttcaacaatgatgcttggtttggatcaagcacttgcccatatttttccccatatctttgttgcaactataagttcagcacaacaacgcaagatttagatcaaccaaaaacgcattatctaagaggcagataggagcctaggaaggttggacttggtgtggtacctttattgatgcctcatctaaagaatctctttgggaagggagctttaacctctcttcatatatttttactgccatagcatttgcaatagcagggttatgtcgcattaaaagatcatttccagaaaatccacttgtgataccattaaaaagatgagaaccatctctatgcagttgttgttgttgttgttgttgttgttgttgttgttgttgttgttgttgtgcagctctttgtaataacatttgttgcatttgtatttgttgatgctgatgttgttgatgatgatattgttgttgctgttgtttttgatgctctgcttttgcttgttgagtctgaaagattttagcaaagtacaatttaattagcattatctattcatgtgaaaaatgcatcatattccaaatgcaagtcattttacactcgtacacgagaattaaggaggtgatacaattattttcttgtcctgcagaaactacacatggaaaaagatacttcatttattgcgaaagtaacatcattcaaatagtaagcttatttacctgcaaagacccattagttgtagtaaatatcctaaaatatcacgtcaaggcggttcagccatgaccaagccagactactcttcgtaacactatactcatgactctaattcacatcaaggcaacatgagacaagctacggtttgtcacaataaggtactaggttttccaatgcatcatgtagatcagacataacagaagcccattacatgtgcagtgcctatgtaggtggtgcacaagggagtaggcaaaggctcccattaggcatgctacaaaatgggtgataggtgctccattttttctttgtctattgttctgcaatttttttatgcacttgggcattgctttattatttaattcaatccaaaactacgcatcatcaagtatgcaactcaactataaagttcatagactacacttagcaccagatgaaatacatatgacaaatttgaaagaggttatcaacaggctaaactggagctaacaaataaaagacaaacaattagcaatccaaataggcttcactggaaaaatgtttgatgatttaactagcatgccacattatgaagtagataaaattgagtttttaatggttcaactatctacattatacatggtttatgaaggcaacaaagaattttctatgttgtgatgtagcagaaaaggaagaatgaaaggccctaattagtagcatttgtcatagatggaaattataatcataaaaggataaataaaagcacagatacacacctcaatatatgacgttgcaacatcagaatgttcccgatctgtttgtgctatgaatatatcccaaaatattgaccaccactcaaaaagaaagccaccaggagcatcaattgctgtatgaaagttaattcaaggaagtaagtaatatcattaaaattgtggcaaacacaagccaaattaaataactccatagcaacttccaatcactaattaagtcaaaaaaaaaa

SEQ ID NO: 16719 - DNA, 14020 bp, Oryza sativa
tgggtacgttctagtaaaagaaacttgacaatttagcatttttgtgcaacaatttggctagatgtgtgttgttttagttcagaaatgctagatgagttttttcatgatgtttatatgccatcatataccagttatgcagatattaccttacaatcttgcatttaatctataaaaattatgttactcattcaatttgcaccactagtttggatttgtttcttcaccttctacaatttaaaccaaaatacaaaattttctaaataatacaatttaattgacttttaattactagaatgacagcatattaaatatgctatataaaactatgttatatattgagaaaatatatacttggaaattgaacatgtatagcaaaacgatgctaattaaaaaaatcaagttaatgcgctaacatgctcacttcttaagtaatggtacaaccattacacatacattccaagttggtactccctccgtcccgtaaaaaaaactaacctagtactggatatgacacatcctagtactacgaatctagacatacctttgtccagattcattgtactagaatatgtcatatcccgtcctagattcgtttttttcgggatggagcgagtacacccgtatggttacttcttaagttatacccacttgtaaagttgatgtatcgtgaatacaatttactcccaactaaaataaccaagacaaaattgtactaaatatttttagatattgagacccctctcggtcataaacaaggcatatattattccttgtatgacccgctttacaagcaatacttaggattcacctattgtcacaaacaacattttctggagacaagaggaaatctaccccactccctggtccattactttgttttcttgaggcattccagacctagaccccaaatggttatgctttaaatcattttcacaagccaaacaaactattgaaaaccatccaaaacaacaaagtggggtttccctgaaaccccagctcccaaactcacgtctactatcctcctactcgtgagacatacaagattgaacctccaaacatagctaccatcccgccgttcggtattgctaaaaaaaatggaaaacactcaaattgatctaacgccagccaaacaccacctaggaagcaagatgcataacaactatttttccatctcaaccagttagctatcatttaatttctccatttattttcttgtcttaatcaatcacaaccatttataatcttaatttgtgccaaaactaaaaaaaatacatatattttggaaatgggggaagaaaaactaatgaaaaaatggacagaaatcatgaaaaatgcatgatgcatgtcatcataatcatatagtacttcaacattagtaactcaagatgatttttcttgtgttctctttcatatgtaaggagattgttgtgtgcgagggtaaaagattggatagtacgagacaggtcaattctcaaagtgaatcggattgaaatataacaaggctttctagatctaaaagaggggcatgttagaacaaacggatctactaagaattttttgatagaaaatcagtgaagaaatctcacatgttttgggccatattatctgaatacagaaccatgctccacgcttccgcttctccaactccaacggcctccgagggtgaggatgtgatggtagcttttagagtttggggaggtattagaatgaggaagcgagcttagagggagattggtccaaccttgggtggtggcaatgagaggtttgcggtggcggagggaggtggtggcccttgccggcgttgaaaagaagtttagggatggcacacggagggggattgcggccgacgcgggtggtggaaccgcggcggtggctaggattggttagggttcggtggggtgggtagggtgagttatatagtaaagaggtcgatggctattaagcgttggatcaaaatcgggtgtctggaaattttaactagctatgcgggtagaaatatgtcaattgttgcatatttattacctagaataaatatttttaataaaataattgaagttcttatatgttttgtgacttgtgtgattcttcttctctaacgagcttgccaaattaatgtgcccttctgtgatatgcatgaattttgtagaatataaattttataggatttagttcggttcccacaaacttcctcgattccaaagaaggctaaggttagtgtaggcataggggagggaacgattaagattcaatggaccttggctatagcgcgaatgaggacgttggtggacatagatgtcatgatgagatagtaagaatagagcaatattagatggtggtgcgtgctcaatcaacgataacattgccacaaaagggaaaggatgtacatggaggcaaggaaagctaagcggaggagatggggatggacagtgtcaatgcttgatgtcctaattagggaggcgcctaagagaggaagaggatatgagtgagttaggttacaatgagggaagctgagcttatatggaagtggagggataatctagattgcacattttctatgtgattgttatggatttgattgatttgtcatttcccccaaaatcacatggccatttcttcatttttagtacacacatccctttcaccattctatttgaagaaaatatataaaagcacgggtagggatatagttcctttcattgctcgttgacatttctatatgctaccttacagatgcattgatgattactcaaccattcctttcatatatcattctattcaggtgggtattttcgtttccttctctattgattttacatccttctttattcttatatccagttattagcaatttactaagtactattaggtatattgaaagcctgcacctactctacaagctaaaaaatgtgcatcaaccttgtaaatgcgcacctacaagctaaaagagtatctgagtatataaagacctagaatttgctaacatcctaatcaaaatagcgtatgccatgaagagggataccaaacatgtacaattagatttacacgcttagagacggtcaccagaaatttgatctattttacaatgcagttggaatgtcagtacacattcgcccatacttcaaattctgaggaacacaactctacaaaattgacaaaatacccttgctaggcaagaaatcaattgcgttaagtacgtggtgatcaagtaatcggttgatgatggtattaaagtggtgtactccacatagggtggataacgagctagctcggctcggctcgttatcctaatgagttagaatcccagctcggctcgactcggttagcagctcgagctagctcgtttagcttgcaagccacctatgaccaacgcaatgcacttcaaagaacgatatcaaatatatcaaagataacaatagctgcaaactataatttctgcaattgaagaataagaaatcaagcaacctgcgaatcacaaagtcttggcataaaatttgtgtacccatcaattgggaatatttcatccatcaacacacctgagccttagcagatctggaagtattggtacatcggaaccaaccaaaaggcaacaaacatcctactgagtccccccccccccaaaaaaaaaaccaaaaccaacaaggcagattgacttgccgaaccaccgacattgacaaggacggcaggcttgagcttttccttctcgatttgtatcttggtgacgtggtgacgccagcacggtccgagcacaactgcctcctcctacttctcgttcgttcctccacgatgaagtagaggagccatggtccgcctcggattgggatttgggggtggcaacttcgcgcgacatcactagctcgctacccactggagggcaagagggctggtagcgatgggcatggtcgatgatgactggttgtgatgagggcgtgagggcgtgatggcgggggtggtgctacggccatattggagagaactggcggcgcggctggaaactgggtgtggggaaattgatcgatctctgagctagttggctgtcactatggttcagttgggaattcgttgggccagatgggccttgggctgcttgcttttgcttggctcgtttggctcgcgagccagctcgagctggctcattatgtctaacgagctaaacctctggctcagctcattactaaatctcaacgagctgaactgagtcagtcatgagtcgagcgagttaacgaggcacacaagtttttggtccagccctaactctacactattactgtttaaggtggtgttcttttctcctgaagatgaagattaagttttttacgcaaaacgaggtggtattgaagtatgattgattgagttttaattattacaaacttgaaaaatagattaatatgatattttagagcaactttcatataaaaagttttcacatgaaacgcaccgtttagcagtttgaaaagcgtgccacgaaaatcttaatcttcattcaactcttgttggagaaaagaacgagaccttaagtataggtaaaacttccccatcatgagaattatctcgaaaacaaagtatgatcatactaaattttcattactccatgatctagtgttgataacttttgcctttctcactagttatacaaccaactaaaaataggatgtgaaatatgtataagagtacgtgtgtccaactttgtgctaaaaaaagaaactaaatgcctcatcatttgtcttattcgtggaataagccaaacggtatatttgcaaacgaaaagtaatttaataggtgttcttaacgatctaaaagcaaaggctgtaaaatgaacttcgatgaaaaaacccccaaaatcaactccaaatttaaagttgaaaattcaaattttggttgataagcataagcataagcaaaaaagatgaggccctaactaaaaataatctatccaagagggaggggggggggaatcatgtcttcttatactatatacttctatttcccccaaccataaaaaacctacttctagctttataaggagaaaaagaccaaaatgcctcacattgagaaataaaatataatattggtgaatggttaggtaagaatattgaaaggataaaatatcttgagtaaggagatagaagtttgtgaaatgaggattgataaggagatagaagttaaatttattttgagataaaatttcaacttccaagttgatttattttagtacttcaagtactgataggtggatttggctataaacccacaactcctttttattaataccttatggtctctgttttacgtgcgaattcactgaaatatacaacccaaaatacgaggtgatagtaattaacaatacaaagtaacatttatggttctgccactgccacgcaaactcatccaatccaccaaactactccccttagggcatctaccaccaaaccacacctagagtgccctcagggcactcatctcccattggaggataccctaaatgggctcctcaaaatctgaagcaacttgttggagatactccaacccacaacgggtgtcccagcccacgaagccccatgtatattttcacttccctacccttagtccacgatgaccgcacaaattctctctctctcttctctttttcttcgcctcgtctttctcccttcgcccgctgtcgctcgcctctctttatccctctcgtcgccgccgctcgcttctctctctccctcctgtcactggcggccgcgagggtgatgaggagggccgcctccctccctctctctcattgtcgttcccgtcactcgccgccatccgtctccacgcggtggccgacagagaactgcgtgggggacgcgctggtcgacggcgaatgatgcgaaggacagggtggccgacggcgagcgacagttggttgacggcgcgtgagctctgccgctttctctccctctctctttcaaagcacgggagcagggcgcggtggccgacgacaagcaaagggtggctgacggcactctctcccgtcgccgcccgtcgcatcgcgtcgtcaccgtcctccccggcctcctctacctcgcgtcgtcaccgaccgagggcggtagatctggccccatcgtgggcggatctgtgcccccctcccctgggccagatcgggatggagcggcgtcggtcgccgacgattgggggggcgccgacagaggaggtcgcgatggtggaggggcgaggggtggaaagggacaaacgaggggagagggcggtgtctacaggctcctcgcctagcgccgaccgacccagcgtggcttcttgctcgggcccccagccgaggagcttgtagagccgcgacccctgtagagtagatgcgtggctctgctggggacggctcgagcaaaaacgtgaatgggagtcggactccgtgagctgaagccacgagccaagctacccatcgtagatggccttatttatatctagactagatgcgagaattgttatggctgtgcaagaaagatttgtcaaaaaaaaaagggataaaaggttccttataggcttattcagttgtactacacaaccaatcgtccaacgttatctgattattattattatttgtcaaagcatgtttgatgtacatcggattgacgtgaagacaagaatgatgtggtctttgcttatttagtacccggtcaagtcactcgtcataatagcctcaaaagtactgtaacagctcataatttgcaagtagccataagaaaatatctcctccactttgtcctgaggtgaaagaggaagaggaaaaggccagtgaggaaatagaagaaaaaaggggagaaaattacataaaagccctccgcaacaggtcccgaatactttgattcggtaggggtactaaggccattttcaacgcgaggacagtggtcccgttcttttgtccaaccagagttggatgaagattaagattttttggcaagtttttcaaactgctaaatggtgtgtttcttgcgaaaacttttaatataaaagttgctctaaaatatcatatcaatctattttctaagtttataataattaaaacttaatcaatcgtacgttaatgtaatctcattttatgttaaaagcttaatcttcgtcatcattttcatatttagagaaaagaacgccaccagtgtccaccaccatcgtacgttgaacgggcctaccaaaatggaggcctaataaaggcccaagtaagtataggcccaaatacgcccatgggtcgttaaaaaacggaggcccaataaatggtcgagttagtataagcccagttaggcccacgagtaggtggaacgaccacctcacggcccttacccgccttatcttccacatccgaggatttctctctttctttttccaacgcggccatggcgccgctccctctccccctcccgcttcccgccactcgccaccctcccaaaccgcacgaggcctcggcctccgcctccgcctcgctccacgccgcgctcgcctcgctctcccagcagtgcggggcgggaggcggaggcgggggcgccctccgcgacgccttcgccctcgtcgcccgcgccgagcgcgacgcgtgccccgcagcggtggtctcggtcggcccggaggcgtacgcgtccctcctgcagtgctgcgtcgcggcggggtgcctccgcgcggggcggcaggtgcacgccgccgccgtcaagcgcgggccccgctactgccgccacgcctacatcggcaccaagctcgccgtgttctacgcccggtgcggcgcgctcggcgacgccgagcgcgcgttcagcgcgctcccggccaagaacgccttcgcgtgggccgccgtcatcgggatgtggagccgcgccgggctgcacggcaaggccctcgccgggtacgccgccatgctcgaggcgggcgttcccgcggacaccttcgtcgtgcccaacgtgctcaaggcctgcgcggggctcgggctgcttggccccggcagagcggtgctcggttacgcctggaaggcgggggtcgggaactgcgtgtacgtgatgagcagcctggtggacttctatggaaaatgcggcgaggtggatgatgcgcgggaggtgttcgacgtaatgccggagaggacagtggtgagctggaactcgatgctgatggggtatatacacaatgggaggattgatgaggctgctgacttgttctatgagatgagggtcgagggcgtgctgccgacaagggtgagtgttctgagctttctgtccgcatccgcggatcttgaggttcttgatgggggaaggcagggccatgcagttgcagtatcaagcggcctggagatggatttgattctgggcagttcaatgatcaacttttactgtaaggttggtttggtggaggctgcagaggtgatatttgagcagatggttgaaagagatattgtcacctggaatctgatgatttcaggatatttgcaggatgggcaaactgacaaagcccttaccacatgccatagaatgctggagagtggcctgaagtttgattgtgtgacgttagcgtccgttatcatggcttgcgtgaaatcttacagaatggaggtgggtggagctgctcatgcttacgcagtgagaaacaatcttgaatcagataaaacggttttttgtagcctgatagaattgtattcaagtagtgggagaatcgaacaaatgcgcagagtatttgattcaattagacggagagatatagccacgtggaaagcgatgatctgtgcttatgcagaccatggaatgggttctgaggctctgaagcttttatatcaaatgcagcttgaaggcacatctccaactgcagcatgttgggattcagtactttcagcttttattcgaaatggacagttagatgatgccctaagcaccttctatgagatgcttcaaacgagcacacgccccaatctgcggacatggagtctgttaataagcggcttgtctcgaaatggtatgcatcctgaggttatgaatctatgttgcaagatgcaagaagtagagccagcacctagtccaacaatattttctgcagcacttcttgctgttaaatctgcagcttcagtacagtatggaaaagcaatgcacgcatgcattgttaagaagggcctattattgtcgaaatctgtggtgcagtcgctgctaaacatgtatggtagcttcaatgatagaggcacagtagagagtttgctaagatttcttgctgctgcacagtaaataatttcagggcgtcaagaatgtggtgctagtaaaataggacatacaggtttacaggttacagctgtacataaatacatggcgtttgcacatatgaattcacattcataatacaattcctattttgagtgatggagtatggactaaatcagagtggtcatgaaacaaagatacgtcataccagtttgatacgaaataacatctcttacatgattgtattaaccttgcagatacattacagagtatgcatctattgttgggaggcattattcctaaaatcagaaggttctgataaaagaaccaatcaccttaaagggctgaaaccagcgagtaaacagtgtttctgtggccacatgactctctttgagacctacagctagtcagctacaagtggttgaataatttcaagaaaagcataactgttttagtcactgtaacgatgaatatgataacatgctgacagatgtgctgcagttctgttgtcatccaattgttcggttttgaattaggatcgctactctgtgctggccctttttcggatactgtcaaagaacaatgtccagatgttatgggcaacttattatcattatataggtcattacttcttttcacactgcaaacaaaagtgtaactgtatattcctcctgtaaagtgtcaactcattgtacatatctttctgaacaactatacacagcacttttccactccagaaattgcagaattattactcacttgaagtatgagttaccacttctttcacactcccatgctaacaactggtgcttgtctcttttcgcaagccctgcatccgatcttgatggggtgcagaaggttccaatcagaaaaaccggcgtcttaagagagagagagagagagagagagagagaggctggaccatcgagcagctagaagttgcagcagctgctgggcacaggactgctcttcttgatgatgaaacttgcatctacagatgatcgagattattcgcccaaaagtggggggcgtactgcatatatgtagctcctgtaacagcgggtagcattgtcgagagatgtgccgcattcatggtggtgtgtgtgcccccggtttgctccgttttggatcagaatgtgtgccccctgcactggcccatttcgggaaggcatgctcgctgggaatgtgatgctgcggacgcattaacatgtcgctgccgtagcacagtaacttgagtttctccttactgttgcactggaatggactcgctgcgaataatttgggtactttgatcttcattcgggtgggaggaatttccacccataggaatagaaaaaatggaggaatataaatgcatgcacatatcaattcataaaataaattcaagaggtttagatggaaaatttactatgttttctctaagcaatttgtaggaaagaaaaaaaaatgtttttctatattcctagaaaccgaatggcactcgtaagaattaatcctttacttttcctctaaactgaacaagccctgcctagatagacattgcacagctgacttcaattcctggctcgtttgcagaacatgaagaagaaacatcaccaaagactttgtctgtaacgattgagaattccatgtcgcaatagtaataactgaaacggttcatgagaaattcttacgaaaatcctgcaaaactggcgcattacatttacattacattacagaacgggatgtgagcttttcgacccgaggaagaactgcatcggtgcctccgccacagcccacagtgggtggactctgtaaactgcaaaccggcctgatccgacccgacctgacctgacctgacggctgccgattaattaagcaggtaatttcccccgattcgcttagctggatcgtcgtcctggctgtggacggccgggcagcaacggcgacgagaggcggtgggcggggacgacacggtccagctttagaaaggcaggcacgtgagaggtgggcacgcaccgaggccaaatcatggagccgagtgcgagtgccaaggcccccgtgtcctcagctcatcactgcccaacatcaccattcagcgaaggcctacagaaagaaaacacagcaaggcctccgtactaccaaatgccaatatgcatgagtacgcgaacgatttttcttttttcagattgaagggctatatactccaccggtttgcaaaatgcgacgaaaaccgctagaatcgataggattcagtaggctttcggtgtaatttgacgaaattcgaacgagatttgcgaattatgagctatattttggtgattcaacagggggtcatcgcattctgactgacccatctgaacctgtaaaacattgtacactccaggtttccagaacttagccatcggtttgtacgagcacggtgcacctgggctcgacgtgttgtttgctgggggatagatgtcgcagggcagatcagatctcgcatccacaatcgttgatccgtgtggtacatgggccaacaagccacacgagctctctgtgcgtgtctggtacgtacgtcgcgtccatgcgatgcaaggctatagcgcgcgtgaagggcacatctgtgcgacccccccttgatgaatgatgacgctgaccgatgagtgaggaggcatatgatccattcccgttgtgaaaaatggatcgttgagctagggcgatgtagcttgcagacttttctctcaaacgatgatacggaagacgcacatgtacacacacgacttcctcgatgaattgccgatcgactaccgttcatgaatttcgtcgaattctgccaattcgcgcctcgtagattataaggacggtatcacgattactatgaaaaccgtgagattactgtaaaatgaaaaagtttcaaaatataagattaccgtatggagtaacggcgtgctattgcaaaccctgctgcttcgacatcaaaccaattggcaggcgaatccggttggtacttcctagttcctacccttgttctccactaatggaggtcaggatgatttagactgaacagtcacactgtctgtcgtgccgtttttctaccactgttccttcactatcacaataccatggcttgttacctgttggcttgttgctagtatctgcaactcggcattggtaaaaaaaaaaaggaaagatggaactcaaatgacaaggacgggagagaggggatgcagtaaaaacgcccaagatagcgcaagtaaagacgcgccggccagcctagcacgaacgggccacgccaatgtcacgcagcccgtgcctttgtcgccttccctacatgtagcagaatccattggtctccacggggaagaaatgcagaatccattgctctccatcgtcgctacgttgcgatgccatagaaactctacgctactgctgctgtgcaaacgccctcaccattgacgaatacagagccgaagacctcctcgctcttcttcgccagaattggcacaagaaaaacaaaaacaaaattgattcaccttatatcggcgacaataatgtacgtgtttcatagagtgagcagcaacaaaaaacgtagtcctactagtaacttactacctccatcgcattttaagtgtagttgtaaattttcgtatccaacatttaaccgtccgtattattttaaaaatttataaaaaaaataatcacatataaagtactattcatcttttactatcttgtaattaaaaaaataccaatcataaaaactttcaaataagacggacggtcgacattaataagagtaaagaccgaggtagtagggaaataaaaaatttaacaagctaacggatttaatgatttatcgctagtgtccgcatcttttagcgtgtattaaagacaaacaaaaaattaaggatttaattatatggtggacgtacgcgatggtgagtgtacatgtgtactctcattaaatcgaaaaaaataatactccatttattctaaaatatgtgtcacccacaactttaaagaaaaaaatcaatatttgtaaactttgactaatacttccttcatcttaaattgtatttttaggtgagcacaaatattaagaaaataaatataaatgattaaaggaatgctattattggttgaaaaaagaaagtggataaataaattaattgaaaatgcttgtgaactgattggttgaaaggaaaatagtaggtgaagaaataatttcatcttaaaccaaatcatattattaaaaatagctacattttaaaatggatacattttagaatggatgtagtagttaaacttaactaatatacgatattactctctttgccccaaaataaatccaatcatagagatgaatgtgaactaagagagggagtaatgttttgcattggagatcgcataaaaaagttttatattttttgcgatagaggagcactatagtagtgccatggacaatagaaaggccatggaaatgattagttttggaattcctttgctcccagctcaacatgtgattactcaattctagaacaacataaacgaaagaaggatgaggcacaatgatcacaaagggggcagacgatgaaatgaaggtaaaaaaaagagaagaaaaaaaatacatttacttggaagaatgaagcctgagaaaaatacaatttgatccaacaaaacaatacccaggaaaagaaactgaagaagagaagagaagagaaaaaaattggcaaagaacagagcattggcatacaggcagccaaagaacctatgcaatttttaacctttaccctgaccaaaaaggtgttttccgccgccgccgccggcgtcgtcacggcgtcggggcgggcggaggcgtgccc

SEQ ID NO: 16720 - DNA, 18556 bp, Oryza sativa
  unsure (1)..(18556): unsure at all n locations
gccgaccgcatccgcgcgtcccagtccagcggcgtcttgccggacccccggctccctgggcaaaaaagaaaacacaactccggtgagaaatttacattctggcattctccaatcaaacacctccaaacttaatgcaatgagtatctgtaaaaatgaaagactgaaaataactctgccatagtactaccatccaattaccaatggaagaatgcatttacattccaccatgatctttggtgaatgttgcaaggaaataacaataaaaaaatataattagtgatccttcacaagagaaaatttgctgccatcacttggttgaaatcgcagaatactcctggttgttgtattggattcttggtaaggatagacagagaaggttgatatttttattgatggggtgaataaaaatctcatcttggactggtccagagttggtcactgttaaagaaatcgggagtaacaaacaagtagtatgtcttaaacaaaaaatgtagtgctaacttgcatgcatgggatggggtgactgttgcaggctatgcattgcaagaggacaagacatcttcattggttaagtacagttggacagcacaaacaagcacacgactaatcaatcagcgcaatagttggttcagtaggtctactaaagaagagaataaatatatcagtgcattacatagattgcatcctagcaagtactactataaatagactattagctgttcatctggccatcaattaagcatatctgttaggtagcctagtacattacagaccagcaaacacaccgaattgttagcttcttgtctagtaaaagcaaggagaaaatcaatggtgcgactgatcctacagcaatagagtatgcatcatcatttctaaatgtgcaaaactgaatttttctgccaagtgttttcaaaacattgccgagcaattaggcaaatagagctgatgagcaagtgagcttgctaacccactgggcaagatccaaaagcaaagctgtggtctctactctcttgtcaagtagtggagaacattgacgagcaggtagcagagggcactggttacacatatgtgggtggcagcactgaccggtgccatggacctactatagctatagtaccctgcaattggaggccaggcgagcaagaacatgcatgtgcaactgcaattgctcctgtgacccttctctgaattaccagcaagccgtagtgcagagttgttgccactggcagtccgatcccaacccaactcaaaaaccacattctctcaactttgatatctgtgaacactctcaaggctctacagcactccagctgatacaggctgcagctccaaattttaactgttttttctctgggagaaacggagccagaggattaggacgccaagacagtgatggacactaacaggcaaccacctcgactgtttacgagttcatcgattcaactatcaaccgtcgttttccagggagttgggggtacgtttaagcgcaggcaattaaggagcccgatcaggtgaggcaaacacacacacacacaccacaacacggcgtcaaccccgtgtcgcggccggccgcacgaacagctccgcaataatctcacggattctggtgaagcctagccaagccaagccaagccacgccgaagccatgaaggcgcacgtagtagccgagcaaggcggccatggccccatgtccatgatgacaactcacacacactacaatacacttgtccattattattctactcgcctcaatcttgcatgctagctactcctaaggtcctatttttcctaagcaaaaacaccctatcacatcgaatgtttgacacatgcatgaagtattaaatataaaaaaataaaaaactaattacataaattgcgtgtaaattgagagatgaatattttaagcctaattgctacattatttgataatgtggtgctacattaaataattgctaatgacggattaattaggcttactaaattcgtctcgtagtttataggcggaatttgtaatttgttttgttattagtctacgtttaatacttcaaatgtgtgtctgtatatccgatgtaacacgctaaaacttttcaccgctggatctaaacacagcctaagtcatagctagatggggactgtaccaacgacaatatatgctaagcgtacaaggataaataaaagtctcctccctcgttgccctaccattgaagaatatattgacttcgagggaaccactactatgcacgaaggcccggccggccggcagtacacattacgcacgcacacagctagaattcgtggcaacattttacacacctttaaacacccagggggtgtacactgtaccacgatgtacaggcagcaggacaggattaagtggagaggcactagacattctctactctacggtaaaaagctgggccccacacgccagggaccccaaggaaaagtactgcactactactacaccttttctccctccgcatcaagtgcccatgatgatgatgatactatggtgccacgaagagtacaaaaactaccaggccaatgggtggttatgagccccggggggtcaccgtagcaaatttgcagcaacctgcgcgtttctgaactttgttctgggtttacaaaaccgtatatatctcgtggttactgctcggttttttgggtaacgacatggttatcgcggtaaccgtggggtggaggtaagcccatctcaaacatcagtttggtgaaacctggtcccggggcttgaatcgaacgacacgatacgctacgagtactactactcgtcactgcaggtgcaggtgcagcagaactgcaagtgtatcggagtagtagcagcagccaatgtgatggcacgcaccggcccagcgtgaggcggagcatgggatggaccagaccgtcgcgggcgctttacagcccaaacctcgcagtcatcactcccttgcacgcaccaccaccaccacctaacacacccacaacacacttccgcatcaaagaaaagcgacgcgaaaaaaataaataaataaacgataaagagaaaagagagagggataaaaaaaaaaagaaggaaaagcgcgggagccaccacgccaccgtccacatgccgccatggcgaggaaaagaggagagggaatttcgtcctcctcttccctcccatggaggctttggctttcgctcctgctcctacctactaccttgctcgcgaacacccatcaatgccgccgaattccgcgacgatttctgcgtctacgatgcacgcacgcactcatcgatcgcttcttggacttggtgatttccgctcgcgcgtaatgccgatctcatgtcgaaaaatccccgcgcaagaaagcgaccaaaatacgatttggcaatggcaatgcggtgacgcagagagagagagagtagactgaccgtggagcatggcggagaggctgccgttggggaggtagtcgaagacgaggagcttctcgtccttggagaagtagtaggcgcggacggggaggacgttgcggtgctccaccttgccgagcgcgtccatgtgggcgtcgaactcgcgccgcgccaccgccacgtccttgagccgcttcaccaccaccgtcgtcccttcctccagcaccgccttgtacgacgtccccacgctcccctttccgagcaccttcgccgacgcccgcagcaggtcctccaggtcgaagctgtacccggccccctttcccacgaacaccagcctgctcggttccgccggcaccgncgtcaccgacggcggggccgacccggacgcgccgcccatgtcctccttggacgacgacgtcatgcccgtcccctcgccggaccccggcggggggacacctctcgcgggggggtgcccgcacccgccgccgccgccgtagtgctcttcggtccctcgctggcgcctcgccgccgcttggacaccgcgcagagcacgccggcgacgaggaggagcagcgccagcacgacggcgcccacgacgatgccggcgattgcggcgccggagagcctccgcttcttggaggaggatgccgccccggggacgtcggcggggctcaccccgggcgacggcgacggggacgggaagaacgacttgcagggcgggagcggcgagccgcagagctggaggttgccggcgaagtcctcggccgggaagcgcgcgagcgacgccgggatggagccattgaggttgttgtcggagacgttgaagacgacgaggctctggatgctgatgctggggatgttcccggagagcttgttccgtcgagcggagagcgcggagcgaggtgaggttgttgagcgtgaaggggatgggccccgagaggttgttgctggagagaacgagcctctcgagggcggcgagcttgctgaccgccggcgggatggcgccggagaggaggttgttctggaggaagagaagacgaagctgggggagctggagcacgtcgtcggggatgccgccgagaatgcggttggagcggagggagagcacctgcaggttggtgaggcggccgagcgtgcccggcgggatggcgccgatgagccccacgccggggagccgcacctgcaccaccgtggcgttcccggcgtcgcacgtcaccccgacccacccgcacgccgacgtcgaggagttccacccgagacgccgctcgtgcggcgtcgccgccaggaacgccagcagcgccgaccgctcgctcggcggcggctccgcggccacgagctcggcagcagccacgaccacgaccaccaccagcaccgccgccgccaccgccctggtcacgacgccggccatcgcgtcgcacagcagctggacacggctacgggcgaggaggcatcggagtgtgaagctagcaaactgcagcggatacgaccacactgtgggttagcgagagaagtggtgggaaaatccgggagaatgtgcgtgtccgggagcgttttatgcagtggcgtggtgtgctatactagcagcagcagtaggagtacacactacacagcagccagccagcgcggccggatcggcaggcagtggcgcatacgatgccgtggtggtaaagcccgtgacgctgggcgtctcgcgggcgtgtgcgtgtggcgcgcggcgcgcgcgcgccttgtgatctgtggacgctgtggctgtgcgtcgcagtggcgcgaagcgaagcgctgctctgctctgcactgtgccgtgtctgggcttgcgcccttgttggtttctgggtttttgtggatgggcgggtggctcacacgcattgtgccatagttgcattcgtgactcgtgagcgggcagggggctgggtgtggtgcggcaggtgccggttccgcgtcatggtttgcatgcgtagcacgggggtgtcgttgtggacgggtcggtgcgtgtccagctgggagaattttcggggggaaaaaagaattcgagatcggtttttgagcttttccgtttaaggtggtgcttggatttatgaattaaattttaactagcatggtggcccgcacagattgcgcggcaagaatcattatattttctctcatataatagcatatatgttttctcattatattattcaaattttttagaatgacatcaaaattttaaattttgcaataactttacaaaactacaaatgtgtaatattcatattgtattttatatatgtgttagttattaattatttttaatattaaattttagttatttgtaaattatatatatttctatatgtactctagactcgtcttttcatatttttttaattctgaattttctgtaaattgtatttctatatagactttaggctcttcttctaatattatttatttttatttctgaatttttattatttctaattgtatttctatgtggactctaaactcatctctcaatattctttaatttttaatttcgaattttagttacttctaaattgtattcctatattgactttaaactcttcccatgtttttcttaatttcgaattttagttatttgtaaattgtatttttatacggactcaaaactctacttttaattttgttatgtttattccgaattttagttagttttaaattcctatatggactctataatctacttctaatattctttttttttaattctgaatttctatttattttcttaattgtatttctatatggactctatactctatttctaatattccttatttttaattccgaatttcagttatttcctaattgtatttctatgtggactctagtgtcctcttctaatattccttattttttaattccgaatttcaactatttctaaattgtatttctatatggactctaatctcatcttctaatattccttattttttaattccgaatttcagctatttctaaattgtatttctatatggactctgttttttctttttcttcgattattgtgagaatttctatgccatgagagcgaatgtggaggctcctttttctattcatttaataatataatagattaatattacattggatatttagacactaattataagtattaaatgtagactaataataaaactaattagcttccgttcaaaactaattagcttccgttcatctcgttttcataccaccagactctgacactttacagatctttctagcagaagtgtttgtttgcgtttgcagttatacattggcgtgtttttaatttaatcctgtttggtagtaagacctatttttaagagattgtggatctcaattagtcctttttaacttccaaacgtccacataaatgaacaaataagactgttcatttagagtgccaatgtgatagcaacagcatcatttgccaaacaaattgtataactagttctctaataacgcagctttcgaattaaatgaggattgtatagagctcgcacatcaggtgcaaaaagtgatcgacccttgtaacaggatcttccacggctcacgctatcgggtgctgaacaagtgtgtatcacacaaatgtgtgtccatccaatattctttttcagcgatgcaacctgaaaaacacccggcaaccagagaacagaatccccctcctaatagcttctcgctccagcaaagcgaaacgttgggggtccaaaattccaaattactaccaacaaacccatcttaagccatctccatcgcttaaccccctcaaaacaaacaaaccccatcatctgagcaacgagcatgcagagctgacaagccacagccaccagcagtctgccactcacctagtcacacatacaaggtcaatcaatcctcggcacacccagacagacagccagctcgatcgccacggcggttaagtacagttgccgaaagttggcggccgctcgatcgaagcggatcgccggtcgccgtcgtcgttgcgcgcggagcgaaccgcggggagcgaacaaccgggcgcacgtncaacgaccagagcacgtacgcgcgcgcgcgctctcgtgctgttagctagccccaaccgctgataaaaaatccagcgtcttgatcagaaaccaaacagaatcgatcaccacctggctttagctagctagctttgctttgcaaaccgttgaatgatactgtccctgacagtgagagattacatgggcttcgcgcgtctaaccaattagtaacagtgtaccgtggcagacgcagatgctgatcgtcttatctgacgtgtgtagcagcggctctctccggcgcggtcaggtcaaagatagacaaaatgtagcgagcgccctctctcattgttccaggagtcagaaaaccggaatctccccgggcacgtagcgttgtcctctcctctggggcagcaaaacgtgcagacaaaacggggacatcacatggagaaaatccgctctcgacgtccggacaggggcaaattaccccttcagccgaccgaggtccgtatttgtaagaatcaacgtgggggttaatatagtgccgcgacctgtgcgattgccagtaccgattgtgtgtatgtgttttttctcttcaaactattaagttctactgctatatttttcctttaaaaagaaaaaaaaactgttctactaccatgtgaactctgcttaattttgtttggcaaaatttattacatgacacccgaaattcacgttctttgctggaagacactgtaagaacgtgtttttactgaaagacgcggtaaaaaaaaggtaaataggatacccccgacattatttaactaaatcaagagagaatggagagacaagcatttgttcaagataagtttctagaccatgaaaacgaacatggagactcattttttctattactttaataaggtaatagatggattgaaatccaacctctatatctacacaaccaaatataacatgcatgtctactatctagaagtttttttttaagaaaatggtttaaaacctagtcttggtacgcaaactcatagaagtgcaaacccaaaattcttataaggttttttttaaaaaaaaacattagcgataacctaaaaaagagaaacaaaatgctaaggccctctttaaaacacatgatagaaaaatcacatgaacaggacaaatgtagggattgaagtagtatgtttttctaatcctgtaggaattaagaacacaggagacagagagaaaagccctttgattacatcacagaaaacacttaataaaggaaagtttcacaagaggtctaatctcttgcttgtttttctatggaattgaccataggaatgcaatcctatgaaaattttcctatcctcttcctacgaatcaaagctcttcctacgaatcaaaggcctctatagaaaagaaaaatccttataaaaatgaatcctccaaaattcctttactaatcctctatttcaaaggggccctaaactttcatctcaactagctcccccacacctgaaacaaacacggtaatctcgtacaaccaaacttttagggctcctttgatttggaagaaaaagatagaaattttagagaatttcattcgtgcgattcaaaggggccctcaacagctaatagttttggggggtgttgctgattgaaatgtcacttagcttgcaattgaggacttgtgaagataagcatcgtttttacacagaagctccaaacttgtttgagagcgccaatttgcttgggtggcctattttggttgtaattttcaaggactttgcaacctgttgcattcgtgttctttttaagctatagcacctatttgcacttaaatacaattttgtgcaccatggacactatttactcgaacaaagagtaccacatttatgaaaactaagtgtgtaaatacagcaattcatgattagagttttagcacaggttcttccgttgaaatgataaaagtaatgatcataagatgttgctcgcattattgggactagatcctcacgcatcctctttattgtcgacaaattatttcactaaattcatctaataattatttttagtcaataggcattattccctaaatatttcatcatatctcaggtccagagtttcttttagattgattttcaaagatttattaaatccaatttttagaattagttaatgcattagttttggactctcaatttaagtaacatagggcttgttcgacagaactagctgttgcagccctgcatctgcgctgcaactgctgttattacaaccgctgtaactacaggtctgcagcaggacaagcttattacaacgttactacaatagccatccgctgcacgaaaatcctaacgggtgaatgatcgccccacgcgatcggtggcaaccggttccccttcccacctggtttctttttttttttggtcaccgtattatttttctcttttagtaagtttatacacctaaagtttacacatctaaattttatctacctaaagtttgtatagcgaatgtttataattcaaaagtttatatacccgattcaaattcaaatttggattcaaatattttatttgtagaatatttctatacataaagtttatgcgtgcattattttcctctttttagtaagtttatacaacctaaagtttacacatctaaagtttatccacctaaagtttgtagagcgaatgtttataagtcaaaattttatatacccgattcaaattcaaattcggattcaaatattttttatatagaatatttctatacataaagtttatgcatgcaaagtttacgatataaagtctatgcacatgaatgagagtaggggtgaaaatggtaacagaaattcccggccgtccggtgttcatttccgactttctaccggccaagccatacggaaatggtaatcgaccgataaaatatggaaatggaaacagaaatggttttgctgttatactgatcatttccgtatttaccgtattcttatggaaattaccgtttcttataatatagtaattactgtatttctaaatatgttgatatttatagggcatgtctctacttaacccatagtttagagtttgattgtctcttcaatcaaatgggcatcaccaatgtatatggcaaaagtgatccatataaatgggactcacataaaaggactttaactataacaatctccacaatgtatatagatacaatgttgcattaggaaatgagagagaaataaagatagatagtattatttattccatatgggtagtctatatgcttatggataccttttgttattttttctatatggaccagttgcacaatggtaataggtagctgaatggaatataatattgcctatggactacttttgcttcacattgtggatgccctgggcatgtctctacttgacccatagtttagagtttgattgactcttcaattaaatccctaacttgagggctaaaatggagttaatttataatttatatagtatagcttgaatttatttgtacatataacatacttatgtaaaattaaatatatgttttctatagtttaatgtttatttaccggtttttgatatgtaccgacatgtttctgtccgtattattccgtttccggttttccgatatttccgatatcgttttcgtttctggctttaccgttttcaatttcattttcgagaaaaatatgattatggaaatggttgaggctgttttccgatcgtttccaaccgttttcatccctaaatgagagtattagatttttttctaatttttttactaactttgtttttttgaaatttatgatgaaaggagagaagggagaggaatataggggggaggggcgggttgatcgctgggatcaatcacccgcccattaggggcaccctccgctgcagcgcttcagccgttcggctatggctgcgctgtacaaccgaaaaagctgcaggttggcttaccgaacaggcccatagcaatcaattaaaaaattaataattatctaacctaattagttaaattttggtctgtctatatggatagtcatatttgctttggctctcaatttagtatcatactagtatttcataactaaaatcctaatgtctgaaatcaataattagcaaattgtaatttgatagatttgttcggaggctatatataataatctaatatttgcgaatactgatggggatctcccagcgtgatgaatctcagcgaagccgaataattggctatcagggcagcgtgcttggctaaagcgaggagatcacgtttaatttttcaaaatgcctcgaaaagctacgttttctcaatgttatccccaacgcattgtcatgtggtctcatcatgcaccagcttgctatattatgcatgcaaatatatataagcaatgcatggagagtacgatcgatctccttcaattcgcggacatgccattattctaacgcggcttaatcactcatgcacttgtatgatttgataaggcgacgaagccagcaaggcaagtcacttgataattgatcgaaccaaaactccacttgttatcagctaaggattgcagcatatatacactgtacatggagtaactatacattaaacacgaactaatcagtccaatatactataattttggcaaaatgaacttatgaagacggttgatattatctaccaggcacaaggtgcgtgaccatcatcgagctaaaccggcactaagaacagtagaaccaataagatggacggtacaatgattgaagcgaatttgtgaagaaattgttggctagtgtatcctgctcctactaccagcctaccaggcaactagtatgatgaggaccacaaccacctatgctatgctatattccatccgtcaaaaaaaaaaaaccatagtttacgtgtctaacttttgaccgtccgtcttatttaaaaaaattataaaaaaaataaaaagacaagtcacgtataaaatattaatcatgttttatcatctaacaacaataaaaatacgaattataaaaaaaatcatataagacggacaatcgaagttagacatgaaaacccagggtttgccttttttttggatggagggagtatatgctatgcattgctgccattgctagggccaagagcccctctgctcagggattagtatcctttgcagtcactgcacggtgcttttgtcactgacatataggcctgatgtatcgtcaggtccacatgttaatgacaaagacacggtgcattcgactacagttgagagatcctcttctcagggcatttctaaatagaaaccacaatgtatcctcctactagtctttggagagtgaacgctgtcatacgcgggttttcctgctgatatgacggaggcccctacaagtcttatatgtattatcaactctgatctacagtgtcacgatgatacacgatttttagggcatccacaatctagttggaaagtgggtattagggattaaaatattcttactagctactaggtagatacattgtggaagtaatagtaaatagctattgccaagtcaaagcttaccaccaagttatatagcactttgtggtgggtcctatctattttttaattgtggtatggcttatatttagggttttttcagatgggtcacaccttattacccactctacacatatatattgtggtgcattttcaatctattattaccattttacatgagcccaccttattatctacttttacaataaacattgaggatgcccttaacgctgcccacctattgaggatgcccttaacgctgcccacctctaagaccgaaccacattaacacattataagaaggggttacccatgaacctgattaagattttttttccaaagtttatttatttttattatatgcacactctcttagcataaaacataaatatctgcatcagtctaaacttagttgaaaagtcatatatttcgttctaccttcgcccttagccgaccagcatttggtacaggtcgatttggtgccgtcaacctcagtccaccactacatacccaaggcacgagtgtttgacatgcccttaattaccatcttctctcgtagcatcgatttcttctcgccgcaactcaccaagtgagaaatcagctttcccttgtacttctccataatgcccttagactttatgctcactcaaatataaaaaggtttaacttactaacaaataaaaaatgttaatatttgattaattaaaatgacatcaattatttgttttaaaaattttcttttttgtgcatcaatgttattactcatggtagtcatcaagatttggttaaacttcaaaactttaaccatcaatagtttttcaaatgcttagtttaaatctatttttaaaaatcaaataaacctattttttaaagtttgtaataggtaatactcaattaaccatgtggtaattccccccactcgacgcggagcctttctctaacacaaaattaatggctgccatttaaaatagctcctctaacacaaaattaatggctgccatttaaaatagctcataaaatcgtatctgaaacgccatatatttataactgagagaattttgcttggcacagtatatgactagctcgaaaaacaaaagatcacatatgaacattggaaataatcatctaatttacatcttactagctagaacgggatgaactttagttgctattaaagtaaccggtatcttttatgttataaaaaaaacgtgaatttttcatgctatataaccaattttgtctttttttttaatagggaacatccatcttaaactagaaagagaaaaggaaggcattgcaagtactgtagcacgatatagccctaatcaacgcgtccccattgattgataggacaaaatcccacaattcatccgccatccgtgatcccgtgatccgtcagctgcgatgcacgcatgtgccaatgtgcggtgcgtgggggagtcgttccacagcgatcgagccggccaccccccaaccgccactttatttgccgccactgctcgcagttatactcgctagctctcagctcgtcggcccgccgcgcaccatgtagccggccggccggtcggacggacccctccaaatccaatcggttgatgcccgatcggacggccgagagatcgtcgcgcgcgtgttgttatcgagtatcatttgtacattcgcacacatgggccaacgacggacggctcgatctacgctagcttctacgagctcctagcacagctagtacagcacattaatccataacacgataaaattaagacacatcatgatgagccacagggtggtaccatcgatggactacatagagtataattcagtgttcacgttggtctattgttaagtaactactccctccgtctccataatataagggattttgagtttttgtttgtattgtttgaccactcgtcttatttaaaaaatttgtgcaaatataaaaaacgataagttgtgcttaaaagtactttggataataaagtaagtcaaaaaaaataaataataattccaaaattttttgaataagacgagtggtcaaacagtgcaagcaaaaacttaaaatcccttatattataggatggagggagtacacgatattgtaaactcgtacaatatattatatactgtacaatactccatattatacgtatttttttggcacatataagtatacttcctaagaaaatttaataacaaggtgataggtacggtgtagtcacttatgtagagccatgggtcgaagagaggtcatcgaagcaactcagcaagatccaagatggtgactagtagaggagaggcgacatgattatagggtagcgagtgacttagagcagggggaggggtttggaatggggtcaaaaccctaagccatatgagctttgggtgggatagaaaatttcaactccggtcacataaaaaatgcattagctcattgcctaccatagtttaaacgatagttttatgatctacactcatctcgatgttgtctagtgtgtggcctagacagtctcgaagcttctagacgtgatttggtttgttcaaactattatctaggcgaacactggctatatatttgaattgtcaactttatcttattacgtctaatttgtgttaaactatttggtgcatatataactcaatatacataatattggaattaaatgtctcgtactgaaatctagacggttgtgcaataataaaactataggtttaaaactaagtatcgcaaaactatagatttatgatttataataatagaattatctcaaaactacatattttggaggtctaaatcctacatttgagttatcaacattcatgttttgtaattatattaactaggaaggtagcccgcgcattcgcgcgagcatgtaccgtatgtaggatgaatttgagaaacttatagggacggtataccagcgaaataatatataaaatgtttcaaaactgtgattgtttttcatgagttttcttcattagcattacaaaatgaatttaaattttatttataaaattacatattgaagattggggttggtaacttatggtacctaagacatgactcttgaagtttcatatggaaagagaaaaaacttaggcctattgggatcatttagtccttagactaaaaagtttagtcgcttactgtttggatccagggatttaaaaaagactaaaggcatgtgctctgagcgagaaagaagaaagaggctgtcactttagtccctataagtaccttcaagagggattaatggattttagtttcaatatgcacttttagtcaccctgtttgaattcttagggactaaaatggagggactaatggattagccccattaaccaaatttggcctaagttataaaagacattacatatacaaccatatataattaatagttctactgatttatgtagaaaaaaatataataactttattatttgatggcagacatcgattggtcatagctacggataattcctcataggaaattataaatatgtgtacagtatagggatacaaattagaaaaaaaaatagtagaagttatgagaaaaaacaaatatatgactctcaatttttacttattcggtagtccgtcatttctaaccgttggatatttagataacctagcatattatgcatagtccaactaaccaaattattcatcttacctcatcacgtcatcacggatgttggacatgttaatctggataaatctatgtatctatgatttacatatataaaattttaagtataataaaaaatacacactactatgccaatgtagtgaacgatgtgtgtgacaggttcaccatggccggcttcaacatgaacatgatcacgcgtacctgacgcagcagctggacctaccgctggtggaggcctcgaacctcatcaccaacttcaccggcacggctgattccttcgccggccgcctcctctggaccatcgccgccggcggtgttctgtcccagctcggcatgctcggcctcgtcgtgtccgcactcgtccctaccctctgccccgcgccgtgcggcgctgccaccgccgccgcctcgtgacgatgactattttagattatgtatgtatacgtacgtacgcacgtatgagagggtgggactatgggagaagaggtgggttgtgggatttttttttctaaagataaatataatagttaaaaataataggtctagcgatttattattattattatagaaatattgggtccaccggtttattaaaatgccatgtggcggcttagaagcgtttgtaggagtctcacgtggcggcttgagagcgtttgtagaaagtttaatggacttttagtatataataatagatagatagatagatagatattaaacctgtagttttgtgataattttattactaaatttgtagttttacgatactccaccttaaatatgtagttttctgatacatcactttgaattttagttttacgataatttgatcaaagtatatgtagttttgttaaatttacttaaaataattacaatatatctttctgcaaagaattaaagaaaaagtgcaaaagtgttatgtagcttataaaccgaacatatgtgccgaaacaatggaaactatttttaggacaaaacttttacactcctatttgtagcgatctagactgagcaacacaacgatgaaaaatacccttaaattaattaaaaaagacgaaaatttaaattggaattgattgacgcctttacttctaacaagcagactcaaaatcaattctggcgatctcctgtaaaaggcaggagaaattgggtttgcgatctttatatgctgccagctgatcgaagcattaactaatctatcaagacatccatttatgtgacgacagcagtagcatctctaggttggtggttttcttaatcacaccgaataaatatatcgatcgcgattaagttggacctaaaccgcactttatttggagtacttggattcttcggttgtactactacagcctgcaactgcaaaagaagcatctcgatcggcccatgtgtttagtggcgcaatcatgggggttaagtacgggcagcgcgcgcctaaaaggcgttttaattaggtgtttttggctaggtgacatcctgttctaggatgaattcgtctatggtgaaatgatcggctggtttggtttggtttggtttgtggaattaataatcaatcacgctagaacttaccactttgaggaatagggcattgcgattggcatatctgtttcttttttctctcatatcattgtcttctagtactacatccttatatgttattttcattcagatcagccatgataggggcataaactattcgttcaaaaagataggggcataaactataacatcttatttatgaaagcaaacagttgtaatagattcaaaccactcaatcgatcctttaaagattaaggtatcatttgtggcatttccatacaacatcaaataagtatatatattccatatcaatcgtatggaattggatcctatccagtatcgcgtggatgcaagaaccgtcattgacaggttcttccaggttcatatatatatatatatatacatatatatatatatatatatatatatatatatatatatatatatatatatatatatatatatatatat

SEQ ID NO: 16721 - DNA, 2263 bp, Oryza sativa
tatatatatatatatatatatatatagagtatatttgtttggagctatatggtgctcgggcaccattgtttatattgagtataaacccaattcagatgagcatgagtctttttcaattagttaggtataaatattagcaactttatacactagttaaaagcaagtttgaactgaatttgaacttgtttttgttagattttgattctaggtatatagcacccacacacaaaattagttgggtaggtaatcatggggtgtgaaataaagaaaaaacagagttgatttgtaaataggtataggcaatatctatatatatatatataggtatatactccacatatatatatatataaatatataagtatatatgtggatatatatatatatgagatatagacaccaatgtatacatatatagagatatatatatatatatatatatatatatatatatatatatatatatatatatatatatatatatatatatatatatatatatatacttcctctgtttcacaatataagtcattatagcattttccacattcatattgatgttaatagattcattaacatcaatatgaatgtgggaaatgctagaatgacttacattgtgaaacagagggagtaagtggctattactgtattagcgtgacggagcgtggggctcctcaccgggagaccgcgcaggcccccctttgccggttcggccgggggccctgggtgaggttctaagctcttggttttaggaaggttttcgagagtggaagaagcacacaagacacgggcgatgtatacaggttcgggccgctgagaagcgtaataccctactcctgtgtttttgtggatctgtgtatgaagaagctacaaagtgcgagccagcccccgatcgttctcagatcgttcggtcccctctttttctcctccccttctctaagtgggcaaggtcctccttttatatcttaaggggataccacatgcaccatctctctcttttgtgtggggacttatcctatcttttcataaatggacggagatttgtatggttgtcgtctgaatgaccttctgatgggacggcccatacctacctccacttccgccggaagcaggcgcgacgtgggaacatggctgtctgctgacgacatgaccagtgtcagacggtcacagacggtcacctttgtccacgcgtgtcagtttatcaatctgcatgttcgcccttcttcatacaatatcttgcctgtaatggttaggatgaagcctggaatatatctgaccggaaccaacgtgccatctccaggagctaacacgccggctccggctagggacgagtgcttggaggctctcgtcctgacggatggggcgaggcgtgcgtcagaccgcctgtcgccacctaacccacgatctgatcggtctgtgactggtcacagaccggataaacgagcgcgctgcactgcgttacatgcggcgtgacgcgctcgtccaaaccgcaataaatgtggttaggtgagccccgctgtgctcacctaacccatacgcgcggcgcaaaacccacaaggggtcggggcgcctcggccctcggggccgaggcgggagcggtccaaccccctcggggagacagaggagggcgaacacatcacccttgggcccgacgccccccgagggtgccaggctacgtgggcgattgtgtttgcctcaagcctctagtcatgatactcccggtcccatgtcaccgacaacaacttagaaaaaattaaaagaaaatagaaaaaaatctaatacccttaaaaaccaatgttcaaaatcccagacctcccatagttttcagcgcattttttttgaacgaatcggtgagccgccaatttcattgaatatagaaggagaaaactgtacagtgtaaagggaaagaaaaaaactcaggacctttcgccctagtcaactaaggaacaagccaatttctcagatgatgcgcgcctgctaaggcctatatcttggcctcgtccttgatttttgtcagaagaccactcggtgggagctccttatgctggaatgttctgcgatttctttcattccagatctcccagacgactaggaacgttagggagcgtagagcctttttgggtgcctcttttacacttgtggtttgatcccccattctaacaccgacgaaacctgccaccaatggttggggtggatattggggtccccgtccattccgctagggtcgcccatattctctttgtgtagcggcagcctgcgagga

SEQ ID NO: 16722 - DNA, 16136 bp, Oryza sativa
tgcgatttctttcattccagatctcccagacgactaggaacgttagggagcgtagagcctttttgggtgcctcttttacacttgtggtttgatcccaccattctaacaccgacgaaacctgccaccaatggttggggtggatattgttgcacgccgtccattccgctagggtcgcccatattctctttgtgtagcggcagcctgcgaggaggtgtagagccgtctcctggacccgacgacataagggacatatggatccatttggccatccgcgggtagatagtctatcagaggtccagactctattctgaatgaccagccaggcgaaggttttgcatttgcgaagagcccagggcttccaaattaggttgttggccgttgttccaagtagttgtgcattataggccgatgttgccgtatattgaccgtggctagtgagcttccaagatatttggtcgtcctcatgttctgtcagctctattgtctggatggcggtccaaaccgtgacaagttggtcaatcagctctgttgtccagcccacgtccgctggaaatcccagatcgagcagccattgatctgattgcaaggcatgttggagggtactattctttttcttggagaccgcgtagactagcggtgccacatctttcatccttctctcctgccaccaggctgactcccaaaaactcacagtcgccccatttccgattgttatggatgtcgctgctgcgaaaaggagcttatcggtgtcatcgcacggcgtaccagaacccacccatgctttctccggtgacttccattcctgccaaagccatcggaggcgcaaagctcttgcaaacttctcaaggtttaggattcctagaccttcggaaccagttttcagcttgcaaacaccttgccaattaaccaagctggttccaacactgaacttttaggggtcatctcccttccaaaggaaggctcttccgaagcgaatgtaaaggactctacggccctgtttagattccaatttttttcttcaaactttaaacttttccgtcacatcgttccaatttcttcaaacttccaattttagcgtggaactaaacacagcctatattccttacacatgcgtgaacatttgtattctcaaagacagcccaaaattaatgtatgctttggtacggtatatgcctgatcttttgccaatttggatgcccacgtatccgacagctctctgtgagaaagcggttacattgaaaaactacaatgttcacgagggattggggaagcgtcggcagtgactgtatatttggacactcttggatggtcaggatatcaagctttgtcaggcaatccaagttggcaggcaaagagttccagctacaatctgtgattgagaggtgatgcagaagaccgaaacgctcaccaatcatgggtgggttattcgagcctttacaactccagaacataaggatttgcaatgcggccgggaattctccctgctgcacgaccccttttactgacaaccaacttgggtatgtcgtaccattatattccctgatgcaaagggatgtaatccaggctggtggatggagctcctcaaggacctcagcttgcatttgaagctctggaccgctgctcatctccgttacaggtgcagttcttgatgcggagcgttcgtcaccaccccaacttagcgtcagatcagttatatgcctcttgtcagctagcctggctcgaacagcctcctctttgcttcttatattatcaagacagtcaatgaacatcctgccacgaaggttgttcaggtattccagctggtgtatctcatatcccttctctttcctcacagtgaagcgaaacagatttcggagcgatttcagtctccctatgttgggaatgtccaagcctttccacgtgtgcatataccgcaaattgacaaggttccccattttcgccggggaggaaaactgcaaattaacgaaaggtgtgaccgaaaactcgtggagatggtaaagcttggcaaattcggctggcaaagtgatgtcgttgtaattaagggatggcgaaataccaagataacgaagatgttttagttcaccaatacatgctgggaccgtcctcatatcttgcaagtccaagtacaccacccgcaatttccttagcctcatcagcacacgctcaaagtcgtttttactcatctcctttatggaatagcacatgattagtgtgcgcaagtttgccagctccaaaatctgctcggggaatacttcatcgtagaacattatacaaacatggcgaacatatttcgaaatatgttgtacaatgcctttcttgatttcaacacggtcgctgccagcaaccatctttgctacgtcatacaacgaatcatgagccgtgaagtactccccagaactagtgtcagaattaaccttcctttttagctgaagaaatgagcacacctgcagttcatgaaagtagagctcgccgacatcttccatatcctcctctcttgcattggttgtcttcaccaaaccctgtgctatccacatgctaataagtctctctcgttccaactcatatcttctaggaaatatgctatagaattcaaagcatctcctgacatccatatcaagctgttgatagctccagagcagagctcctgtggtagaattcaacacgtcgaggtttgatgttgctctccaataagtgatatctgggttttgcttaagccggacacccactattactgctgcaataggtgacctttgtagcttttctgcaatttttctcccaagtggtataaaatctcgatcatcaaagcttgtgccttctagtgcgtaatgcatgaacattgaaaagtatatctccttgtccaaatcagatatttgaatatatctattagctcgtagagctacatctgttcttctagctgtcactaggattctgcttcctctcttcccaacatcaagtggagaaagtaaatctcgctgctcctggtcattcttatcattgacatcatccaataccaacaagaaacgtttgcctcttaattccttcttcagcttattttgtagttctctacgatcagtaatactggaatgccggttttctgtgatctcctcaagcatatcatgaaatatgtagtctgctctcaatgtctcagaaacatgaatgagaatgatagggtcgaaatatttgtctttatcctctttttcgtagtcacaaacatattgtgccagggtagtcttgccagatcctgcaatgccatgtatgcaaatcacacgataacacttactgttactggagcttgctgcatgatcatctggtccctcacggagaatcctatgaatgacctcacgctcctcatctcgaccgaataccgttggtttagtaacaggtttaatgctctgcctgtaattgctggaaattgtattccatctactgcttctttcctggttcgagagatgtgattgatgcgattcggtgcaaagatgtttccagtcgttcaaaatttcttctatcgcttctattcttttcctcaacttccttttggcacaaatagtcaggaaagaatcactcccctgcaagaaacaaagcctcaaatgattacacaagctgattgttgaaaatatatgatccgcatttcttgatattttgggtttactttccttcaaagactcttagttctcctttacaatgcaacataagaagaaacataggtcccatggtacgtcatatttgtaaacgaaaagtaatttgtagataaaacttttatatatgtgttcttagcgatttaaaagtaaatgctgaaaagtaaacttcgatgaaaaacccccaaatcaactccaaatttaaggttgaaaatttaaattttgactgataagcataagtataagcgaaaagatgaggctgatagaaagcagaatgcagataagaaaaaaaaacaaagaaacgtaaacacatgaagttcatggcatatcttttcaattttataggaacataaaacaatggaagtacagcaggaaaagcactgaaaatattaaaattaaagtagaacatgtgcccaattaacaatcatatttattattttcataattaataattatacaataaatttgaatctatatatttctgaagtgatacaatattacatattgatttaacttgttaaattctttattattattattattattattattattattattattattattattattattattattattattattattcttcttcttcttcttcttcttgacgacatgatatggaagaaacgggaggacaccatatagtactacctttgcctcaatttatgtatagttttagatttctgtgtgtaacgtttgaccgtccattttatttaaaaaaattatgaatttttttttaaaaaaagttagtcatacataagtaccattcatgttttatcatctaataacaataaaaatattaattataaaaatttatcaaataagacgacgataaaacgttggatataagcgttccaaaactacaccctttttagaattgaggtagtagagtatgtggcttgtgggagactgacagaacgtaccttgtagtttgtgatgcccatcacttcgtaggaccagttccggtaaaaacatgcaagctggtagaaggaacggacccgttgcagcgagggtacaatgtctactccttctagagggaacggatccgtagtatccggtggaggccgagaaattggtagcggcgcggcagatgcagatttgctgctgctacagttgggatccggagccggagtatccagtggtgagcgagaaattggtagcagcgcggcagatttgctgctacagttgggatccgtagaatccggtggtgggcgagaaattgggaacagcgcggcagatttgctggtgcaaagcttgatgcaagcgccgacggcgtcctggaggtagtgcagccagttgatgtcgtcatcgcaatctgatttggtcgtgcacgtacgcatttttttcatcatgctctctccatcctttgatcgatccagattgattagaaagaaaaaaaaaagatcgaaaaaagacacataccattgaccttgttcttgatttggtgataatcgatgagatccaagatgtcctccgcttcgtacaaggcagaccttagctcctcgcacggttgttccagtttcttcacagcagatctatcatcttcagcttctttctgcatcctctgctcctctagttctctcagcatatcctccagttttgggagggtatgaatctccagttcccggagcttccgcgacgcgttaaagccgatgtaggaaacgaatttgttcacgagcaagttcataatgggcgctatcaaccatcctaccacggttacgccccaacccacagctgcaatcctccatggatttgccatggaacgcttttgagaaatgggacaaggagcataggaaagaaggattggagctctctactgtctcggtagctgctagctgcgtcctgcgtgcaaacattgcaccctcacctcgatcattgaccggtcgtcgaaatttccagcgaatcatcttttttttaaaaaaaaaaaaaagaaaagtgactagtactgaaaatgacataagtacataatatgtggacataccaactaagacgggcagacttttcaaagaaaacgcgtagtcaacattaaaaactgtccgacttttataactgacagcacaaggatgagtaatatgaagaaatctatctatctatctttttatactaaatccattaaacttcctatgaacactctcataacgccacatggtattctaaaatcgctcttaaactaccacatgacgctctaataaaatagagaaaattttaaaaattctaagaaaagaaaaatatctagcatttaattttcatttaaatggtagacccattagtttaccccgttagattagatccattataaatagtaatctatccctcctaatctaccatgtaatacttacctggaaaatattagccggaataagccaagaaggcataagttcaagctaccacatggcattctaataaaatagagaaaatcttaggaactctaagaaaaagaaaaatgtctggcctttaatttttatttaagtggtgaacccattagtttaccccgttaaattagatccattataaatagtaatctatccctcctaatctaccatgtaatacttacgtgaaaaatattggccggaataagccaagatggcataagtaagtacgagttaacaaccacaaaccagaaaagaagaaatgatatacagcaaaaaagaaaaacaaatattgcatatatacgtactacatactacttggaaaaaaaacattgcttttaaaactggattttcacttcctctgtatttttttttacgatggccaatgttaaatatttagtgaaagtaccgaaagaaaacaataattttaaaccagattttctattatacttcctctggatttttttattttctttatgatgatcaacgtcaaatatttactgaaggtggtagtataagaaaaatatattacttcataaaacatgaacacccaaaaatagatctataatataatataaaatatcaaataaatgtatcatttcacactataattgttgagtatagatatattttatttgcattaatgggcctaaattgatagttcaagatgaaataatgagtaattaaaatattactcgggacatattgtcataaacatgaatataaatgtattgtttaaaaatatgttgcatttttttctcacaaaacatagtcaggattttagcagttaatgactcaatctacgcttttgatttgtacatattttttaagtatataagtaataaatttaaggttgagttctaaagtgcttatcagattggctctccctcatttatcttgagcatgttctccgaactattaacctatgcgtgttttgcaaatactttctatacatttttataaaaatatatatattttttcatgtttgtaatatttaatacttaattaatcttgtgttgatgacctacatcatttttcatgccctgcataagctcaaccaatgagatcgaatgtagcctaagtaggagatagattagattatttactataaaatttaaaattaaagaatcaagttaactacattattaaaaaaatcattagtttgatcatatatactctacgaactgactaaagtcacgattattgtatttgcatggtatgcagatcgttggtaccaaggtatttgcgagattgaggtaaaagagatggagacaaggatttttacacatgtttgggccccttatttgacaggtaatagccctactcctattggccgaagctggtgtgctctatattcatcagaatcacacaagtacaatatttgggataacctatctagctgtcgtcgacttggcagcatagataaccaacacgtagtcgacagcatggtagtcttcctcctcaagtacgaactcatcgagtttagagatggtgctagatccctcttgtcggcctccgcaggcatcatattgggtttgtctaggcttatctctgatgtcgatgtttagcagcctgtgttggtatctattctgacttgtgtgtcgatctgttgtatcctctctcccctagggggtcttgtattttatacccatagatagccccttgtccaatatggatacaattcgagtagtccttgtcatttccgtatacaactatactcatccttccttatccaaaactcctatatgtgaggtataattccgtataaggcttggtatatggtggccccgtcgagcttagtcgattactattgggtatgtggtatccataaccatgacactattgttcactgatccatacattttttaagaaaaaagcaaataagttttgttgtctcctcactatttcttagctattaaattaaaacagaaacaatcaataatattggattttttagaaacacagcacacgtacaccctacctctttgagtacctccaaaagactaagctgacacattttgagatacaatgtcaccacgggcgtctcactgtcgacgggtacgtcacataccaccgaaagaataattagccataaatacgagcacagataactattgtattaattagctattaaattaactataaatgatttggagcaagtagttaactatattattaaacttgctcttagcacccatttcaattagttcaagaattgtggtggattccttggggacgtaactacacagctagtggtagctggtttgtctataagaggcaccatccacctatacttcaaatacaattttctcttaaactactcatccgatctacgatccgattacaccgttgtattcataacaattaaatctttacaacaagatctcacatgattatattttgatgaaaaatcacaaattacttttatgatatgtctaaattacttttagatttcactaagttacttcttagttatataaaagtaaattcagtaaaacctaaaagtaatttaacttagaacaaaacgaaggtaactttaagatgtcatttgaagtaaatccgttgtagagataaaaacatgactctatctagaaattaaattaatcagcacaaattatgaaattaactaaaataataataaaagtaatcatctcagagcattatgaatgtatagtaagtattttaatcaaatctaaaagtaactcacacacacacacatatatatatgataatttgttcaatgaaaaaaggcataaattaaagttacttctataatatatgtaaattacttttagaccttactgaatttactattatatgtctaagaagtaacttagtgaaatctaaaagtaatttagacatatcataaaagtaatttgtgatttttcatcaaaatataatcatgtgagatcttgttgtaaagatttaattattagaaacataacggtgtaatcggattgtaaatcgaatgagtaatttaagagaaaattttatttgaagcatagatgataggaatatttcccctacttactcaatggattaatagcaaccaaaactcctagagtaatagcacgtggatgtctctgattaagactaattggagaggcctcttcaattagatttaccgattccttggccacctttctctgtccgacccttctttagaattcccgtacctgcaatcctttttagaaagacacacatcattttgggaacacacaacagagcattaattgcgcgtgtcattccgttaagagaggttagagcaagtttaatagtatagcccattactagctccaattcatctatagccaatttaatagctcatctatacaatacaatagttacatactacactattaatacatggtcccaactgtcatacacacactgcgtcttagagtccgtgctacagttggctacaaatctgtagcccgctgctcttctctcttaaaatatgtttgcagctggcttatagcctgctattgtacctgctcttagatcaagtttaatagtatagctcactactagctccaaatcatttatagtcaatgtaatagccaattcatacaataactctttactatactattaatacctggtcccacctgttatacacacattacgtcttggagtccgtgctgcagcaggctacagatctgtatcccgctgctcttctctctcttcctttatctctttaaaatatgtttatagcctgctattgtacctgctcttagagcaaggctaataatacaactgacctgatggctataaggttctttatagccttctcgcagcttacacatataatagttagctctttaattgggggtgaagaatgtccggttttgtggttcagggggtaattcggacgaccgtgatagttcggggggtaattcgtactttttccattaaaataaaaccggagggagtaccatacaacatacatcgaactctgcactgacacatgaagtggaactcgcaagtatcagaatcaatatatacaaaaccatttgtaaaaaaaaaaagcaaaattcaatttttatcactactatgaaagaggtttttccaaactgtcaaaatcaatctttccatgcggttgggccagccgtctgcacgagaagtgctgtaaagatcgcgattttttcatgcatgcaaaaaacggattttcacatgcgggtgcttatgaggaccgcatgcaaaaataaaaaatcatgaaaaaaatatgatttcaaaaataaaagccaaaccctaaccctgccacccgctccatcatcggcgtcggccgagcaccatgccgctgctcccgccatcaccgtcaccggcgctagatccgtcacggcgcgtggaggtaggaagcggccgccacgccgaggttggcatcgccagatcctctgttctctcgccacccaccatcgccgaggctgcaaccgcaccgaagggcagcggatccgcccccctcccccccccccaagggtggtgccgccggatccgccgccctcaccgttcaccgtcgccgaggtcgcagccacacctaagggcggcagatccccccacccctccttgagggcggcgccgccagatccatcgccctcaccacccaccgtcgctgcccgctgtcgccgaggtcgccgctacacccaagtgcgacggattcaccccccctccccctcccgaggacggcgccgccagatccgccgcccaccgtcgccaagacacaaccgcactcgagggcggcagatccgccaccgttgcagaggccgtgtagccgctagccatcgcaccctcaccgtccgcccgccgccgcacccaacggccggcctcctcgtcgacgtcgccgcccgctgccacccacgtggattcggaggaggagaggagaggagaggataggagagaaagagagtagaggggagaaatatcagagagggagagagacgggtgaaatttttaaagtgttgacgagggagagagagagagagtaggagagaaaaaaaagatggggtatttttgcatgcagacaacttaaccgtccgcacgcgaaatagagttttgcatgcgactccttaagatcaccgcatgcgaaagtagacttacttttgcatgtggtccgttaagaggtacgccagcaaaaatagattttcgcatgcgcttctcttaacaagccgtatgtgaaaatatgggtcaatttttgcatacgcggacacttacaatccatttggaatctattgggggtctcgtctagaaaaacgttttctctagtagtgtatccttgtttttcgcaaattctattttgcaccttaattctagaaccagttgttttatttactgtagtatttacaaacctgacaaatagcgcagtagactatatattcactactgtttgaattggtcttacagttcgctaacatgaactattgtttgctagaatagcgttgatgtgtacttcgtaagtcattctagcattcccctcatttatattgaggttaatgaatctagatagatatatatgtctagattcactagcatcaatataaatgtggagaatgctagaatgacttacattgtggaacggagggagtacctagttattaataagtggcattgatgtcagcagcacatgtataacgggattgtgctagtgaaaaccactgtcaatccaaacaaaaccatggtacaagcagggtccacactttcagaaaccaccaaaatttcggaagtggtcaccaaaatttcgtaaattttggtactcttttgcacaaaattattttaaagttcaacaaatttggactgaatttgaatatatttagaccacattaaagaaaaggaaaatcaaaaaatttcggtcgagatagttgcttgcttggggggggttaaaaattttcaaaatttcgaaccaaaatctctaaccttgggttcaaggtgtttctttatgcatgttctaaaagtcaaggatgaataataaccgattttatagtttagggacgaaagtagactttgagaaaggtttaagggcttaaactagacttttccctttttaaaaatctaggttatgagttgagagaccaaaattgattacaataaaacatatttatatggactattaaagcaagaaagattgttataaaccacatgtacgtatatatatggttttgctaaaaaaaactttcgacggatttattttctcaaaactttcaaattttccacagtaagatgctctttaagatttgtgctaccgagataaaaaaaatacttgcgcacgaacaaggaggatgaatggatgatgatgtgtgtttgcaagttagctgcagtagccactagcgatgatgtgtgtttgtgaaagaaaagattaagttgcatactagttatataacagttacattgcatacaagttacatttgaaagtttttctctaaaaaacggtcgcatgctttataggtactttaaaccatgtaaaatctgtcagccagttggagagcacccatggtttttagccgcggtacactggcctttggttgaaactggatcgaactacacaatggtttaaatcaaccgccttaattcagtcgattttaacgactgtgcctcaagtgcaggagagcatgataatgatcctcatgaggttctgacttctgagtggatcacgcaaagcaaccagtggaattagtttagattagcaccactggaccattctacttgtgtatttatacatattataagaactgaaggacaggtacgtgatcgatcgatgcagttcatgtggtgatctaacaatttttttattagaaaggcacaaattaatcaagccatagacgccattccagtgttacttggcttgggatctcagcggccttgcttattaattaatgtcctcttgtcgttgtgttccaaattcggtgcatgtacaccttacttaacaaattgttggagcgtttgtaaaattatttaaaattatttgttggttgatctacaaagtccactctcttataaagtaatgcagtttgcccacatgatgaacaagtcaacggaagaagcaaattaatctgcgcccatagtttcggccgatttcgggtgggtttcatatcagttttactctctccggtttcattttaattgacgttttggacatcaaaattttataactttgaccattaataactttaaaaatatttagaaactaaaacaacaaatatagatctgtctttcaaagcactataatatatataatatataaaagtaaacatatatttatttattgtatatattataatagaaatataatgtcaaaggtatattttgtagaccgtgtcgttgtccaaaacgtcaattaaaataaaaccggaggaaataccatataacgtacatagaactctgcactgacacatgaattggaactcggaagtattctcaatatatacaaaaccatttgtaaaaagaagaaataaaattcaatttttatcactgctatgaaagaggttttcccaaaccgtcaaaatcaatctttccatgcggttgggctagccgtccgcacgagaaggtctgtaaagatcacgatttttccatgcgggtgcttatgaggacctcatgcaaaaataaaaaatcatgaaaaaaataaaatttcaaaaaaaaagccaaaccctaactcccgccgccacccgctccttcaccggcgtccctccccccctccttgagggcggcgccgccagatcctccgcctgctgtcgccgaggtcgccactgcacccaagtgcgacggattccccctcctcccgaggacggcgccgccggatccgccgcctaccgtcgccaagccacagccgcacccgagggcggcagagccgccaccgttgcggaggctgcgtagccaccatccgtcgcaccctcaccgtccgcccgccgccgcacccaacagccagcctcctcatcggcgtcgctgcccgcttccgcccacgtggattcggaggaggagaggagagagaacgagaggagaggataggagagaaagagagtagaggggagaaatatcagatagggaaagagacgggtgaaaaattttaaagggttgagaagggaaacagagagtaggagagaaaaaaaagagggggtatttttgcaagcggacaacttaagcgtccgctgcgaaaatagagttttgtatgtggctccttaatagcaccgcatgtgaaagtaggcttatttttgcatgcgcggtccgttacgaggtccgcctgcaaaaataattttttttgcatgcgctcctcttaacaagccgtatgtggaatatgggtcgatttttgcatacacggacacttacaatccgtttggaatctattgggggtctcgtctagaaaaacgttttctctagtagtgtatccttatttttcgcaaattctattttgcaccttaattctagaaccagttgttttatttactgtaatatttacaaacctgacaaatagcgcagtagactatatattcactactgtttgaattggtattacagttcgctaacatgaactattgtttgctataatagcgttgatgtgtacctagttattaataagtggcattgatgtcagcagcacatgtataacgggattgtgctagtgaaaaccactgtcaatccaaacaaaaccatggtacaagcagggtccacactttcagaaaccaccaaaaattcggaagtggtcaccaaaatttcgtaaattttgggattttggtactcttttgcacaaaattattttaaagttcaacaaatttggactgaatttgaatatatttaaaccacattaaaaaaaggaaaatcaaaaaatttcggccgagatagttgcttgcttggggggtccaaaatttcgaaccaaaatctctaaccttgggtacaaggtttttctttatgcatgttctaaaagtcaaggatgaataataaccgattttatagtttagggtggaagtagactttgagaaaggttcaagggctaaaactagacttttccctttttaaaaatctaggttatgagttgagagaccaaaattgattacattaaaacatatttatatggactattaaagtaagaaagattgttataaaccacacgtacatatatatacggttttgctaaaaaactttcgataaatttattttctcaaaactttcaaattttccaccgtcagatgttctttaagattcgtgctaccgagataaaaaaaatacttgcgcacaaacaaggaggatgatgatgtgtgctttcaagttagctgcagtagccactagcgatgatgtgtgtttttaaaagaaaagattaagttaaatactagttatataagttatataatagttacattgcaattataaactagttacatttgaaagtttttctcctaattaaaacactgtcgaatgttttataggtgcttcaaaccatgtaaaatctgtcagccagttggagagcacccatggtttttagccgcggtgcactggcctttggttgaaactggatcggactacacactggtttaaatcaaccgccttaattcagtcggttttaacgactgtgcctcgagtgcaagagagcagataatgatcctcatgaggttctgagtggatcacctaaaaaacaaccagtggaaatgtggaattagtttagattagcaccactggaccgttctacttgtgtatgtatataatatatatatatatatatatatatatatatatatatatatatatatatatatatatatatatatgtaagaactgaaggactggtacgtgatcgatcgatgcagttcatgcaaaagctagagcagatgataatgatatatatatccacatgaggtccgtgatacttgtcgtgccactgcgataaccacaccatcaacagctagctaaaataatcatgggattcgtcgccgtggtcgatatggtttccgggctcaacagcccaatggcgagattggtccggatcgaagtcctggtgctgctgggcgttgcagcgctgtttgtgctcctcatcctcggctcctaccggcggcagtcgagccgcaatgccgtcagggtgagcatctgggtggcgtacgctgcttccatccccatggtgagctacaccctggggctgatgcagtcg

SEQ ID NO: 16723 - DNA, 6171 bp, Oryza sativa
gcaattaagaatttaccacttgctatctatgacatgtgtgccttcatatgtatatgacatgtgggtctaatgacaaatcctttattaccactcataaatgtggcaaatagtaattattccccattcaaaatacgtgacaactttcccctatctacatcacgtattcacgtgatagtgattgatccccttgtgtcgaaatatgaattcggcaataatgaaagggggtagcgcatgagacctaaaagtggatggatgcagagacaaggatttagacaggttcagaccctctcaatgagaggtaataccctactcctgtttggggatttgaatccgccgggtgaattatagatctgatgatctagttgtgtctcatgcccctagagggcctcctgcccaccttatataggatgggggggtaggattacaagatagaaaccttaaccaacacggtatcggtttcctaaatctactttacaatattaccaaaccaggactttaggccgttccgtaatatacaaggaaacgtaatacccaagtcatgatctgttatatattccatagatataagttatcccctataactagtcggataaccatgccgtgtgggtatggggtacccataatctccacagtagcccctgagaccttcacagtcgaaaagataatcttctctcgaaccagattactccaaagccaagtgcttcaatcatctttgccatggtctcccgagtacttttaccaaatatgaagactgtggagggctgaaaaataaagtcaagtgcatcgactagatgcacctaataggtgtagcccccgactatgtggtttgctgaacaaactaagcatacagtcaaggaataaataatccaaccaaccgagtggttttgataattgtaatcaaccaagtgacttgatatcaatatatagcatatgcggtgtgaatcccccaaataacatgatccaagtgatataccgactgctttataaaaattgatgtgagcaatctaaagttgactacatcattgaaaattcacatagcaaaatagctataaaaaagctcgaatgctgtgaataaagaaatttctaaagtattgggcatacgccatgtgcacactgctttaacagatgtgcttaagtctctaaaagacacatggtttcaccacacccgaaaatatacggcatatgtggtgtaaaatccgagtaaataaactcataaaggatttaccaaccgcctggaaaatgaccaatatatataatcagcctaagccataatattggtcaataaaattgcacacttacgtggcaaaaagcaacgatattgtatccaatcaattgcttaaaaacccaaacaacaccttgacttatataaaaaagtcagcggggcagctatataaagctttactatttgacattttttaagatgcattgtaccaactcctaaaaagttgagtaactgcggtataaaaggattttaaggtattgggcacttgatcacgcgcactttggcctaagcaaaaagtgtttaagtccctaaaagaacgtgacaggccacacctaaaaatatgggctgcagacatattaggcctaggccaaaaaatatgccttcgacacccttcaaaggatgacgcatgtaacatgctcccgagtaataaatcttccgggtgatatagaccaagtgtagcttatataaatagcttctgatctgagtgattatctcttatgggatactccaaaatagatataataattgaatcccgactggcgcaagtattcggttgataacccttattgggaataataaatagttcagtctttgagcatagaaaatagacccatgatcatgaattcatgttgcatgtatccggaacaagtccaaattgaaggtatgatacttgtatttgagctagtaagcccctgagcatatagcttgtccttctgtcgtagtcacaattgttcattgatggtagctgacacagttggcatagagacaagacgaccaatatagagataatattgcccaccagaggtggcaaaaatattggtggtagtgaagatagtgataccaatcaaaagtgatgaagtcgcacagccgtggaggagaagaactcagtcgacagcagtcaggctagcaagcagtgtagatgaagccatctggcaacagtgacagagttgtgtaaccatggcggcaaaataatcagtcagtggcagacaagacggccagtggagaagtcaaagtcgcacatcagtaaaggcataataagccagtcgtgaaggcgatgacaccagtcggtggcgacgaaggcaagctgatggtaaagatgtagatgctcatcaagagtaatggcgaaatccaccaatcatgaagattaagaaaataatcaacgactacaaatgcaactaacggtaatggcgattagcagcaacagagatgatcgactatgatgacgaagttgcccatgaacggtagcagagtaggctatgttgaagaggcttgataggatgttgatgaagatgagatgtcggtgatccagtcaatagcagtgtagcagccaatgataatgacgaagacgctcatcagcgtttgtgtagtaggtcaaccgtgaaggcaaaataataagtcggcaaagtcgtagtcatccattagcaacggcggagatgtcagggccgatgaagctgaggtgttggtgatgatgccagtgacaataatccatcaatctattgagaagatatcaaagctcgagtagtttccttgatgcgggcgtgtgcataaagaagacgatccaacgcttcttgatttacgaagatgactgcagaacttagtgttatagctgttgtagatgcttcacttggaggaaagtagatgttgttgtccactcgtctaaactgagctgattggttgataactccaaactcccgaacctgtagattaaatcttgaacttgatactttgagaaatttggagtagattatggcagcgtctagaaaacaaaattgccagtaaaataattggagttgctaaagtagaatgtcttctctgaagcgaagacgaaaataataactcccagagttgactcgttgattgattgatttcttcatcttgacataaaacttgtcgaattttgagtcttgtatttgtgtagcccccgactctttctttagttgggaaacaactgaacatagagtcgagaattgtagcttcttgtcgtcgagtagtcattgcttgagtgaagatacatattgaagatgtccaggtagaaatattgaagattggaacaccacttgtagtagtagaataacacggcgtcgaatctggaagtgcatgccaagatgtcgaagctcttgtagacgtcatggctagtgaagtagcaaaacttgcgaagtagtagcaatagagtttgctggtgccgaagataataaaaatgaagtcgctccaccatggtgacaaagttgcatagccgtgataaagtaaacacgagtcggcggcaacaaaagcaaaccagtagcgaagacgcgtagttgtgaagataaaaacactagtcggcgacggcttaaccagtcggtgacggaagaagtagaatgatgacaaaaacaaagacgtccttgaacggcggcaaaataggccagctgtgaaattgaagtcaccatgaacagcaacggaggcaaactggcgatgacgatgatgctagtcaatgatgacgaatacgcgcagtcgtggaggcgaacaaaccagtcggcgtcagataaagtgaccaacaatgaagacgatgacgtccatcaatagtggtagcggcataaaccagccgtagaggcgaggacaccagtcaacagtaggcgagacgtccggcgatgaagacgataaggccaatcaacagtggcagaatcatgcagccacggaagtgaagaaaccaatcggcagcagcttgcgttgaggatggtaaggcctattagcggtggcggcgacatggccagccgtgaagatgacaacaccagttggcatcatacgaggcggccggtcggtgaagatgtagacgtccaacaacggcggaataataggctagccgtgcaggcggagacaccagtcggcggcggcgaaggcaagccggtcggcgaagacgtagatgcccgacaacggcggcataataggccagtcgtgcaggcggagaaaccagtcagcggcggcgaaggcaagccagtcggggaagacgtagatgccagacaacggcggcataataggccagccgtgcaggcggagacaccagtcggtggcggcgaaggcaagccggtcggtgaagacgtagacgcccaacaacggtggtgtgaccaaccaaccgtgcaggcggaaacaccagtcggcggcggacgaggcggccggtcggtgaagatgtagacgcccaacaacggtggtgtgaccaaccaaccgtataggcaagggcaccagtcggcggcagacgaggcggccggtcggtgaagacgtagacgcccaacaatggtgatgtgaccaaccaaccgtttaagcaagaacaccagtcggcggcaacgacggcaagccgatggtgatgttctgactgatccattcctgaagcgtaggagataagcttaaagccatgaatccctactgtgcatatctggatctggatcctgcagaacaaacatataggatgagtagtatctgatgtaaatataatactcgaggaacattcaagtattttaaaatgtttataaatatatatttctcctcttgtcaattttgatttccccgagcagatgactccttacgtttaaacactctgcccgactagtcatagcccccaagcactgggagtcggcctaggcacttcccaaacatgcaaatgagtgacatgagttcgtcattaatggagcaaagtttcatggatcggagtttactactcaggtacttttgcaattattaagagtagaaaataaattattttatctatatgcttttgatttattccgaataatacttagcaccttgcgttactcggtccatccaacgagcccccgagtgctaggaatcggcccaaaggcaactatccattgacaaaccaaacgggaagcataggaagatagaactccataactcgataggcactttattgatactcggattatttcgtaagcaatcaagataaatattatgaaaattgttgaaaaaatatgatataacatctgtagcccccgtctcactagtcaatggcgaaccagttgatgtagtgaggcagaggaaaatgaaaatatcatataaagaataaaataataatgacttagcttcttggtatttccctcgatgacaacaaaggagaccgatgtaggaacgaagtcatccgtcaatggcgacgaaataagccagtcatgaaggcaaagacaccaatcggcggcaacgaaggcgactagtcggtgaagaagtaaacgcccaacaacagcggtgtgaccaaccacccgtatagacgagtacaccagtcgcaagccgcggtgataatgaaggcgtagacgcccgacaacggcggcgtaataggccagccgtgctggcggctagtcggcggcggcgaaggcatgccggcggtgaagatgaagatggccatcaacgggggtgtgaccagctaaccgtgacggcgaggacaccagtcggcgacgttggaggcaggacagcggtgaagtcgtagacgcccaacaacggcgggataataggccagccgtgtaagcggagacaccagtcggcgacggcaaaggcaaccacggccatcggtgaaggcccatcccggtgagatgtcctagctgactgccaacatgaattggcagccatgccaaatatatagatgaacatactgtagatagcttgatgtactgcattgttcctcaaaaaattgcatggtgttgggtttggtccaattgatctgaacagagatgaaaccaccaaagagggcaaaaactctgcctctgtgtgcacgtcatcgaggccgtggtaagtgcagatcatcgtggcaaacaaaaactgcaaaaagtccggcggccgtgaccggcgctcggaaagctatgcatgtgtgattgttgattaagccatgcacgcacgtgagatggaggcgactggcggcgacttctgtggtgctgatgcggtggaggccccctggtcaactgaatgcatatatactc

SEQ ID NO: 16724 - DNA, 17121 bp, Oryza sativa
tttgtgaaatatgtaaaattatatgcctacatgaaaatatatttaacaatgaatcaaatgataggaaaagaattaataattacttaaattttttgaataagacgaacggtcaaacatgtgctaaaaagtcaacggtgtcaaacatttcaaaacggagggagtatacgcatcttagatagataaatcacttgactaatcaaattccttcctgattgcttgatgtgttacgtgcaattgctgatgacgtggcagctcgatagacaatgtcttcgagtattgctgatcagggaaatagcacggcgacgactgctctgatcggttgcctccctgtgcaggctgactccgatttggtgatcatgccgatcaaggaaagaaatctgcagcagctgagattgaatccatcgaggtcaccgagattaacccttccgactagattggatccgagttggagaagaaaagcttggcgaagtcgtcggcaggcaagtccggggctcccaaagcggaaagcctatcctggagcgaagacgataccggcgacgtcgaagattggttccatcgcactcgtcgacaggaaactcggcgccacccctacctggcgcgccaactgccgaaacatgaattcgacaataatgaaagggggtagcgcacgagacctaaaagtggatggatgcagagacaaggatttagacaggttcatgccctctcaatgagaggtaataccctattcctgtttggggatttgaatccgccaggtgaattatagatctgatgatctagttgtgtctcatgccccctagagggcctcctgcccaccttatataggataggggataggattacaagatagaaaccttaaccaacacggtatcggtttcctaaatctattctacaatgttaccaaaccaggactttaggccgttccgtaatatataaggaaacgtaatacccaagtcatgatctgttacatattctatagatataagttatcccatataactagtcggataaccataccgtgtgggtatggggtaccataatctccaaaccttgcaaattggaattaagattgactcaaccaaatccgcaatcattccgatcgctatcaacccaagaagcaagtacaacgaacaaacggcactaccaacgccccacacttggccactagccacccgtgtccgtacacaaaaggtcgcacattacacgcacgcagctcctccaaacgcacgtataccaaatcaaccctccataccatccctccgaaaagtggtccccaccgtccccatggccccaccatgtcatcgatctaacccttgcgcgggtatgtcaccgctgagtagacaccggataacaaactgccacgtggacccgtggcccccacctcccgagacattaggaaattattttttttaaaaaaaaaagaaaaagggagatagccaaaaacgccatttgggcaaatctagctcactccgaaagatcaaacgccccacccgaaaaagctttcgtaaatcgagagagagaaaaaaagaatcgcgcaccggaaaggcgagaggagggaggaaggctgcaagccctagcgccagggcgaagcaaccggatgtccgggcgcgcgcgcgcgtgggtgcattgcgcgatcccttcacgctgcggcaagccagaggcgaccgggccgccgcgcgcgcgtcttcaccttcttcccgggcgccgatccatggcggagcggcggtggtagaagggtttcgcgagcgggcgtggatccgggggcgggggcgccggtggcatggcgctcttccgcaagttcttctaccggaagccgcccgatggcctcctggagatcaccgagcgcgtctacggtgcgttcccctgcctcgatgccccgtctatatgggattgtatgccatttgattcgttctgggatggatacgccattttggagttcttctatgcgtgtggcattgcggaatcggtaaggtggtgtgcttgcatttgtcatgcaagttttgtgaaatgtttcatcatttttgtgaaatggtttaaggcaattttacagttggggccgcaatccagtttattgggtagaagttgtagttagtgcagagattttggactgttctagaggaaattgtagtaaaacggcatagctgctatctgagcattaggctcgtactgtccaatggatgatatgccattcatactagtgttgtataaatatataacataaggtatttgctgaatggagggcagcttacctaacttctcatgagaagtgatcgttgtcattgttatttactggtgtccatgggaggtcttctatttaatcttggtccactgatgggaactcgaatgttcagtcaagattattttgaattaatgttacttttttgtttgcaattttaatttttttcctctgcaagtttaaatatttttagaattaacttagtaatggcaggtttaaatccgtctttgtatactcaatttgcttctgtttgctgtaccattaatttgtctcgtatgctatgttatgcctagatcctctagattatgtttccttaaccatttatgctttctctaatgatattaataaaatataccattctgctttttcagaattttgaaaaaaaaaatcatttttcctggtgattaataagatccatttatgcctttcaaatgtatgtggaaaagtaaatcttgttttgttgctaaaattctgtcgtcaatgtcttttccttctgtagtatttgattcttgcttcactacggatgtctttaacgatgataagtaccaagactacattggggacattgtcgctcaacttcaatgccactttgctgatgcctcatttatggtgttcaactttcgagagggagaaagtcaaagtttgctggcaaatatcttatcgagctatgagatggtagtgatggattatccaagacaatatgagggatgtccacttgttaccattgagatgattcaccatttcttgaggtcaggggagagctggctgtctttgagccagcagaatgtgttgataatgcactgtgagcgaggtggctgggctgtacttgcattcatgttggcagggctactgttgtatagaaaacagtacattggtgaacagaggacactggagatgatctacaggcaagcacctcgtgagctgattcagttgctctcaccactaaatcctataccctctcagatacgatacttacattatatatctcggaggaatgtgagcgcagtgtggccaccaggtgatcgggcacttaccttggattgtgtaatactaagaaatattccaggtttcaatggggagggtggatgtagaccgatattccgtatttacggaaaagatcctctacttgctacaagtaacacccccaaggtgcttttctcaacaccaaagaggagcaaatatgttcggctttacaagaaggtcggttgcaaactacttgaactactttccgattttagaactggtagattaattggtcagattgtgtctagtgtttcccatgctacctttcctcttaaccatgtagaagaagaaatatatatatttgcttgaagacgttctttcagtaattcctatcatcatcacatctcatttctttcatgttactcaggtagactgcgaattaattaaaattgacattcactgccatattcaaggtgatgttgtccttgaatgcattagccttgatgcggatcaacaacgggaagagatgatattcagggtcatgttcaatacagcatttattagatctaacattctgatgctaaatcgtgatgaaattgacatattatgggatgcgaaagaccgattcccgaaagaattcagagctgaggtatgtattccttgttgaactaaacacattctcttaaaactcgtgcagtatataacaatttttctttatcctctggttgaaggttcttttttcagaaatggactctgtaaatcagttagattccatggaggtgggtggtataggagagaaggagggcctcccagtcgaagcatttgcaaaggttcaagagatgttcagcaatgtcgactggttagatccgacagcggatgctgcagccctactttttcagcagcttacttcatcagaaaacattcagctgagaaagggtttgttgtctccaaataagaaagacttccatcttagctcaatttctccaaccaagaaacagtctgacaatgttgaagataaattaagcaatgctgaactctcaaccatctatgtgcacaaacaagaaaataatgacgttcaggggttgatcccacagaaacaagccaccattcctgatgaaaaatcagggtcgtctgtcatccatgagaagatgatttctctagttcatgaggagataacacaggtagttgacatcaatactggttgcctatcttcattggatatgacagttccttccaccatgaactctagcagaccagttctaatcgaccaaaattctaagcttgatgatcagtttggttcactacagagctcttcacccacaatgattatgtcgcagcagtttccagtttctaggtcaagttctgtcctttccagtgactttagtcctagattactttcagcctgcccaagatttcacagtgcaccttctgcccttggaattacggctctgttggaagaccatgctgcatttggagacactaagaattctgtcaaagtttcaagtgccgtggtcaaaattccatcaaaacagtcatcacaacagcatccaataacaggtctgggtcgatgaatcttcttttatagtatacccatattgtcttttaccatcattctcatctgaacttttgataatgttaacagttactcctgttgtaacgaagtgtacaccatcaccaccaccactgcttcctccactggctccggtggtgccagtaccatctgatgatcaaatgatatcccaggaaaaagacatgtctcaacaggctcaaaagcatccaggttcagcttacacatgttaatatattctagttatgtagaattccattttgtaattaaagttctttccctgtggcagacctttcatcatttccatccctatctcctactcaacaaaaacaatccacatcaaaattatgtcaaactattctgcccacaaatcatcaactgtcctcaagtaacattacgaaagagccactacaaatttctcctgctcccactccacctccattgcctactccatcaacttccagttctagtagttgtcattgtctccctccagattccatgctttccaccacaacagctttgttcagacctccagcaccgccgccaccaccacttcaatctccatccactcctagatgctctcctgttagaactcttgcattacctccacctcctcctgcccctacttcatcgcctgttagaatgtcagggcccttcttccccacctcctccacctgcaccaaactcgtgtcccagtagacctgcaccaccttcacctccaccttcaccacttgcttcaacttcatctcctccccgacctgccgcaccatcaccgtgtgaactacatacttcaacttcatctcctgcacgaccagttccaccacctccaccaacattatctacaattagatcttcagcgccaacaccacctctactgcctggagctacttctgcaccatccccaccaccaccaccacccccctgtagttcatcaaatcaactgtctgctccgccaccgcctcctccaagcttctcaaagaacaatggcagtattgcgcctccgccagcacctcctggtggtaatgctaaattgcctggtatgagggggcgtggacctgcacctccttcaggtccaatgtctaggagccttcaatctggtcaggctgcatccagaaggtccaacttgaagcccctacactgggttaaagtaacaagagcaatgcagggaagtctctgggaggagtcacagaaaactgacgaagcttcaaagtattgtaccaacacaaccacactcatagatggttatgtacattatgagttctatgttaatgcatcttttcgatgacttgtgcagacctccagtgtttgacatgtcagaactagaacatcttttctcagctgtcctgccaagttcagatgggaagcgttcagataagtcaggaagtcgtgcatctggatcaaaaccagaaaagattcaccttgtgagtttttccaaaagatatagcatatattgttgttcggcaattcttctgttaatctgctaaaatgctaacctgcattctttcaatgcatgtataaatatgatttcttgcgagttatgacattcagaacatggatattaattctcttgttggcacatattttcatcatgtacttattctctttattttttactttctggcttccatcgaggcaaacctttcatatctgtgcacaaaaggctttcagttgtaatcatactggttagtgtgcataaattttctagtgcattgccatgatagtttccagtatcactacaaaattgtaccaatcatgttctatatgaggtttcactagtaattgatagatctccttattatagctatagaaatatataatacaataccgctgttttttcatgttgtacttgatattttcatagacttctacgttaacatgatagacttgttaatgtcttaccattctatctcaaaacaagtaaacacaaacatagtctttgtgctttcttatgtctaaatctcctggacttgcattctcatctgtctaccatgcctaaataaacttcatttgattagtcatggttttatttttttgttacattttgctacaactcactagtaaggttaagacatgctcattctaataattctaatgattttttgtcctttgttcttaatcttaaaaccaaactgctaactgttctagtcagtagaatgaatgaaatgtatgcatagttctcagttcagtaatgcttatgttttagggaaggcctacagtctgtattgtaacagttgattaaacaacatgagggcacagccgtttatatcttatttagaacactgtaagaatggttactatccattttgagagttacttggattctgtaacatcctaattagtcaggttatcacaaagattgataaagggacataaaaagattattagcttacactgtttacaaaagccatctcatgctaatctgcatgtagcagcttaagctttaagttagtaacttgtgtaatatattgagcctgagatgctacctagtatttcaccatttcatcagttcctctcttgagaaatgattgtggcagatatatgctacagaagatttttgcttcattcatgatggtactgtaagttttgatgtgtgccttgttagcttgtttttctttgtcctccattgacctgtaaaatcttggtggttttgtatgtcgaacaatcgattgtaaacaatgttatatcgactatttatctcattctgatatgttactgcctatatacacagattgaccttcgccgagctaataattgcggaatcatgctaacaaaagtcaaaatgcccttgcctgacctaatggtaagctgatgaacaaaaaaatttagcatgttttgtgtaactattctgctattatctgaagctactgatatagttgttcatatgacaatttagaaacttgtgagaatcttctttacataaaggacgctgagaaagtgaaatagtgataataccattttttcttagagtcattggatgtgacaactgtgcgtcatacgctaaatgcttacctatgtgtagtagaaataatctaaagggaattatatcaacagtgttccttctggtcagatggctacttttgcatttggattgctgttaattatattgatcattattttcttttgaacgcagagcgcaattcttactttggatgatactatcctagatgctgatcaggtggaaaaccttattaagttcactccaactaaagaggaagcagaacttctgaaggtgatttgattactagggtctaatgtagttttcatttctaaaaacattctttcgattcatactatgctttctcgtaagaactaatgctcggttatgattaccagggttacaaaggagataagcaagtacttggagaatgtgagcaggtgacctatattctttcagtttgctttaaagctagtcagttccacatataaagtgaaaaatgtgatgtatatgctaccctctttagtgggaaggcattcccatagaactccgtattgcacgaaatccataattgacaatttacagaacacactccagaaaagttttttcgttaactgattccgagataccatattctgctttctgctgcagttcttcatggagcttatgaaattaccccgtgtggattctaagctgagagttttcttatttaagattcaattcccttctcaggtaagacaagtgatttacttattttgctactaagaactgtgatcttttggttggcccttttggtatttgaagttcatttttcccaaactacttttgtgcaggtttctgaccttaagaggagcctgaacattgtcaactcttccgcggaagaggtggggcaattattgttaattacaaatttcttattatataatagttaagattatgcatttcataacatttctatgatgttcacagataaggggttcagctaagctgaaaaggattatgcagacaattctttcactgggaaatgcgttaaaccaaggaactgctagaggtaatgaaaattgtagaagtattagttgtccaagagaatatttggtgagcaaccaagtgctattcttatttttttcataaagactatttgaaaatcttgttaattatcctttgtaatctggcatgttcgctcgttctgcatacctgctctgcattctttacaagaagtttgcctatactgcatctaagcatctacctagttaggaactgagcctagctcagttggtcgagggtgtggatgtacgcgcagaccacccaagttcatgtcctagttgaggcaaatttgggtgcctatttcttcttaattaaaaaaagccacctagttcctcgtaggttggtcgagtgttttttgttgctcttagtttctaaaatgaagtttctttttttttctgcaggttctgctgttgggttcaggttggatagcttactcaaactaagtgacactcgtgcacgtaacaataagatgactttaatgcattatttatccaaggtatccctctgtttataactttgcatatgtgtatatagtttaattctatttagtctctcagaaagcacatgatccattctccaatgtctatatgccgtatagataggatgacatacccaacagaaagatgaaatacttagtctaaacttaaattgttgtcattatctgattatgatgatgtgcggggagcccaaattcctgagctagatggtcctttgttgtatgaactctcaatcaattatattcttacctctctttcacaattttttaaaaaatattcttaccttagccttggatgccaagcatgtaaaattctttcttccgttatgaacctttgaagttatttttttctaataaaaccagtgtaaaagccacaaataataaccaatttatatgacatgtttttggaaacttggatgagtggaacttgtgtttctggtgagaaatctggagcatgttcacatatttaatttgctttcgtgattgtcccgttagctagttattgctgtagtttgttaatctaagttgcatatctagtttcttgtgccttgatgtactcatggtggattcttgataaaagaagactagacattatccagaaacccatttcactaagtactgttcaactttgcatcctttatatcctcaaatgtcctttagatttctttttgtttgtgtgtgactttaagatttaaatattagcttcttgagaaccctaacctataatgatcctgatttcaaagtggagctaagccccctccaagtagatcctttgtgtcattctgataaagacctttgtaacttggtaattatatttgtttcttttgattatgtgtgataaagtctgaattatagttgatatgcttgaactgtacagtgcttactttaagttatgacttacaggtgctttctgagaaacttccagaacttcttgattttcctaaagatctcgctagcttggagttggcagcaaaggtattagattcaagcagtgtttaatgttttgtttactttgtatgttgatcatcaatcattgattgattgagttcgaagtgaattgatttgatgcaggtacaattgaagtcattagcagaggaaatgcaggccataaacaaaggactcgaaaaagtcgagcaagaactaactacatcagaaaatgatggccctgtgtcagagatattccgcaaggtaactacaagtgttataattttctgagcattcttagtaactgacttcaactggttcactcctatattgggtacatctaggtaccatcgttctgtttaacatttaaatgagttccattaccaatatactaaactaactgccttgttttacagacactgaaggattttctaagtggtgctgaagctgaagttagatccttgacctcactatattctaatgtggtatgtgtctctttgattaactttcatgcctgaactgtagcgcccgttctatgtttggtagcctgttatccacactccaactactatgtttaactcatacaacaacattgtatgatcagaatttacaatatcgtgctacaaggggctagtgacgaattctagtccttgtctttacaggaggcaaatgatattctttttccatctggtcatctctttggatttttcttctctttatcattacatgtatcttatatatctgcagggaagaaatgctgatgcattagcactttattttggagaagacccagcacgttgtccatttgagcaaggtgaaacttgcattgtatttctattttctccagctgtatagaaactagtttcagttcagttatgactttgggagaacatactgacattagttttttttttttccaaattatatcttgttcacaaatgtttgccagtggtcattacactccaaaactttgtgagattgttcgtacgttcccatgatgagaactgcaaacaattggatctagaaaagaagaaagcactgaaggaagcagaagcagagaaaaccaagaaggagccagaaaacgcacagaaaactaaggaaccaggaaatgacaaagctaagcacaacaattcaatcaaagagttggatatctcactccaatcaccagcgcaaactgccagtgccaaatgatataacttctcttgacagatgagccaaacaacactagctttgccaataaaggaaacctgttcatggtgcctgctcctatcagtcaccctctctagctgatgtcagctggatatgttgcgctggatgatggattgaagtgaaccagctgtggcaagaaagtcgcaaagtgaatgggtaagcatcctaaagttatgcagttttttatacattttctcttgaataaataggacaaaacaaatcagtgttaagcaagttatatttgtgcttctctttgacttaaggcttcattttctggcagcccattcagcattctgtcctctgcagttattcatctaacagagcgattgatacttaagaaatgttcctggagacaagctgtacagttctaacaaaataatagaaatgatcagaagcacatttacaattttgtttatttgttccaatcatatgtaggtaatgttcgttctaacagaagaataaaatttatcagtagaatcgtgtttagggggactagcctgtaggttttgttgtaaaaggaaaaaacaaataatggctgattgtattgtatttcttgtctcatcgccgattctctgaaatgttgcttgccctagcagtacttggtaatgctgaaacccaacgctgtatggaaagatgatatggatgcagagatttcaaagagttaaagacctgaggctttgtttggtctagtaccataccaaaaggttgatagtgccaaaacctgggcatgttttagcattacctatttttttaagagtaaagtagtatttggtttgatgccaattagaagctaaaactttgattagaatatataaagcatcaaattggatattggcaataccaccatgtctactattcaagctacatttattggttggggacgtttcggcttcaatccaaaacatggagggttctggtagttgttttgttaggattgacctaatatgctagttgtatgattgtatgattatatattctactcctataaactgttacatgaacatttctaagaccattaagttttaactgtaaggttgatccacaaacacaaataagctttgtttgtttcattgcaactaattctagtatacgtacttttgaagggtgtgtatacgctggttagtttccttctttaccttttatacagtttgcagggcaatttgcagcctcctaacgcgcgttcaagtaatccttgattttactaaatttctattaaaataaaaagggacccgcttatataagaactatgggcaataagatttttaacataataaaatagggtaatacgtttacagtttcaccactatacagcttccacctttctatttatgatatcatagctattgtttctagcttattattattacacagaagtaggggtgggctaaaaatcctagagatcaaactgaaccgagcctggagggcatcgacagccatgcgcgaatgcggtggctgcacagggcccttgatttttggaggcccccacctccgagtgggcaacatgcctggcctgctatggtgctaccgagcgagcgaaagggcggcaccgctcatcgggcatgccacagcggtgcaaccgcagcggcgagcgacagtgaggcaagcctgccggctgggtgctggccgtggctggctctgcggcctcagcctcttcatcatctcttcgccgtcgactcctccatcttgtctggtaatatcttatcgtctttggcatggtcatctactcatagcattttcttttcatttcttttgtgaagccgtgtgttttctctggttgcagttgcatatagtacgtgcctgtcaatccattcgaccaagttgatatacgctcctttgcaattatttactgcgtactacttttctcacgttggtcatcgattgggctggatatatattcggtatatgataatttgaatcaaattcgcaattaccaatttaccatgattgtagttttcaaaattaaattacagtattttgaatgatagattagattgatcattgaacatgactgtcttttcttttgtttacaaaataggaagacatttatttcctcgaccctcagcatgtcttatagaaataagaagtataattcgggtgctgaaaatgatgtcttggacaatattaattatgaggatataatttaagatttcatccaataaaacgccagatgcttttcagtagaacatgatatcaatactaccttttctcttttagcactaatatttgacataaagtatgcttaattgtttacactagcattatttttttagaatttagggtccaatttgcatttcgttctagggctccaaattcttggagatgccctgccgagcaaattccggtttttggtttgtaaggctatatggtagatgttaggttggtttcttgaggatatttcaggctagtttgattggaaaatgttggttcacgggcgcccgacgcgcgtggctatccatcaggctgtggcgcagccgttggatgtcatccaacgcatcgtacggctttaatcgctcccacgcccgtgtcctgttgcaaccaccagccggaaatcacgggattcccgttataggggaggaggagatccgtttctttttttttttccagtggtttggacgtaatggagcttggcgaccccgtgagcgacgggtgagatccggcggcggtttttgggcgaggcggcgccagcaacagccctctcttctccggcgccggcgttgtttctccccccgtgctcgctttccatacattgccgccgttgacgggggagtagctatgcctagtttcgccggcgaaaactagggtttggaggagcgcgaggctacatcccctcctcatttctcaggtgagctcgtagctccggtgagcaacccgtcggccgtcgtccccttgctgtgaactactcatgtttgtttcatactactgtttctacatgtcccactgtgtttgttatgactgtttcagtattttcttccattatgttgcaccattttacttagactaacctcagcacaattaattttaatgttttagcacagtctttgtagatgtttcagttggctatccatgcttgtttcattatattaataaaacttgtttcaccacatttttgcatgtttgttgtgaactactcatgatttgtttcatactactgtttctacatgccccactgtgtttgttatgactgtttcagtatgttcattcattatgttgcaccattttacttagactaacctcagcataattaattttaatgtttcagcacggtctttgtagatgttccagttggctattcatgcttgtttcattatattaataaaacttgtttcaccaaataacaggctactagacccatccttgaagattgtaggcttccatgtttcacttaagtacttctgagctgcaatgaaaccaaggggagaaatgagcaatgaagtactggcttgttggatagaaatgtttaatgaagagtgtagagaagatagcaaaatgcaatcaaacataaaaaaatattttttatatgtcttctctccaatcatatcggtatttttttaatctagctcccttttttatcctttttttttgcaatttctccttttgctttttttaatcctaatttttccccctatgtattcgaatgttctttcaccccccggagtcagttgattgctgagacaaacaagtttcagcctaacacctgttcaaggaggcttcaagtgattaacaaggagaaacttgtgaaacaggacttgcgaaacaggagaagaaacaaggaggacaatgtttcagtgaatacatcatacttgtttcatctattacatatattttgtttcactaaattcaaataatatgttccacaaggtcaaaaaaagtctccaatcatacactgccagatgaaattgtttcagtatatactcattactagtttcagtgtttacattcatgttgtttcactaaacttaagacaatgcatgaaacaaaaccaaattggttagaacaagctattttcatcaaacctacaattggtacacatcatggggaggtaggggagctgacagtgctactcgactattcgccgaagaactcatcgccgtcggttcttcaatggaaattccttttttcttcggacggcacgattgcgcttcaatatctccgcatcaaatgtgacatttgttccagaagagcgtggttggtgcagagaagagtgtgccggctcctgtcgatgttgcagagcagcggggtagaagtgggcgtgcggcggcgccggtcggggcgttgcagtgtggcgggggagaagacggcttgcggcggcgccaattgtcattggagatctgaggcacggcggcgacgcccagcacggccgggaggagcatcttcgaaggagatcaacggtggcggtggtggctgctccggcggaactctcccctcacgtgcgccggcggtggctcgcgcctggacagcgccgtggaacaagccccgcgatttgttgcagtaggcgccgactgattgaaactcctgtttaatgcacgcagacggacgagattagggtgctggatcggacggctcggacgggcgcccgattttttttctcccagatcgggtgcccgattcgtagtggcttccagtttgatttgctattatattaaaatatttataatgtcaaaacctagacaatttttgacattgctaatattttgacgacattggtcgatatgtcagtgaagaatcatttcaaaagtactattcaaaaacatcaatgatttggtaacacaagttctggttttaaaccaaaacagcccttcggggctagaggcccaggccacggtgcccgtcgcgccacccattccaaggcctgacagcatgcatggtcacgttttagtggccagttcataattcaatttccacagttaaaacagatctgtttagggtgtattttcatctagatcgttgaagaaatctatgtctatcgaattttaaaaatgaaacaggtaagtttctttatatcttccccagagatagaattttagtgcacgtaaaacgagaaagctctttagcacatgattaattaaatattaataagtataaacttgaaaaattaatttatttgaattttttaaacaacttccatatagatttttttaaaaaaaattatttaatagtttgaaaagcgttaacggaaaatgaagaagttgaagtctggagttgaagaaaagaactgagccttaggttatgtttggtatagcttctactccatcttttctgaagctggaacccaaccaaacaatttcaacttcattttaaaataaatgagtgaaactgagtggagtagtctgacaaaataaattagcgatatagaattagggttaggctaactgtttcacaaccccacttcaaatccaacttctaagttaagtactccatataagttggagtctttattctacttcctccgtattatattttaagactttctagtattgcccgaattcatatatatgttaattaatctagatatacacatatggaggtagttttataatctgaaacggaggtagtcccttataagaatctcgggtttgggggcaatgtttcctctagacgaagagtggctaacaccccgtcactccaacctcatgcatggctggagtaacgtacgtaaccatgcatgaacgaacaccaaatcactcgaggttgaagacaactagctagccacctaagaaacgagaaacgagaaacgagaaacgagaaagatg

SEQ ID NO: 16725 - DNA, 18268 bp, Oryza sativa
cttcttcctggcgagggtgtggatccgggcgctggacgtggtgggggtgtcgcacctgcccttcacccgccaggagaacaccctcatccagatcgccgtcgtctcctgctccaccatcgccttcagcggtattccctccatttcatataactacgagagtaattttgacttttttctatagtcgtttaagtaaatttatagaaaaatttagcaacgtatgtagcaccaaattaatttcattaaaatcaatatttaatatattttaataatatgtttattttatatttaaaatgttgttatattttcatacaaactagcatggtggcccgtgcagattgcgcggctagcatcattaaattttctctcatataatagcatatatgtttactcattatattactcaaatatattaaaatgacaacataattttaaattttgcaataactttacaaaactactaatgtgtaatatttatatcatattttatatacgagttagttattaattatttttaatatcaaattttagttatttgtaaattatatatattcctatatgaactctagactcgtcttttaatatttctttttttagttccgaattttctgtaaattgtatttctatatagactctaagctcttcttccaatattatttatttttatttctgaatttttattatttctaattatatttctatgtggactctaaacttatctttcaatattctttaatttttaatttcgaattttagttacttctaaattgtattcctatattgactttaaactcttcttcccatgttttcttaatttcgaattttagttatttgtaaattatatttttatacttttagtttttatacggactcaaaactctacttttaattttattatgtttattccaaattttagttagttttaaattcttatatggactctatactctacttctaatattccttttttttaattccgaatttattttttttttctaattgtatttctatatggactctatactccacttctaatattccttatttttaattccgaatttcagttatttcctgattgtatttctatatggactctatactccacttctaatatttcttatttttaattccgaatttcaattatttcctgattgtgtttctatatggactctatactccacttctaatatttcttatttttaattccgaatttcaattatttcctgattgtatttctatatggactctatactccacttctaatattccttattttaaattccgaatttcagttatttcctaattgtatttctatatggactctatactccacttctaatattccttatttttaattccgaatttcagttatttcctaattgtatttctatatggattctagcctcctcttctaatatttcttattttttaattccgaatttcagctatttctaaattgtatttctatatggactctgctttttctttttctctgattaatgtgagaatttctagaccatgagagcgaacgtagatgctcctttattccttatttttaattccgaatttcagtaatttcctgattgtatttctatatgtactctatactctacttctaatatttcttatttttaattccgaatttcaattatttcctgattgtatttctatatggactctatactccacttctaatattccttatttttaattctgaatttcagttatttcctgattgtatttctatatggactctatactctacttctaatatttcttatttttaattccgaatttcaattatttccttattgtatttctatatggactctatactctacttctaatattccttatttttaatttcggatttcagttatttcctaattgtatttctatatggactctatactccacttctaatattccttatttttaattccgaatttcagttatttcctaattgtatttctatatggattctagcctcctcttctaatattccttattttttaattccgaatttcagctatttctaaattgtatttctatatggactctgcattttctttttctccgattaatgtgagaatttctagaccatgagagcgaacgtggatgctcctttttctattcctttaataatataactagctgggtggcccgcgcaactgcgcggctagcaacaaaacaatattttttggtatgattttacttaaattttattaaatatctatttcattgtcttaagactttgaaaaaccaaacattatcatccacgtatttctaattatataatttttaaaagtcgcaccagctgctaccccttacttctatcatatccttctttatttgcttgctcgatctaccactatttttattcattctctttgaaacctttaaaaatttgatcttagtttttagaggttattgtctcgctgggtttcgtttttataatttctagaaatcccgtcaaaggctgccattatacttctctacggcccgtccactgtctttttctttattgtcattgggattttaaaaatcgaacataattatcattcgggttcattttttttactttctaaaagtcccaccaaaccgtcagcggctttgccattgtactcctttatggctcgcccgttgtctccattctttattgtcatttagattttaaaattgaacatgattattattaggttttttttttttactttttagaagttctgaaccttaattgaaccttatagtttttagagtttattgtcttgttgggtttcattttttgtaacttttagaagtcccgtcaaacgatgccagtatactcctctacggcccatatgccgcccactctttattgtcattgggattctaaaagtcgaacataactatagttggaattcatttttttattttctagaggtcccgccaaccatcgggagctctgcaactatactcttatacaccccgcccgctgcttctactttttattattattgagattttaaaaatcgaatatgattataaatggggtttattttttaactttctagaagtcccggcaatcgccttgctcgtttgcttcacggcctgcctgtcatccctccttttaatcatcattaggattctatttggtgttttattaacaatttttatatgtagtatcaaccgctaccactctactcctttataggcttgttacttaatttatctcgtcatgtattttaaatggccttttctttcaatagtctttattttttatcaccaattttagttatttataaattgtattcctaattaaaatcttttctctttttataatttcagaatttattttttaaaaatattttttattttaatattttaatttttgaatttcatgtgtttcaaaattgtattcctacttgaattctcttttaattttctaattttggatattatttatttttattctaaattttaattaatcttgtattgggttcttatatggattcttctttcaatattgcttatttttaattccgaattttagttaattttaaattatattcctacttgaactcttcttttctttttgctaatttcagattttatttttatttttattttgaatattaattaatctcgtatatggactcttctctcaatattccttatttttaattctgaatttcaattattttaaattgtattcctacttggactctccttttcttttctaatttcagattttattttatttttattctatattttgattaatctcgtattaggttcttatacggactcttctttccatattatttttttttaattccgaatttcagctatttttaaactgtatttctatttggactttcctttttttttctccgattaatgtgagaatttctagcccttacagcgaacgtggtgcctcctttcaaggctgttttaataatataatagatagatagatttgttcaaaccttgatcaaacataattaaatttgactagaaaaactcataatatgtggaacggagatggtatctccattaatttgctgcaattaagcctcatttgaattatactccctctgctattaattttatttatcgaaataggtttgtaaagtctaattattttatgatattattattatagcatttttcaagacaaatctacgcataccaaatttataaaaagaaaattaacataagatatttatgacgagagaaagtactaattaagcggttatatgcggttagtataagagattaatttgctaagcttcaaacatggaatcaatgaaaaatgatatgtgattacattttcatttaattgctccaactagacttcgaactgggaaaactagcaaaaacgtacacagacaaacttaataagataacaaaagaaatggagagaatttacttgctttgacaagtgtaaatagctagggtaccaaatgttttttatatatatcgttgacgtcttaccgcttggaatttacaatttattgttttttataattgtgcaaattttaggtggatttgggacgtacatacttgggatgagcggcaagtcggccaacgaggggcacatcggcagtcatgggaggaacgtggaggagcccaacatagggcgggtcatcgccttcctcttcctcgtcaacttctccgggctgtttatcatcgtgcccctcaggaagatgatgatcatccgccaccggctcacgttccccagcggcaccgccaccgctcacctcatcaacagcttccataccccacatggagccaagcaagcaaggtacctaaccaataataataataataataataataataataataataataataatcagccaagatgatcatggccaattaatagtgctttgatcatcatctctttcaagaaataatgctttctttgagaaataatgctttgatcatggcaaataatttgtcatggagaaattcatgagttgtgatttatttgattctgtgttgtctgcaggctgcaggtggtgacgctgttcaagtccctcggtgcaacagtgctgtggcctattttccagtggttcttcgccggagggaagaactgtggtttccagatcttccccacgtttggcatggcggcatatcgccgcgggtaagtgagaagtttgaagtttgaaacctcactattgtccagagatttacaaaatttcgttcagtccggccccaaaattgtttggcatatttcaaaatgtaaaactccttactgccatagtaaagcaaccaaaatagatcacatttccattattgttaccaacattttacaacaggttctacttcgacttctcgacgaccaacgtcggcatcggcatgatctgcccgccgatgatcactgcctcgatgctcgccggctccatcgtgtcgtggggcatcctgtggccgtacatcgagacgaaggccgggaggtggttcccggagaacctcgacgccaacgacctcggcggcatcatgggctaccgggtgttcgtcggcgtgtccatgatcctcgctgacggcctcttcaccatcctctccgcgctggtcaggactgcctgcgccatgcgcaagcgccgccgcggagcttccacggtgacggcggcggtgccgccgttccagtgcctcagcgccacggagcggaccatgcagagcttcgacgaccgccggcgggcgcaggtgttccttcgcgacagtttccccacctgggtcgccgtcgcgtcgtacgccgccctggccgcgctctccgtcgtcgccgtgccgctcctgtacccgcagctcgggcaccgccacgtcgcggcggcctacgtcgccgcgccggtgttcgcgttctgcaacgcgtacggcgtgggcgtcaccgacatgaacctctcggcgacgtacggcaagatcgccatgatggtgttcagctcctgggtcgggatggacggcggcggcgtcgtggcggggctcgccgcgtgcgggatcatcgtcagcgccgtctccggctcgtccgatttcatgcaggacttcaagacggggtacctgacgctcacctcccctcgcgccatgctcgtcggccaggtcgccggcacggcgctcggctgcgtcgtcaacccggccatcttctgggtcttctacaaggtgtacaacatgggcggcggcggcggtgacggcgccgacgtcgcaccgtacgcgagggcgtaccgcggcatagccgtgctcagcgtcggccggcacgggctgccggaccacagcgtcctcctctgcaagctcttcttcgcgatggcactcgccctgagcgcggcgagggaggtggcggagcggaggaggtggcgcgcgctgcggtacatcccgagcacgatcggcgtggccgtggcgttcttcgtgccaccgaggatacctgtgggcatggccgtggggtgcctggcgctgcacgtgtggaggaggcacgtcgacgccggcggcgcgcggctgctgttgccggcggtggcgtcggggctcatctgcggcgacgggctcgggtcgctagcgtcgtcgatgctgacgctgctcagggcgcggccgccgatctgcattaagttcgtgtctcgcttcgagaaccagaagctggatgctttcctcgcaacacggcatgcttaattagtcctagacttgtacttcctccgtattgacgccgttgacttttcgaccaatgtttaactatttgttttatttaaaattttttatgcaaatataaaaatatttatgtcatgtttaaagaacatttgatgacgaatcaagtcataataaaataaatgataattacgtaaattttttaaataagatgaatggtcaaacgttggacaaaaagtcaacggtgtcatacattaaaatatggaggtagtatatagttattttttctgcaaaagcatgtgtgtgtatatgtgtgtatatacatatacatatatatactctctccatcaaaacaacctaacctaatcgaggatgtgatacaatctaggataggataacgaatctgttcctatgttgtcttatcatcacatagctttagttttttctttacggtagtaggttgaggttatttggacggagtgagtattattcagtcatttttgcataatttttatataggaaatgtgatgcccacctagattgaaaacgccaccaaggaaaatgatttcatcgtgagaaagattcggtgggagcagagtgaaataaattcaacgaaaccaaaacttaaccaattttgaagggaataagttcacttttggtccctcacaatttatcgtcgagtccaaaatccattcctggactgcaaaaccagatacaacttatcccctaacttagaaaactagtgtaaataagatctcttgatagtattgtccccattttggctgatatgacgcctacgtggctctttagactaaatctttgtcccacgcgcattgacgtgacgcttacgtggcaatttgatccgaaaaaaataaaaggagaaaaattagaaaaaaatatgcggggccatatgtctaatgtctacaagaagataaaaaataatgggacacatatgtcaatgggtcccacgtagggatgcgaccacatgcagcgaggaacgtgggcgacgccgcagcctcgctccatcgccggcacacccccctgagacaaaagtagcttgcggcaggagctgcgctaaggcgctcatctcccctcacccctcgcagttgcgtttcttgctccaaccgctgccgccacacctctctactcctggggatgacgaggatggatatgagatagcagcgaggctgtgtcgcactagcgccgctctcctcctcgtcgtcggtggtcgtggggctaggagctcccacagggccctcgctgatggtgaccacgggcggggagatgttggcggcggcctctgcggttgtggcctcccatgcggccggctaggtttcttcgccgccggattcttctggggatggctcctcggatgactcgaagaaagggcttatcgcctcctccgcctctgcgtcggggcgccctttggggcctccttctcctctggctttttcctctcttctcacccttccgcctctctctctaccactgaacctagctgctctagccgccggcggccggcgacgttgacggtggggtcgtaccggtcgacagggaggagggacaccttcgcggcgtcaggtccaccaccacgcgtgatcgcggaggaggatgggatggagatgaggagcacaccagtcgcggagggcggcgtgagtatggacataaggagcaaaaccatcaccatgcagagccctccgtgccgccgtggaggagttcgcccccggtggcgggatccatcccgcgccagcgccaacggaggagacggtgagattcgggaggagcaggagaggagagggaaagataggggtgatgatgtgggtcccaatgtaatattttttttacttttatccgaacactcactaacatgtgggtcccacagtttttacgagtcttaagtgccacatcaacaccacgtaggtgccacaatcagtcaaaactgctgtccaaaccaccttgatacctaatttgcaatagttttgagagttcagagacgtgtcatatctggtattgtggttcagggacaaattttgaactcggtgacaatgagggacctaaagaaaacttattctattttgaagggaagtagaggtgcagatgggcctgataatggtttaaagcccacttcaaccccagcccaaccaaatataatacatagcccaaatcatctcagtccacagacatctcaaaccaaactaaacaagcccaaatccctcctacggcccaattccccacctacccttgctggacgacgccgatcctatccattcagccattcgtctcgtctctccgcctcaagccctcgaccacctgtcgccgcgctaccttccctcctctcgcccgtgacctcgcgctagcataggcacgcccattgtgggcttcgtaccctttaccagtgcctccgaggtgcttgcactgtgggatgagtgtctttggactaactttttgggctaggggtacgggccccatagcttgcactgtgagaggccttaggcctctcacagtgctcctagctggactgtggcttagtagcgccacgtctgttttttgcctgcgtgtcgctcggccccgcgcctctgcttgggcgctcgtgaccaaactcggatgcgcaaaacctggcctggaaaaggggccgcacggaggaatcgaggggaggcgcgtgcactgtgggtgtcgttccctcgccacccggtgctctcgcatgggattcggccggcgaaatcccctattcaccctcgaaaagccacccgattcccctcctcccgccactgatttcgtagctcccgcgccggattggagtgcctcttgcctcagcgccgctgttcttccacctcgacctcgccgccctgaagtctcaattcaggacggcctcgccatcgcctccgacggcgccggaggtgccactgccgcgctccgctctaggatcttcagtcatcgtcgaggtctccatcgccatcgtgagaggtagcggtcagcaaaccctctccccaactcatagtttgaccgatttgccaagccttggttcgctgattcgatctctccatgtgatgcaaaccctagttgcagatggatccgcggctagccgatgcttttgcccgtttcctccaagatccggcatcagcggcggcgatattgcagtccctaagccagccgtcgtcggtccctctataggatcaaggcggccgactagaggggggtgaataggcggtttttaaaacttttggctaaaaccaagttttgtatgcggaagcgtaaatcaaaatggttttgcacaattcaaaacctaaatcaactagtctcaagtaagtgcacaaagaagctagcctatgttgaggtttgcaagcctagggtaataatagcacaaataaactctagtatgtaaacttgctcaaagtaaatttgcacaaactaaaggagacaagaaataaggaatttttcaccgaggttcggaaacttgccagtttcctaatccccgttgaggcgagcccaactccaccgctcaaccacgaagccaccgcacgcccccttcgtcaaggggtgggcaaggcgggagtcggcccacggagaggactaccaaagcctcgatcactagggtagttcttccttcactccgaaggtggtgaaccccaaaccactcacaaccggcgccgggcctcctccacaatctcctcggagaggtcaccgagcaacacttccacaagctgtctaggaggcagcaacctccaagagtaacaagtctaggatgcttgccgaggatgatcaagtgccacactagctataacaatgaagcaatgcacttggattggcttaactcactctctaacacctcactagataaactaagtgcacaagggtgtgagagctcttgcaagggttcaagataatcaggggtgaaaacggagcggatattatccgatccgatccgatccgaatccgtccgatgtgaggatatggtaagggttgttagatatccggccggatgcggatgcggatgcggattttgtcatgcggatgcggatgcggatgtggtatcaatgatatccgacagattcggattatccgattttttaatcagattatccgatatagtgtttggcggataatccgcaactttcaggcccatctagcattcttgcccaataacccatctattctaaccctaatccttcctctcctccccctatcccccagatcggcagatccctctctctctctctctgactctctctctttctcccgtcagctctcagtcgtaggggagtgggcgagtggcggcgcgacagcgagtcgacccagcgcgacggcgacccagcgccggccggccgctcctccttggctgctagcgccgccgccgctcctcctcggctgcagtacaggctggtggcgccgctgccattcgtcctcgcctcctcggctcctcggcgccgccaccactccgtccactgtcgcccatcagcacgtctccagcgccgggccgccagcgcaccgtcgcatccccgtcaccagcccagccgccatccctgttggctgtcgccagcagccatccccgtcgcggcgtcgccactcgccagccaccactgtcgtcagccgtgccgtgtcgtcgtcgtgctgtaactgctcgaggcctagagctgcagctgctgttccagtccaacgacaagtcgacgatagattaggtattgttttcttgtacacttgcagtccaatttgaagtatcaaatttgggatttactgatttagaaatgtagagatgagctttgcttacggaaattacgtcaatagcaagttataatttgattaattgttcatcattcattaggatcgtaaaaaatggcacctagaaaaagaggggcaaaagcagcagctgctgctactgctactgaaagtagcattgctgcctcgtcgccagctccagctgaaggggaagaagggccatcaactgtgggcagtggcaatgaaagtcccaacactattgttgttgttgatgtggataacattggtgcagagggggatggagaccatgaaaccaatgatgaacctgcagcaaagaaagcaaagaagagatagtggaagtgatgcaagtgacttggataaatataaggctgaaccatccctgttggttcctaatggagataaatttgatgttttgtcatggtggaaagctcacaaagatgtatatccagtgctatctcttcttgcccgcgatgtcttgtccattcaagcttccactgttgcttcagaatcagcttttagtgctgggggacgtgttcttgatccatttcgtactaaacttgaacctgaaatggtagaagcactagtctgtaccaaggattggattgctggatatagaagaggtgatcacttgtgtcatttttcatttatatttttgtaaaaggtattcttgttagttgattttttattaatagtctaatatagctttcttccaaatttttcagattctaataaaagggttggatctattcttaatgatctcgaggttgcggagaccttggttgctaatatgacacttgacgagattgatgatatggtatgacattttattgcataaattttgttgcaatacattttgtagtcctatcgtcaaaataaatgtatattgtttgctcatacttataggaaaagcaacagagcagtgatgatgaagaataagtgatgaagtgaggtgtgaaggcttgaagggcatgttggtgtgtggttgtgtgtgcctgtctgcctgtgtgcatgtgcatcgttcactgctatatctgccgtatgcttgtatgcctattgaacaactgtgttgtgtgctgtgctgtatgagatgtatgctctgtgctgtattgctggctcatatgctgcatgcagcatgcatgtcgtactgaactactgatgagtgatgacttataagttatattgttaaattttaagcaatgcagtgaccagtgactaatgagtgatggatgtatcttggattattttgttggatgtgttctattaagcaaaattatattattgatgtgttttggttggtttttcctagagagctgagatcatgtttagatgttattttgccatcgtattgcggctaattgtattggcgtccacttgttgtatggattgaatacaaacttgacatccgacaactttttgtccgtttccgaaccgactccgcaccgaatccgacgtccgaaataatccgctccgcatccgcatccgcacgtcatccgcacccgctccgcatccgtttaaaaaaaatggtttaggatatggtatagctattatccgtccgaatccgatccgttttcacccctaaagataatgcaatggggtgccaaaactttacccttgctgctggggagtgggtatatatacccccaaccaccaaaactagccgttggagtcgaaatccccaactcggtcagaccgccgtcggctcggtctgaccggttgcggctctggcggctttgtatcaccacaaaaaactagaccaatgcaacagactagtggggccggtcggactggccttaccacgccagtcagaccggctaacaggcccggtcagaccggcctaaggccaacggtcagaccgcaggtcacttttcagctcaaccgaccgttagtaaaacgacgatatctcttgactcgggtctcggaatttggcgttcttggactatatggaaagcttattcaaagggccatccaacccatgaaaaaaccatccaagaaacacaacttaagtcaaggataaagggctcacattccaaaggatatccaccggacatacccacaagatgtcactcactcctattggacatgcccacttctctctttgtttaggacttgagaaaactcatcacacatggctagacaagcccaccaaatgcacctatatgcatatgaactaatatggcacaaggtcatccacatgctcgcttcatagacccctcttgatagtacgacgcctatctagcaaatccggtctacaccaaacaccaagaccggaaaaagactaagaaaacattcttagttctattatacctttgccttgcgccatccaacttggggtcaatgcttgagccaagatcaacactcgtgaccatttgcttgaaccatgtttatcccgaggtcttgagcatcctttgtcaagactttcttctcatcacaatcttgacttcactattgtcaacatggcgatgtccttgtcttggtgaccatcaacccatgttgtcatccattagcctcattacggtggaacctattccttttcacatctcaaaggagaacattagtctcaacaaatcggttgtaatccttcacttgatgaccaaccggttgcatatgaaagatatggatatgtttgttgagtattcatttacacctcaagtgtcatatacccgtatgcaagctcaagtgcaaagatccgatataaataataggtaaacaacatggatctagaacatgcacaataaatgtataggatttgctccccctaagtatatgcatacaaagaaatatacaagagagacaagtgtatgcataagtaaagaagaatcaacgggggtttatcctatacacatagagaatgcatatgtagtaatgatgtagaccaatataaaacatataccttcatgatctccatgttcttaatgtaaattagactaaataagatatgactcgagtaaacattagtctcacacttatataacaataacatgaaaatcatacatataaacctatcaaaaaggagataagaagtggtacatatcgttttatctccatgcatttcatccttgtcatgattaaggtccatcaccaaagaatgcatatctaccacatctcatcatcgggaaataacctagttaacaacttatgaaaaagagaggttaatcccataaacatcgatttatcatctatcaccaaagcaacaattacacaaattgtttaatccaagatctttcaatcttttctctcttttgtgatagacaataacccgatataaacaatacaaagagatgagatgaaagataatttcaaatcaaggtagagatcttataatgaacaaaatatagaataagctccccctcaagatgtgcatacatatggatatgaaggaatgcatatgcacataatcaatcaagatcaatgagggagctcacactatattttggatccacaagagagaccaaattagaatatgtgaagtttaatacatacctctcatcatttttactttcatatccaaataagactagtcaaagaaaggctcataaaaacgttagtctcatataattagatttgtcattaatcactgaaaccaaattaaggcacttgaacttacaccctcctcttccgtcgttcccataccctcctccaccattccctctcttctgcacgcagccgccaacagcagcgccgccgccaccttcggccccaacggcaagcactgaacctttggcggcccaggcaactctatgttcggcaccggatgtaggctttgcagcgacatgcaagccttcatcgacctcaagacctggacgctgacactgtgtgacaacagagcctgcccctatccctgcctctacccctgcccctgcccctgtccgtgccgatgagtctattggcaaggccggcaggatgttgtacagtcatgaagaagacattaggctggtaagaatttacttgttgattttagtaaaaaatcgatgctagcagtgtggatgattaatctatgcaaataatagaggtacagaggtctgtgtagctgtgctagagcattttagttaggcaaaatgcgaagaaacaacatctgaattttgtagaggacatacttgtgtactacactgaacatgcaattacataaataagcatcatgtcagtatttgattagtgttaagctagaactacaaccagtgtaagagtaattaaggttcgcaattagaagtgccaataggttgcttttttggtttgctgttcataattctgtttgctataagaagcagaatgctcttcatcttttgtgctgccatgtatttgtactatgctcttcatcttttggtttgttgcatgtatacattactgcaaatatagattcattgacctagttatttccggcaggatgtttccatttggtttgagggtctcaattatttttgttgtttatcatgtatgacattgcagctacctaggtaggtaccattaatttaggagtaggttatcatgctgcctttttgtaatggttgtaggcaagtgcttggctcaaatgttcaacagatcctataggagtgaataggaagggtgagacctattgggtacatgtggccgagacttacaatgagacaactctggatggaaggaagagggatcccacctgtctcaaagggcattggcacaagattacaccgaaggtcactttattcaatgggtgttgcgtgcaactgaggaatacacctatcagtgggaggaatgacgagaagctcatggatgatgccttggcgctctacatcaagcgttcaaagaagcacaagcccttcctctaccaatccagaagtgtaccgccgtgatgcgcatgttggcctatggggtgtgtgcggatcaaaccgatgagtatgttcgcattggtggaaccactgcgtatgaatccctcgaaaggttctgtggaggtgttattgcggtgtttggtccacagtatttgaggaaacctaccttggatgatgtacaacgtctcctatatatgcatgaagaacgtgggtttcctgggatgttggggagcatcgactgtatgcattggagatggatgaactgccctaatggttggaaagggatgtacacacggggtgattatggtatagcaacaataatcctcgaggcagttgcatcacgtgacaaatagatctggaattcattttttggtgtgacggggtctaacaatgatattaacgtgctgaatcaaagcaatgtcttcacggatgtcattatgggtagatctcccattgtgtgatacatggttaacgtgaatcagtacgacttggggtactatcttgctgacgggatatacctggaatgggcaacgctcatgaagtcaattcgtcatccccaattgccgaaagataaattgttcgcacaacgtcaagaatccgcaagaaaggatgttgagtgtgcttttgggattttgaaggcatgcttcagagtggtggaaactcccacgcatttgtggctgatagctgacattagcgatataatgacggcttgtgtaatcatgcgcaacatgatcgtcgaggacgaaggacacgtttgggatactgaagacttggagtttgagggtgactacgagatcgaacctccagaacacacttttgggacaccacaacatattgctagattacttgagcgtgacagccaagttcaaagtcgaacaatgcacaaccgtctaaaaaatgatttggtggagcacatatgggcaaggtagatcctacacgttcatgaacattgatgttttaggaaataaggttatctcggaggaggattggtagttgttcggaaataaggatgatttctcaaatcatccaagttatctaggtgtaggtgtagttttaagaaagaaggaagatttctcaaatcatccaaattatacaggagtaggggtagttttaggaagtaaggatgatttctcaaatcatcaaagttatctaggagtagaggtagttttaacaaaggatgatttctcaaatgtaggcatttacaaatatgaatgaccattgtaaataaataaaggtgctgtatccccaatttgtgcatgccatgtatataaataaatgaattgcaatcggtgccatataaagtgcacaggacaaaacaattaggagataatcagcaacggaccgactaagttcagcaagccaacacaaaataggtcaggtacatacaccatcaactaaccgaaacccacagacatattgctttgacacatgccatcatccaccttacagacaccatacataacccatatcacaacattacacagttcacagtcctagctaaatatataagcatgttatatatctgttgcttccatactatccatgttgtcacgccatgaacctaaccctgcagggaaaaaatacagcatgtcaaaaatggttgtgaattttaaatagagggggacattatatgcagccgtatagttaggctcaagcattggcatcaatacttagttacaaacataactcatgcttcaactacagtgacctaatcatgcagattaggcacattgcaactcataatagcacagatttgagatcccagagcaatcgcggctttcaattttgctagttagaattcacatgttacttcttgcacatatctggcattacaacatctacttcagtcaaccagttctgaagtacaaacactctgtccatcgcccaatgatcatctctacgggaagtatcaagaaccatgcactaaactaatcatacagccaataactaaactttatgaatttgagcaaacatggcacatccaacctgtccataaatttttaacaaaggagcagagccctccattccaatatctcaaatgacaacaaaatcatcccacatctcaaattacaataaaatcatgaaacagctcaaatgacaaacaaatttgaaatgacattcgagtgagatcc

SEQ ID NO: 16726 - DNA, 11313 bp, Oryza sativa
  unsure (1)..(11313): unsure at all n locations
tggagccagcgccgcattcaccttctcaaaacctggtggcacctgcgggaagcctaaacctccctgcgccgcatctgcctccccctccacagcgatgaccccgagatagatcgacgagccgacgctttccggcctcaccggcgccggcgtagatcacaggcgcgaagtacctgcccctaccgccgttcccctattcttcttcccgccatccctagccactgtggacggggtatagcccggcgggagcagcacaaggccactacggagctcaatctgcgtgaacttggggcggtcgtccatggtttcgggcggatcagaggagcggcggagtgggaggatgagacgacgaccgacgggagtgaagcgcggcgagaggcgggcgaggcggacagactagagagaggggatggaatggtcgaatggttacagtcggtggcgagggaagggcaacggcgtgtgtggcggagtgggaggaggcggtagcgagaggagggaaggaggcatggcgacaggtggtcgagggctcgaggcggagagacgagaggaatggccgaatggataggatcggcatcgtccagccagggtaggtggggaaaaatttttgggggcggcccatgacctcgcgctagcataggcatgcccattgtgggcttcgtaccctttaccagtgcctccattgaattaagctacacaactagaggtgcttgcactgtgggataagtgtctatggaccaactttttgggctaggggtacgggccccatagcttgcactgtgagaggccttattctactatggccaggccactgtacattgggctaagacatgcctctacatggtgagaatgcattgctctacatggggtttgaggcttatgccctgggatgtcgcaacctgagtccgccatgctcgtgtgtttgatttccgaacatgcactattttagcctcatcgattggcttattttgattatcaatgataaaaaaaaattattggtaaaacttttacatatgtgtttttagagatttaaaagtcacggtaaaatataaactacaacgagaaaacctttaaagcaactttaaaattaagcaaactttgctacaggagtgtaacttcgtgattttagctatagaacatcgcacaaaataacttttgaatcgtgaaaattagctcttggataccacacttattagaatattcaattttgattcaataggagagagaaaccgtgtgaaagttttaaaatacccctgggcccatatgtaaggtctcccatctctctctcatgcacacaaggcatgcatataaagccttaaagttctgaaatgtcgtcgcacaccctagccttcgcatctttgacgacaccagccttctctagctgccctgtcacgccagcagctccacatcacttccgtgtgggtttgccctcaactttcccatccattactttgccatggatggccaccctttctcctagattccacctctgctccacatctgtcaccaaagttccaggaaaaaacctcctcatctggcaacacgttttgacgcgctcagtcggtcacgttcaccactggagcttgccactgacgtctctctctcctctgggaccatgtgtttattgttcgtgttcctgaatctttaatcctcctcattgctggttgccgccacctacggaagagtcacagcataggatgtgctcgcctggtcacattcaccactagggctttccaccggcgtttctctctactctgggaccgtgtgtttgttgttcacattactatatcttaaatcctcctcgttgctagctgccaccacctagggaagagtcatggcatgggacgcgctcagccaccgccatcacgttcattccctcgcggaagtcctaatgccctcacacattctccattgcttgttctgtaattgacatgagaaagaagatgaaaagtgccaagtgtactgtttagactgaactagtgaaatagtaaccaaaccataatgatgggtaggggtggagatatttagaccgaaccgaagaaccgaaccgaagaacctaaccgaaaagaccgagaccgagaaattcggttatcttttcggtcctagccctcaaaagaccgaatttatttcggtcatttcggttattgggctcggttaaccggggtaaccgaaattttagcccaatagacctaggaagcccaataaaaccactaaaacaaaccctatcaccactgccgcatagtgcactgccacaagccacagcgctgactcctnctncagccncaccgcgccgccgnncgcacttgcggctnncgcaccactgcgccgtcacctactccagcctccccctgcgccgtggcccggcttcggccttcaccgcgccacagacaacgcctccgtcctccaccggcggcgcctctatcaaattttttcgttccaaacattctcctcaaaaatttcagtcagaacaagaccgagaccgaaaagactaagaccgaatttgccggtcctgagttttttttatgaaatttggttctgagtttacaaagaccgaactgaccgaaaaactgaagaccgagaccgaatttttcggtctgaccgaacgcccacccctaatgatgggagataggacaagtgatcttagaggtatttttgaagtttcacgtgatttctctctcctgattaactagaaacgaatattgtaactgacgtgatgtatatgacgtgatgtatatgaactaatttccacgtttatatagtgtattctccgtaagtcattgcatggtgtcgcataactaaaaccgcaaagtcacgtttgccatgtaccaaaatttatgttaaaatggtcaatgagcttttttttttccacatgaaacatgaccaacgagcttgagccgtccgatctgcgcagccagctcccatcggacgttccccacccgccctcgacaacggtgaaacgtcgtctccacgcctcacgcatgcacccacccatacagataccgaattgatgtgcacacgaggcaggcaagacaggggagaggcagcccgtgggccgtggcggaggcgaggtggccattggacgcagtcacatgaccaaagtggaatgcaacccacacacgcacggaaacaaatgcaatccaccaccatcgtcgtcttctctctccttaccaaccaaacgcagtggcagtactagtagcgtccaagatccccatcaaccagagcagcagcagcggagcggcagaggatcggaggcaggcagggagctcacccacctccaccgccaaaagctttcccttcctccatccatcaggattcaggcatcagcccccaccacctcaaaaaacaacctcagattcgtttgttcacttcactcacccagttaactttgcgaggagagagagagaggcagtttgagtgcaacgcaagccaagccggtgtcaggctcagaccccgcccaggaggagcagcagctgacacagctttcttcttccttcctgcttcctcctccagtctccagagcagtggtgtcgtggtgggagcgcacccgcacccgcacccgcatcacaaggcggcaaacgcaagcgaccaacaaattaaggagaatgcagcagcagaccacgggtggggtcgccaccaggaggcggctgtcggtgccgaggggtgccggtgcggcggcggcggcggcatcggcggcgtcggtgtgggagacgaggatgaagatggacgaggtgaagggaggggtcaaggtgttcagcgccggcggggacgacgccgacgaggaagggctcagggtctaccgccgcctcaggcgcaaccagagcgacggcggcggtggcgcgtcggggtcgacgaatgcggcggccgcggctaagaagaggcggaactggaaggcgtccgagcccgtcaccgccatcggggacctgcgcaagtcgcgctccgacgtcgccgttgccgccgcggcgccggcggtcgggatcgtcaccaccgccaagcgctccgtcaccagggtcaccacgccggagaagaaagtggccgcctccgccgctgccgccgaggtcaaggaggtggttgtggtggaagtgccggaaaccaacaatttggatgaggaaacagaggaggaggaggacgaggaggaattggaagaagagctcgaagcagaggatgaggaggaggaggaggagaagaaggtgctcgaccaagatcacatggccattgacgacgacgaagctgcaaaatcaacagctccgcatcaaggcaagtatcaactcctccagtgttgccatcaccaggatttcttgatgaatttggtattgattctttttttcccccacaatttctcagtggatgaccaagatcttgagccaccgacaaaaagtgagacgccaattcagccaaatttgcaaattccattctcattttctgtttgttttttgcatggcgctctaattgtgcgatcatttgggtgaaaattaaattaggaggggttaagattgtcccaacttcagtggaggatgagagagcggcaaatccggagccagtcaagcctccaggtagaactcggcctagttcttggccactttaattttacctttatttgtcttttttttttcttttgtttcatcgtgccaagaattttccggtgatccagtaaagaagcttgccgcaacaattgatctccgggcggtgaacccagagccagtgaccattccaccaggtgaattcctcctccgtggatgcaaaacctgtaccaattttaggtgaatttcgttctgtttcaccattcatctcgaatatttccaaaatgcagtggagaagaaggctatgccagtgataattcaccggatgacgaacgcagagccagctaaaccttctccaggtaaccttgacgaaatcatttgtcttcttttggagaacttttggggggaaagaagagatcaactcgaaagcaatcttgtcatctcctgcgtcatgtgactccaatttttgtggtttctcggtttcttcagagaaaaaagcgtcgccactgaacggccgccggattcccaagcaagatccaatcagtgctcctcctggttagtgccatttgtttctgctattccttgaattgctttctcctaccgttttggtatattctgaatatggaagttgatttcttcccctgaagtcgaagaagagtacgaggagattcagggcaggccatcagtacccagcagaagcaatggaagaatgcagaatattggtcagttatttttccttttgtaggaaagatgcttctagttaatgaaattggaattgatggttttctttcttcttcttgtttcgcgttgtttttttagtggatttggtcatgtggagagatgtctccaagtctacacttgtctttggattagggacttttttactgatctcctcctcctatgccaaagacctaaactataagtaagccactgttcagtatttattactgcactgtcactttgttaagtctgaattctcaaagctgtttaactgtcaaaatttgttgacctttcccttcaaatttataaatcttgcagcacaatcacagcagcttcatatcttggcctagtctaccttggtctaaggttccttagcaagtccatacttaacaggtagtaatgattgttatccagattatctgaataataatcacataattaaccagcttgttgaaagtgagctaatcttttatttgatcatcaattcaggggagagaatgtggactgtgatgatgctgagaggagtggtgaaaggtacctggtgggggaggaggaggccatctggctgctcaggcttgttctgccttacatcaatgaggtgctcctgaatctaaggtccctcttctctggtgagcctgcaacaaccatgaaggtaaaaaaggggccattgtctgcttctgtaaatgctacagagtttggcaaaatcactggagtagtagatgcatgcatatggacacatctctagctagatttgtactgacagagggactctacatgtgctctgcagctggcactcctgctgtttgcaatggcccggtgtggcaactttgtcaccctctggacactggcaaaactgggtaagtaccaatggaacaatgcacacatgcaaagtgttttatgtctgtagcctgtacatatcctcctgtctctacagcctcatctctttcttcgtttcaacaacctcatggtgctttaaatcacagccaaactaatgttcatatgaacaattttgaggaaataggtgtgatgaaatagtatcttctgcacaatcttagcttaaaaaaccttgtatgatgctaggaccacaggcatcaagaagtgctgttgcttgtacagataaaggttaaagatctatagcaatactggtcacactgacatttttgtacctttgatctggccttgtttgcagtgttctttggggtcttcatcattccgaaggtgtgctcatcttactccacccagcttgcaagatatggtaagtccaagcgctctcttgttttaaccgcaatttctttgtattcttctgcatcaccaaagtaccatgcacagaaagacaacatacaagaataacctaactcagtcaccgacaaagcggccccactgaattctaccattagtggggccctattgccagtgactcatcactttcacaccttctgttcactttcaacatgcaagaataccattttttattttttatttttagagttgaggttgttggatctggtaacattggtcactgcttttactggtcccccgaggcacttgggcatgtgcacgggtaggactagctagagagactgtaaattactgagctaggtaaattatggagaagggtagaagaattttgttgagctaaggacaatggtatttgggagagtacattgagacatatatgtactataagtagcagtactccactgtaccagtacatcagggttgtgaatcaacccttctctgaagattagtccttttctgcatcttctgggttatgatctgcaatagagccaaataagattgttccaaaactagtccatcaggctgtcaccatgcttgattaactgtttctcacatgccatctaaattcatgttgattggaaacaaactgcaaatacttgaattgacctttacttgctctttaccacttccaaggagaaccaagactaatttgtattactactatttaacctacatttaggtaatagtaaactaagaaatcactcggggggcgaaaactaagaatgggaatgtggttagtcctagggctttgttactgatggtaaaaaggtaaaccggtgacttctgttttggaacaaagtattagtactaataatacattagctaataaacaaagctacaattggacctaggttttgtgactgatggtagaaagtgagagtaagccggtaacttgtagctttgaaggaaaggtaaattaggcagaggtgacttttgcattggagggagagcatgcacggttattcctcctaccttttgcacgtgcgagctgtcgcgtggtcaacatgggcttgattgtcattgagatgctttggctgtcaaaggatatttacaacactgattgatgctgtctcaagtgaaccacgcctcctttgttccctttttcttttcaagggcaaagttaagaagaatctttaccaacggctaaggattgtcttacaatgctatcatgaggtaatagttcattgttaaaattttcactagtactaacaatacattagcaaacataaagcttatttcgaaatatctaatatgttgcattttacctttatttcattatctatatgatcaccatagcgtgcctttaatatatctgaaaagataaagaaattccaaaaatattgtctggggagaaaggcatattagcatgaaaagcaaaagcaagtgattgtggattagtgggccactattctggccaccaactctgtcatagtagctgatgttatagagttttactgtttcgttagtgtcctaaaattatactacggagtagaacgtatgcactgtcaccttgtgatatatgacaaggtgatatatgcactgtcaccttgtgaacgtatgcactgtcaccttgtgaacgtatgcactgtcaccttgtgatatatgacaacaaaattaatttgaaccagagctccagctttaactactcttgacctttctgcttggaccatagatttgtctctttgttgaccaaattaaacataaactgatggtagtacgtgctagagtagacatcaagcctagcttgcccactgtcaagtgcctttaatcaccatttaattagtcacattttttttctagtagtcacatcactagggtagctggttaagagtatcaatttctccattacagccagaaaatgacaggtatagtcctgtgaggacctctactcttcttttactcatggaacttataaaatggttacatagctcagtaccttcaaatatactcattttaattttccccttccatatgatacttgagaaccttgtagttaaccatgagaaccatcctagcagaggacgcttcatggtcatcatgtgtaccagtaaccctggcaggatgaaattgcactgttacacaaaaaaatgttggtgtctgcttgcattgggattctttgatctaggcatgtacccgtcagtactgaagcttcctagctttgctcttttgcatgtgaagtgttgggcatttggtcactccccctccacaagcaccacatacatgactgttttgtggggtcctaatatttgtttgtttaccaacccaccaccaacccatgccagatgcagctctgaaaattaatcagggacgctctaaacaaaatgatgatgttctgctgccatatctgacacttgtttaatttgattagaacttgaggtgattttctggtacctgtaccaattaaaaaccataatgaggtgggggaacaacatttcatgatgttgattgtgatcaaaaggtgcaccacatataataaatttactatatataccaaatccatgaatttctcacgactgtatagtgactagtgaagccggtagatagcttgtcactctccaaaggttaatgtccacgtctttttttcccatttctaaaggttcctcatttcatttgatagcacaaaatttcctgttgataacggaaatcagacatatatgacaaaatggaagaaatacatctctctcataggttaggctacggagtatggagcaacagcggcaccaatccattttgctttccaaaggaaaagaaagctcaaaaggagggataaaaagcatggctatctttatcctcggttatatctccatcttttgtttttcaggacattgattaggtcacttaattaaacccaactttacttacccttaatcataatgtctagtccgttctgatgaataaagcgatactcaaaaaaaggtaagatgtcaggaatccgacaaacagggcagtaagcaaactgcaattagttgaacatgatactaccccctaggctgaaggactggattaccataatgcaaaaagaacttgagcttaactaatatttcttttctcttttttgtgtgtgattttcttattgtacaaattgaaatgtgtttattggaacgaaattaaagtgtcttttcctgtccatggcagggaggttttggctggagaggttcagggatggatgggagtcctgctcccacaagaaggcggtcgtggcagccgtcttcacccttgtctggaacgtctcatccacggttgctcgtgtctgggctggtaactaccttctccctgtaaaagcatccacgatccatcctgcactcacaacagtttccacagtctcagtgctccacctcacctagtatgaatagaattaaatgagtttgtttccagattcgtagtaacctaaaatcatttatactttaggacggatttgagtaagagagagtgatgtgacaaatgagttcacaaagagttgcagatagtatctcccgtaagacactaataattgagaaatctaatagaaatgtgagagtgagaaataatggtcttacaatttgtactagaaactataagatagttgattgttggcaccaatctgtaactcccaaactctagaaaaaactttctacactgtgtggtattttggagtgctgatcaccatcaacctctgctgtgtatgtgcagtgttcatgctggtggtggccatgaagtgctaccagcagcggatgatggagtacggctggagcagcacggtggaggactcacaggaggccaccgccgccgccaccggcgacgatgagtcaccgcaagaagaaactcctgctagatcaagcccggccaaggcgcacgaccacgagccggcacagggatttggggcggcggcgccggcgcggcatcgccggacgccagtctccggcgagtttgcaagggagaggctgagagtgaggggtggcatccagcctaggtgacaggacaaatctgtggatgccgtatgttttttttttctttcattttttttacattgtggtaggtttgggttgtgaggacgtaatgtcacgaaatggttcacggaaataatgagtatgatccacacataggagttccatataatagaatggctatagaaattaatatatttctccacacatctcacttcctccatttcagaaattttaatttctgctacaaatctacagcctacactagccatgcataacacaaaacgtacatgcaaaaattgatgttttttttttcaaacagctaatcagattgactggtgttatattaatggggcaatttcgtttccacccctactttgatgtctaatattgattttatctctactttttagggttttcgtttttatcctcatttttttaaccaaacgcttgttttgcctgtactttggatggtaaagttaacggcgttaagtaattgataaaatgacatttataccctctcatgtatgttcattaattgtgtttttgcccccattttatacatatagctttggaactttatttttgggagtatatttaaaactagatgacgcacattgactagtataacaatttggccaaattctgaatttgatggaattttgacaaaatttcagcattttgatagaacttaaacaaaattttgacaacattttgtaaaatgtaattatctcttccctttagatattagtcaatgtgttttatttaattttaaatatactcacaaaataaagtgctaaagctacatgtataaaataggggcaaagatataattaatgaacaggtatatatgagagggc

SEQ ID NO: 16727 - DNA, 6072 bp, Oryza sativa
tgtcattttgccaattacttaacaccgttaactttaccatccaaagtaggggcaaaacgatagttcggttaaaaaaagtgggggtaaaaacgaaaaccctaaaagtaggggtaaaattaatattagacaacaaagcagggttagaaacgaaattgtcccatattaatagagggaagttgagttacacagctaaaggctcaaagaaagtaaaaactgcacacgcctgattgcaaacatgtttgcacgttatgcaaaaaaaatgatgtgaagacctcatctttgagatccattagggcttccaaaatattccgactacaaactgactcatgtggactgaaaccgtacggatcacaatgtgaataaaaagatattggtagttaagacattgtagtgaagcccaagtctctttcaaatgctcaattcagtccaattaagactatgtatttccaaattatgccaaggacaaaacaattttggcatatcatgcatggaacatttaaagaaaattctcaggcattcatttttctacgctccacctttaaaaaactttgcaaatacaaaaaaataaaacaagggtgcaaacaacattagcactcttcaaaacctattgttgaaacggattgtttgccccatgctaaaaaaaaacattttagaaacaactttctccaactacttgttgtagctacttgttaagtttatttcttaaaatgtttaagctatgtttataatataaatagacaatctacacaataatccgttcaataagctaaactaaatgggaccttaccgtagactgctaccacaacatgcacatagattatagatagcaggcatgtcataaagctaaagagaagaggagactcgaacaatcaccaatggaacaaatcatggacatcccaaaaaaatctagcattttcattcgtccatcaaatttggccatgtatatgtaaactgatcagcttgggatttggtttggtcataggcccaggccgacccatggaatcttggaccaagatcacatatacttcgtgaaaaattgttggatctattgggctttgtttcctacgcttctgtgtctacccatgtgatgagtgtatcatctcttactataataaaacctaaagcttaacatacaaagatgacacgtcatcattcactaacaattattacatttaaacatcatacaagcatgttatattattaataattttatagtttattatattttatagcttttcaaatataagcatgttaaatcatcatatcacataattcacataatatttcaatatgtttcttcatctttttttataatatcatatatacctatattgtccatcctaactcctaacttagttaatgtgctctctctctcttctctcattaagccatatcacatcaattgttttgtccttagatgattatctattgttcaaattatctccctccttttcttctcttaagaagtcatatcacctcaatcgtttttagcctttagatgactaatctatgatccaaactatctccctccttttcttctctcataaagccacatcagattagttttacatttgaatcatcattgtgtatactatttaaatttaaactaacataaaccacataaacatacaaatcacatcaacttaaataagtttatattgtctggctatcttatacattaattttaattagtgctatcataataaattcttgcagcaatgcacggggtttcacctagtatttaaaatagtaaatgcactgcatttagattagctaggttcttttgtctaagactcagcctttggcaccagcctaaatattgccatacttgcttgttacttgctggcaaaatttgctataggacataaaaaatatgtaattagctaggggacaccacaagaacatgtatctgctatatggcaccgcaaaaaactggtaattagttgctggacacccacgatattattttataggcaaattttgctataggacacttcgacttcgtggttttagccataggacaccgcccgaactcacttttgggggaaaacactccataaatgtggtaatttgccaatagacaccgtgccaattagaataataatttctggttgaaaaggagagagaaatcacgtgaaatgtcaaaaatgcccttgggcccacatgtcagctctcctatctctcttctcttctctctctatcttctcctaggcgatgctggtcaccgccgcgccactgccgcgtggtaccttcttgaaccgcacccacatctgcttcaggtcgctcgtcgacagcacgtcctcccgcccatagctcgcccgccacttgctctcctccggcaagatcgggtacagcagcaacgggagccgcaacagtagccgcaccccgtcctgcgccgtcccgagcaccgcaccgtcctagatgcgcggtggatccccatcacgacctgtcccacctctccgatctctcttgatctcctccggccggccgtcaccaccgtccgtcttcgcaccatcatcgtcgtcatcgtcgccatcgccactgccgcactcgccgtcgccatgccgacgcggctgccatggccgacggcggccatcacctgcacatagcgccaccgccgtcgtcaaagccgccgcagctgtcgccgccgtgcgccacgatcttgatctcgaggccatccgccgccgcctcctcgtcgtggtcctcaccctcgccaccgccgccccacgcggcaaaggcgtagtcaccaccgcgccgcagttgccacagccgccatcgccgtgcgtcgtcgttggcgtcgccgctgccacaaccgggacagctgccgccgcacgactgtcggtgctcctggcgctcaactccgtagacgacggcgctcccggttgaagaaagatggaagatatgacatgtgggcccaaggacattttagaactttcacgcgatttctccttcctcttcaaccggaaattattattttaattggtgcagtgtccattggcaaattaccacgtttatggagtgttttcccctaaaagtgagttcagttggtgtcctatggctaaaaccatgaagtcgaagtgccctgtaacaaaatttccctattttataatatccaaaaggaaatagagagagaaacagttgccaaaataagattttgcttatggagaagtttctatatgctgcttggaatatttggaagcaaatgaatggtttcatttttgataaaaaaaaattccatctttgtcttcttggaggcaactcttgaagagtgatctccttcttttgttgtttaggactaatgcgagatatcacgatgtaattataagctggatcaatctgttgtaatttgtaccctttctttttaataaaaatttcttaacagcaggggcctcccctgctgtgttctcttccaaaaaacgattttgcccctgcctaccaagtctagctcgcatacagctccgacgctgccaccgctgtcgctgccgttgttggcaaggcagctctctgggtgttcaagagggcccacgcgcctgggcctgtggctccgcatcattcccacgctcgtcgttgctgcaacatgaggaccacgccggtgctgaacatgtggccaccgcgatgtcggagctatatgcgagccgcaaaatcgtacattcatggctatttttctctctatttactctagatataataaaataatactacgggtgtccaacagctaattaccagttttttttggtgttccacagctgatatgcatttttgcagtgtctcctagctaattacactttttttttatatcttgtagcaaattttgccattaaatggcttaactgtagctataaggcttagcctgagatttgaagcattgggtagctcccttcgtgtcagcaacgggcgcgcatattggctcaactgggagctcctaatgaataacaaccccttgcaacctgcccacctagggggtacagaggacatgaagctttgatcaagctatggtacgaagttcgaagaacacgcgcgacttgaggttggcggcgagctagagtgacttattgggggtcgagttgccagcgagggcctgccgacctgcgcgacggctacgacgtgaagcgcatgtgttgtgttggccgtcagatagcctcgccttccgtgcagaggtccatccccatggacgatgccggtaggaccagccgctgcggcaacaacacatattggtgcaagcagttaaattattataggttttataaggaatttggccgactcgtcatgtccatcttggcctccgtctcatctgatcatctccctctccaacaccacatagaattcgagttttactcttccctgcgattcaaaattttggcatctgcgtacgacgcgatgtcgtcatatatccggtgataggactctaccttcactggatgtccgacacgacggtggcggcactccttccgaccacaacaatagttttgtcatcgtgccaccagaggaaacctcaatagacgtagaatttgcccctctggttctacttgtacaaaagactaggggtggaaaaaaagctctgtctcgcgagcttagctcgggcttggctcgagctcacttagctcggctcgtctcgattgctaaacgagccaatctcaagccttctttttagctcgttcttgaaatgagctaagaccaagctggctcgcgagccgcttgtttggctcgtgagcctaggccatcatgtacttatatgtatgattttattttctagtgaagttattatttgtcaatatgcaatttatcatctagattttgatgaattgaataatataaaattattttaattttgcatgtcgatgatttgttattgttttccttaatgattacaaattatatataaagaggtgcttcaatgggaaggctcgcaagccagctcgatcttgctcgaacctggaaatgagccgagccgagctcatgttttagctcgtttccccaaccaaaccgagccaagccaagcctaacttgttgtgagccgttgcaagccgagtcaaactcgacctggctcatttccacccctacaaaagaccacccaaggatataaatacaacacaccaagaggagaggggacatggaatacaaaccaatacgacaagacaactccaatcttgctgagttcatattcgagagagtagactatgctagtcgtcgaccacatgtgagagcttcatgtcgctagacgcacagagagtagattaggtcatcccaaatattgtactcgtgagatattgatatataaagacaacatcagcttcggccagtaggagtagggctattactcgttgacaagggggcatgaacctctataaaaaatccttctctctcgtctcttttaactcaatctctcgcataccctgacgccaacgattctcttactctacaaataccgtaggcgggtataaccctagtgtcaaatgggctctccggccgtgcggagatctgtccccacagatggcacgtattggtagggaacaatcatagggaattacccaactcgtcgtttctatctcggtctcaccatctctatctctatctctgtctgatcgtctccctctcgaacactacacatggaatcctgagttagccaatacctgaacaaataccgtaggagggtatagcccgtcgacaatacaattgtaccctcattctcaacaagcaaattgttaatgaccaaatttggtaatttcagcatcagaggtggagataaaactcaaccggaattcatgatggaaatcgttccggaaacagagcaaggatcggctaaagtcctgtcacaccctaaaaatcccaaatatataaattgttgtctaaattggaattattagaatttattttaaaagcctagaagagaagatctagttttaattaataaattccaatataaaatggggccagataaaattttattaaatactttgcttaattctataattcctaaatttttctaggatttatttgagctaaggaagtatttttaataaatggaattgcatttaatggataatttaaaatgaaaaaggttttaaaaatcct

SEQ ID NO: 16728 - DNA, 6055 bp, Oryza sativa
cgtggggctgtgtcttgtgggtacagtggtacacctctggccagagtaaaactattcgaatagccgtgcccgcggtcatgggtgggtctaacaatgtctttcgtgattagttttacacttctcaccataataaaagatgctataactggtaataatttgattaactcctggtttggaatggtatattcctggtttggagatagaactgtgcagccaggatggttgatcagaatggttgggcctatgcaatagtgtatgttgtatagcgttggattaatattgtttaattattacttaactgttttattaaattctgaaatgtttattaaatgctgtttatgcaaatgaaaccctactatgccatcctttgttatcctgtgcacttgcatatttgctgcgtggcttgctgagtatgtcatatactcaccttgcaatcattcataagaggaggagttctacagtgatgctgatggtgtggaggattaggtgtagccctggtcaagctgcctgtggagtggagtcgtctgcgccgtttatcttattttttttccgctgcttagatctttattgattgagaggaactacctacctctgtaatgacattttattcgcttattaattagagtaataattgtactctattatcaatttgttattgtgtgcctcggctgattcctggacgagggttcacacacatgtaagcgtttggaattttggatagaaattccgggcgtgacaagttggtatcagagcctccttgaccctaggttatgccaaatggttacccatagaagccctctaaaaatattggaaaagtagaactgttctcctctctttcttttataattaaaccaaactaatggcacatgcagtttataattcctttaattgttctcatttaaaaatttatttattattcctgtgttattagtaccgtacatctattactatactaatggctcatttaccagcaaaagttttacaacattggtttatttaatcttgctgcaatgaaataaatttagcatgttgattttataactttgttttattttatttctttgaaacctgttgttcaaaagtgcaaaatttgtgatcttgtttccaactgtttcaacttatcttgcaagcttggtttgctttatttacttaccttttactttgattttctaactctattcaaattaatccaaaaacttgtactattaattggataaatgtcttaactccctcctttcacttgtctttagatgccgcgctgcaagcctgagtacttgtttggtgttgagggatttgtcaaggagttgcgtacgatgtcctttgccataggatttgggactgcccctttgtatgcccagattcctcgtgatcgtgatgaagagaagtgccgagtcaaagtcaccttgaacagtaatagtgaagatatactatccgtgatgttcgaagctggaggaggaaactacattcatgcatgtcaggaggtggcaaggatcgccataggagagctccgcgatcgctacagtgatcagttggccgacactgagtatcgctaccatcctcgccaaccccagggaagtgaccgtggcagctaccttgagactgaggggattgagaatgatgctaccacaaggcatctggtcgagatgctgtgggctatggataagacccgcgcggagattgtgttagcagctcaagatcgtgaagaccggaatcgtggaaagatttgcaaactagaagacaaggtggatcgtttggagaaggaactagccgcattgaagggagaagcaccaccgcagaaggccagggttcgtcttaccgccaggaagagagctttattcgtccctcgctaccaattggcgccaaaggttcgtgtggtagaaaaagaagctaccccaaccctagcggatcctccgatcgtcaacgtaagtgatgatgaaggagaggaatcaaagcgcacccactcaaaggttgaatggggagctactcaagatgatggagacgagccgaacgagccttcaatcaactccgatgcccggaagacctagaatgccttgtcaagccgttgtcctagatcgttgtgttagtttgcttgttttaagtgtggttgtgtgtgtgggtcttgcatgtggtttacatcagtggtgggatgtaagcgcatgcgtttgtttgctttcgagtgtttggtagttggtgagtttagtggtgtgagagtcttcagttttgtaataatgaaactcagttaagatcaataaaagttaagttagtagaaaaattaattctctgtcctaagtagtttttccccggtttctcttcttgtgctcctgcccatgccagatggtgctcactcgcagtaacgggaatggccccaacatcaacaataacaacaacaacaatggagagaatcccacacttgcccaagtcctggctcaataggcacagcttatgaacatgatgatgcagcaacttcagaaccagtagaaccagggaaataaccatgcacctccccagaacaagttagcagaatttcttcgtgcgaggccgcccactttctctagcaccactaatcctgttgaagctggtgattggctgcatgccatagagaagaagttggatttgcttcagtgcactgatcaggagaaggtctcatttgcatcacaccagctgcatggccttgcctctgagtggtgggatcacttccgccttaacagaactaccgctgaacctatctcttggcttgaattcaccgctgctttctagaagacgcatataccatcgggagtggtgtctctcaagaagaaggaattcaggtcgctcacccagggatctcgcacggtcaccgagtatctgcacgagttcaatcgtctggctcgttatgctccggaagatgtgcgcactgatgaagagcgccaggagaggttcttggaaggacttaatgatgagctttcttacccactcatgactggggattatcatgattttcagaagttagtggataaggctattcgccaggaggacaagtacaaccgcatggagcagaagaaatgccggattgctcacttcaaggcacaacaggggaatagtcagaggccgcgtcttactttaggaccacagtccatgccacggggaggttcttcgtctgttgttcgtccgcagcgtcagttcttcaacaacaatgctggcaacaacatccgcaatcaagctccacaccctgttgcagctccaacacagcaacagcctgccaagagggagcaaggcatcaagcccggggtgtgcttcaactgtggtgaaccaggccattactctgacaagtgtccgaagcctcgacgcgtgaaggttgtccctgcccagagcaactctaccgcaccagcatcaaaggctcgtgtcaatcatgttgctgctgcagaagctcaaggtgctccagatgtgattttgggtacgttccttgttaactcagttcctgcaacagtgcttttcgattctggtgctacacattcatttttatctatgagttttgcgggaaatcatgggatggaagtagaagatcttagacgtcctttgatggttagtaccccgagtaatcaagcactctctttgcaacgtagcccctctgtcagaatagaaattcaaggagtaccatttctggccaatcttatcctgttagaatccaaagaccttgatgtcatcctagggatggactggttagccagatataaaggtgtgatagactgtgccaacagaaaagtaactctcaccaacaatgatggtcgagttgtaactgttcatgcattgtcttcggagtctttaaggtcaagtctgaaccaaatagctttggaagagattcgcatagtacaggaatacccggacgtgttcccggacgatttacctggtatgccgcctaaaagagatattgaattcagaatagatctggtaccaggaacaactccgatccataagagaccctatagaatggcagtcaatgaattagcagaagtcaagaggcaagtagatgatttgcttcagaaaggatacatcagaccaagttcgtctctatggggagctccagttatttttgtggaaaagaaagatcatacccagaggatgtgtgtggactatcgtgcactaaatgatgtgactatcaagaataagtacccgctgcccagaattgatgatttgtttgatcagcttaaaggtgccaccgttttctccaagatagatcttcgatcagggtatcaccagttgagaatcaaagaagaagatatacctaagacggcttttaccactaggtatggattgttcgaatgtactgttatgtcttttggacttaccaatgcccccactttcttcatgaacttgatgaataaggtgtttatggaatacctagacaagttcgtggtggtctttattgatgacattcttatctactctcgaacaaaagaagagcatgaagaacatcttcgtcttgcactagagaagctacgagaacatcaattgtatgtcaagtttagcaagtgtgaattttggttgtctgaagtgaagttccttggtcacgtcatctcagccggaggagttactgttgatcctagtaacgtggaatccgtaaccaactggaaacaaccaaagacagtttcagagattcacagtttcctaggtctcgcaggatattatcggaggtttatagagaatttttccaagattgctaagcccataacacgattacttcaaaaggatgtaaagtacaagtggtcagaagaatgtgagcagagttttcaagagttgaagaatcgcttaatatcagctcctattttgattttacctgatccaaagaagggtttccaagtgtattgcgatgcatccaaacttgggttaggttgtgttctgatgcaagatggcaaggtgattgcctatgcatctcgtcagttacgtccacatgagaagaactaccctactcatgatcttgagttagctgcagtggttcatgcattgaagatttggcgtcattatcttttcggtactcgtacagaggtgtacactaatcacaagagtttaaagtatatttttactcagccagatctgaatatgagtcaacggagatggttgtaattaattaaggattatgacatgggaattcattatcacctgggaaaggttaatgttgtagcagatgcccttagcaggaaaggctattgcaatgctacggaaggacgacagttgccattggagttatgcaaggaatttgaaagattaaatttgggaattgtcagtagagatttcgttgcagccttacaagcaaagcccactctaattgatcaaattagagaagctcaaattaacgacccggatattcaagaaattaagaagaatatgagaagaggaaaagctatcggtttcttggaagatgagcaaggaactgtatggttggacaagagaatctgtgtccccgacaacaaagatttaaaagtcgcaattctaaaggaagcccatgatactttatactccattcaccctagtagtaccaagatgtaccaggatctcaaggaatgattttggtgggcaagtatgaagcgtgaaatcgcataatacgtagcagtatgtgatgtttgtcagcgagtcaaggcagaacatcagaaacccaccgggttgttgcagcctttgaggataccagaatggaagtgggaggaaatcggtatggatttcatcactggtctacccagaacggcatcaggccatgactctatttgggtgatagtcgacagacttaccaaagtagctcatttcatcctagtaaagacaacatattccggaagtcggttggcggaattgtatatggcaaggattgtgtgtttgcatggcgtccctaagaaaatagtgtctgatcgaggtagtcagtttacttcaaagttttggaagaagcttcaggaagagatgggttctaagctgaactttagtactgcttatcatccgcagacagacggacaaaccgaaagggtaaatcagattttggaagacatgttgagagcttgtgctttagacttcggtggaagttgggataagaatt

SEQ ID NO: 16729 - DNA, 4713 bp, Oryza sativa
cggttggcggaattgtatatggcaaggattgtgtgtttgcatggcgtccctaagaaaatagtgtctgatcgaggtagtcagtttacttcaaagttttggaagaagcttcaggaagagatgggttctaagctgaactttagtactgcttatcatccgcagacagacggacaaaccgaaagggtaaatcagattttggaagacatgttgagagcttgtgctttagacttcggtggaagttgggataagaatttgccttacgccgaattctcgtacaacaacagttatcaagctagtctccaaatggctccttatgaagcactgtatggtcggaagtgccgcactccgcttttgtgggatcaaatgggagaacgtcaggttttcgggacggatatcctgagggaagcagaagaaaaggtgaaaatcattcaagaaagattgcgtgtggcccagtctcgtcataagagttatgccgacaatcgtcgtagagatataagtttgaagaaggagatcatgtgtaccttcgtgtcacgcctcttcgaggagttcatcgtttccacaccaaaggaaaattggcaccgcgtttcgtgggaccttacaagattgtcagtagaagaggagaggtcgcttgtcagttggagttacctcaatctttggcaggagtccataatgtgttctatgtatcgcaattgaaaaagtgtttaagggtacctaccgaagaagctaatcttgaacagatagaagtccaagaggatctgacctatgttgagaaaccaatccgtatcttggaaatagatgagagaagaaccagaaatcgagttatccgtttttgcaaagtccaatggagtaatcactcggaagaagaatcaacttgggaacgagaagatgaattaaagtcagctcatccgcatctgttcgccagttcttccgaatctcgaggacgagattctgtttaaggggggtaggtttgtcataccctaaaaatcccaaatatataaattgttgtctaaattggaaatattataatttattttaaaagcctagaagagaagatctagttttaattaataaattccaatataaaatggggccagataaaatttcattaaatactttgcttaattctataatacctaaatttttctgggatttatttgagctaaggaagtatttttaataaatggaattgcatttaatggataatttaaattgaaaaaggtttttaaaatcctcttttggctttgggccgaaagtcggcccaaaaccttctctcttctccccggcacaagccggcccagtccgccgcagcagccgcgtgcgagcgccctcggacgctgacaggtggggcccgcctgtcaggccgtcgtctacctccggccgcgcgccgcccgagccctagcgccgcgccgccgccgtctccttccaaattcggccgcccctttccttttccggtgaaatcaatagaggggaaatgatcttcgggatctcctctaccttttctcttttggaatcgtcggctaaaatcgtttggaaatctgtggattcgagtttgattcggatcgatctctctcctccaaaccctagactttccttcacatcgccggtcgccgtgggccttcgccgccacctccttgcccctataaaaggacccccggtgtctccgctacccgccgccaccctcgcctttaccagccgccgccgtctgtagcgccctagcaccatgcagccgtgcgccgccgtcgccgccgctccagctgtgcgccaccgtcgctccggtcatcgtcgctgctcggggaggtcaccgtcgtggtaaccaagccatcgccgatctcgtccgcccctccgccgtcgctgtcgaccgccggaacaccgtcgccgtcgtcaagccgaaggtcgcccccgcttcttcctcgacgccgtcaccgtccgttgatcttccgccgttgttttggtcaccggtgagttcgccgcgttgccctctacgtgttggttccctccgttcgcgctgtcgtgtcgtcgttcgccggagagcatgcactcccgagccgccgccggtggtgacgccaccgctgacgtcatcgtcatcgttccccgtggcccggtcatggaccgatggatcttggccgtccgttttggatgaatcgatctcggccgttcgtttccgtgagccgccgccgtgctcccggttcaccgcgaaccctagctactgacgcaataattcccttttccttttcaaaaataattcattattgcgtcataattcaattaaaatccatataagtgttttaatccgatttaatctttaaaaattcataactaattcatcttagctcggatttagttggttcaagtctctaaaattttctaaaattgagatctacatgttaaaaatatccacatatactgttcatgcttgtttatgtgctgtttggtgattttgcccctttctgtttagattccgacgttttcagagagtctgttttcgcaggagaagaatttgaagagttccaaggccagcaaggcaagtcacacagatcccaaacaaccctttgagcatgttgatcccgtttaaagctattgtttctattcaactattgcatttattttcaaatgtcattgggtggaattaacctattgtttgttatagcccttttgttcttgattattttattccttgataccttgggttattataacttcactagttgggctttatatattggttcagctagatattagatataattgcttagccatgcttagaaacattagcacactattgggataacttatgactcactattatttaatgatggtttaattatagctcacgatggctaatcatgattggttaattaattaatttgccaactaaaacttgataatggtgggttgtgagcacatggttttgattgtcgtgctcatgacgattaaggaccggttcacgagtttcggttgtgaaacattaaccgtgccaaccacaagccagcgtgggcaacggctttaccttttgtatagcatggttcattgcggagcaccagactgagaagtggcggagataagcccacgggggtcgctggggagtccatgccttgtttataagggggtgattatgatccaggaatggtgcgctgtggtggattgtgttgtgcaaggggtactgtcacagctcctttctgaggtaccatggtggtattgaggcgcatggtgacatgtcgtggggctgtgtcttatgggtacagtggtacacctctggccagagtaaaactattcaaatagccgtgcccgtggtcatgggtgggtctaacaatgtctttcgtgattagttttacacttctcaccataataaaagatgctataactggtaataatttgattagctcctggtttggaatggtatattcctggtttggagatagaactgtgcagccgggatggttgttcagaatggctgggcctatgcaaaagggtatgttgtatagcgttggattaatattgtttaattattacttaactgttttattaaattctgaaatgtttattaaatgttgtttatgcaaatgaaaccctactatgccatcctttgttatcctgtgcacttgcatatttgctgcgtggcttgctgagtatgtcatatactcaacttgcaatcattcatcagaggaggagttctacggtgatgctgatggtgtggaggattaggtgtagccctggtcaagctgcctgtggagtggagtcgtctgcgccgtttatcttattttttttccgctgcttagatctttattgattgagaggaactacctacctctgtaatgacattttattcgcttattaattagagtaataattgtactctattatcaatttgttattgtgtgcctcggctgattcctggacgagggttcacacacatgtaagcgtttggaattttggatagaaattctgggcgtgacaagtccgaatcaactgtgaccgggatcggcagaatccgagttggacaaggttagccaattgagccgagtccaacaatgcgacgcagtacacgttgtcgagttgagttaatgtgcttcatgaggattgtcatgcatggattgagtcctgagaaggcaattgtatctattaattaggatattttatgtaatttccttagagatatgtttgggcaaaattctgccgcaaagacttatggtatcttagagtttgttaaagataagagtcgtgtccgacatggacatattttgtaatctcgggtataaatagacctcgagccccatgtaatacaacaacacacgttcaatacaatctcggcgcatcgccacccttttactttcgttttgtttcgacgagctcttgctttcgggttgagctgcatcggtttcaatcttcaactagaggtaaaacttcttatggcggcttgcgttctcgggattagtgctttcatctttatgatactctaatcttgtttatgtaatttgtcgagttatcatatattctatataatctttggcaatattgttatctaacctccagtcggctaacatctgttgctagaaggcagccgattaggttaaataccaacgttgacttagattatataggatatctaccaccctatgaaacaatcagcggcttgattgtctagatattgtccttcttttcatacttatagctgcatcagttgagtttgatcttataaatcatgcttagaatctcaat

SEQ ID NO: 16730 - DNA, 1866 bp, Oryza sativa
tttttggacctgcactaaagtttagcagatcttccaggcctcgtgttttcacattaacatgcttttggcactcccggtgggaccattagaagtcagatatgtcaggagacaagcaagcttcgaagtcaacagatcctcaacacaagcctccgaatccaattgggtctgaagttcatgaaggaaatattgttccagtcacactagataaattgtcggctgaacataggcaagagcttgagcagatgatgagtagcgttaaggacaagttcatgaattcgttccaacaaacccgtaaagggacaattgtgcagaaatacaagctgaaagtggttgctgccgatgaagttggtccaagctcagctcaaggcgataaaggcatcgctggtgaaccaggcgacaaaggtggtagttttcaggagggcatggttgaagatcttggtccagatggcagtggatacaaacaacagttttacaactttccaagatcggattgactatgttgtgcaacatgctttgatcaatcagttaggagtcttagtcaatactttaaccaacatggtgaaaacagtggttgatggcacaatagctgagcatcaagctacacgaccagtgtgtttgccaggtggcgtttttccaaattataggcctttggttacaggcaatcaacagggttcttccaacccaccatcaactcagccgatggcacaggctatagcttctgctccaactgcaccggctgtaacatcatcgggacaaaggcaaatgataaatcctcgactgctaacctgggagcagccgcagcatagtgggcaaaatatcaatcggttgattcaggaacaggtggccgctatgttcttgccaaatccaccagttgtcgatccagcattgccgagccagcaaactccaccaaggcagcagattactcagccgattcaacagcaaagtttgctaaatacatcgtctaggttgaggacacctgataatcagcaaaggcatcatgttgcaactcaagttgtccccgagcatttggttcataatgtgcaaccagatcagtcggttataccccaaattattcctgaacatttggtgcgcaacatccagccgaatactcagaattatcatgggggccacttgaattatcattactagcctccttcacctcatgtccaccaaggggggtctcctcaacctcaatttgctccttagttcaatcactttgagctgatacagcagcagacgcatggggcacctcagcagagacagtgggccgacatgatcacagatgtgatgagggagcaatttgggctgaagccaaaggatactgggaacttatatcggcatccataccctgagtggtttgagagggttccattgcctgcccggtacaaagttccagacttctcaaaattttcagggcaagacaatgtttcgacttatgagcatgtcagccgattcctggctcagtgtggtgaagcatcggttgttgacgccctgagagttatgctatttcctttgtccttgtccgaatcggcttttacttggttttattctctaccatacaattatgtcaatggttgggccgatttggagaaacaatttcatagctattttacagtggaattcatgagatgaaactttctgacttgacagcaattcggcaaaggcatgatgaatctgtgcaagattacattcagagatttagagagacaaggaataggtgctacagcttggctctaacagattctcagctagccgatttggcttttcaaagtttgatagctccgattaaagagaaattctcatcccaagagtttgaaagcttatctcaccttgcacagaaggtgactctgcatgagcaaaggtttg

SEQ ID NO: 16731 - DNA, 8412 bp, Oryza sativa
tgttcatcagaggttgggcctagtgaacgaagatcgtgatcaagaagacgatgaggacagaaaaactcaatggtgtccttatggtatttttacaaagaatcagaagagaagggtcaaaaggttgaggaatagagaatgttttcgtggggtagagccaagagatcaaccatcggctgaagaaagcaaagcccaggcaagaatggcgtgttaaaaggcaggatccaacagccgatgaggctaaagccaatgaagcaaagaggctggccaaaggaaagagtgtcgtgactgcatcggttaacatggtttttacactgcctgcggaatttggagctaaacaagccgatgttgatgaagttgaggaagcttcggctaaattggttttgtcaccagagcaagcagtttttgaaaagccagaagggacagagaatcggcatctcaaaccattgtacattaacggttatgtcaatgggaagccgatgtctaaaatgatggttgatggtggggccgctgtgaatttgatgccatatactacgttcaggaagttgggcagaagtgctgaagatctcatcaagacaaatatggttctcaaagactttggtggcaatccatcggaaacaaaaggagttttgaatgtggaactaacaatcggcagcaaaaccgtccctacaacattctttgtcatcgatgggaagggttcctatagcttgttgcttggaagggattggattcatgccaattgttgtattccttcgaccatgcatcaatgcttgattcaatggcaaggcgacaagattgaaatcgtgccagccgacaggtcagttaacaatgctaatgtcgatttagctctttgggagatggacggtattgattgcttgtctggaaaggtttgggatggagattttctaaaagtgtccgattgtgatatacatccaattgaagacggagagcccaaattattgttttgagggcgtcgtggagggttcaagcgtctacaccaaggatacagtagatgatctcgatgacaagcaaggacaaggtttcatgtcggctgacgatctgaaagaaattgatataggtcctggtgatcgacctaggccgacatttatcagtaagaatttatctcctagattcagaaccaagttgatagagcttttaaaagaatatagagattgcttcgcttgggagtattatgagatgccaggactaagccgatcgattgttgaacatcggcttcctataaaaccgggggctagaccttaccagcagccaccgaggagaagcaaagccaatatgctcgaaccagtcaaagctgaggttaaacatttatatgatgctggtgttattcgtccatgccgatatgctgagtgggtttcaaacatagttccagttatcaagaaaaatggcaaagctagggtgtgcattgattttcgagatctaaacaaagctaccccaaaggacgagtacccaatgccgattgctggtcaattggttgatgccacctcagggcataagatattgagttttatggatggtaatgctggttacaatcagatctttatggcagaagaagacatttataagacagcttttagatgtcctggtgcaatcggcttgtttgagtgggttgtaatgactttcggcttgaagagtgctggggctacatattaaagagccatgaattatatattccatgatctgatcggctggttggttgaagtttacattgatgatgtggtggtcaagtcaaaagaaatagaaaaccatatagccgatttgaggaaggttttcgagagaaccaggaaatatggcctgaagatgaatccgacaaagtgtgctttcagcgtatcggctggtcagtttttgggatttcttgttcatgaaagggggattgagataactcagaggagtgttaatgcaattaagaagattcaacctccggaggacaagacagagttgcaggagttgatcggcaagataaattttgttagaaggtatatatctaatttgtctggaagattagaacctgttacacctctgttgatattgaaagccgatcaagaatttacttggggggcagagcagcagaagactttggataatattaagaaatatcttagctctcctccagttttgatccctccacaaaaggggataccttttagattatatctgtcagctggtgagaagtcaatcggctcggtcttgattcaggagcttgaaagggaaagagagagttgtgttttatttgagccgtcgggttttggatgcagagacaaggtattctcctatggaaaagttgtgtttgtgcttatatttctcttgcacaaggttaaggcattatctattgtccaatgaatgcactgtgatatgtaaagccgatgtggttaagtatatgttaccggccccaattctaaaaggaagggttggaaagtggatatttgctttgatagaatttgatcttcggtattaatcaccgaaggcgattaaggggcaagctatagccgattttattgttgatcatcgtgatgactcaatcggctcggttgaaattgtgccatggactttgttctttgatggatcagtatgcactcatggctgtggtatcggcttggttataatttctcctcggggggcaagtttcgagtttgcctatactattaatgtaacatacccgaaattttaggacttaaaatttcttgtcaaaatagttagaggttaacttctccaaatttcgagagccaaaaatttccgttttaatttaggtgatgaccaacttaaaccattgcatgattaaaatttgagaacaaaataaaatcttttcattcccaacattagactagaaatgtcatcaagcatacatgtacataatgcatgcctaggctcgagttctttgtgcatttggagttttggtcttgcattccataataggtcccatgagcataatctaaaagaattatttcactaaacaaacctatagttaatcttgggtgataacatgtggacttaatattaaactcaaatatcatcttctcagtccaaaagaagtttaatgtaatccctataataatattagatgaaattatgaagtgggaacacatatacaaacaaaggtcatcctaattctctaaaatattttgtgcaagataaaatcatggaaaaatttatgtggacagtgattagcacaaacttatcctctgtaattttggtaacatgttaacactcaagttgaaatctcaaattaatcggtcgaagcagacaactaaaagaaatcaaattaaatttaatcggctaaaaccatatttcatccaaaagaacatttaactgcacataagtgaacatgggaaataatttattcaaatactagattagttatcatgaataaatataatttttctagaattttccttctctgtttaatcctcctaaaaattcaatccagctttctaatagcccatctttgtttaatttctgtgagcagtccacccattatttttgagtgcaaccaaagaaaatggaatctaggtgtaatcatttacctccagtaaaatcaacactaattaatttggtccacacattgaattatgtagttacaaagttagaggagaaaataattccgaaaattaatctaaaaatcaagtttacccagaatcttacccaaccctctcaccctagcctagtttgccacgacctggacccacctgacagcctcttaagcttgccttgactctgtccatcacttcctccactgttccagccgagagaggaagagattgagcgagccgacgcgtggccgcaacgtgtcgtcgatctcggtttcccttttctcgctctctactcctcccagacgcgccgccattctccattcatcactctggagctgaagaagcctagggaggaggttctctgcctctccatcgccccaaaccttgccgccggtcgtagtgacgacgaccttcgccatctccgtttgagtcaaggtcacctccatctctttcgcgttcccatctctccacacaatgccgagcatttcctcttttgacctaaacccctctcgtgcagtgcatcgccgggaacgcgaccacgccgacgacgccctggagcacgcaccggagcgtcgccgcttcaaccatcatcgtcgtccggccattctcatccacctcagagaaagccgctgcgccattgtcatcgcctcaacctcctcttcaaaacgcctcaagaaccccagccggaaacatcaagaacacggagaacacatccttttcttcaccggcgccaatctaggatcgcctccgccgtcatcgtcgattaccgctgcctcggtgagccattgttcgattcctggcacatacaccatctccttgacctcacaaccctcgtgcatgcttgctgaagcagctcattgtcccgttcgagccgtcgtcgttcacccgagaagaagccccgtcgtcgagccgtttccacaagtcaccgctgccgccaaagacctcgacaaccatagctcgacccacggtgagcatcctgaagtctagaagaccacatgcatgcatccttttcgttcgtaatcgacttccatgcgcacatgcactttcaccccaaaaccaccgccgctcacactcgccatcggcgctactccgatgtcctctaaccaagaaaactagaggaatggaaacgcgagagcttgctcttcattttatcttttgacctcaacctcaaacgagccaccgtttgccgccggcgagctccagatcgagctcagccatggctagctctgctatgtctagagcagagggatgacttccgtgaattagattaagtgcagggatccgtttacaattgtagaaacacactgacatatgggcctaggactgtgggttgattcctagaaacctcaagggcctttgtgcatattggtccctcacagccatgtggaccccatcctctaaaatctgaagaaaaattaggaaaatgcccaaacaattatatgtttagcagaaaaatgcacaaagttgtaaaatctatataaaatcaaatatagctcattttgaagtgattccagtttctgtagattcttgaagttatgaactttattccaggaatataaaacttgacactcactgtacaaataatgtctctaagatttatctaagataagtcatgcataaaacatgtacaaacttataaaatacatagaaaattcatttcaactcattttgaaacaaaatcaaattctacagattcatcattcatcatcatacagtctctgattaagtgaaataaaagtaattacttactttgcatcaaaagcctctaaaactattatctttaaaatgactagttttagataagctaaactttagaaattcatgtagaacccaatttagcttcaatttgaataaacttaagttatgtaggatcactaacatatgtatttccaagttatgaaataatattatatacttactgtgtagtaaaagtctctaaatattcatataaggatttactaacatagagcagcctttaatttgtaaaacttgtagaaaatttatttttagtccaaatgaaatgaacaaagtttctatagaaccagcaaatagttatcttcaacatagtaaaataaaatttgtcaccttttgtagagaacattgatcaaaaccttaacttagtgaaataagaatttaaacacatagtgttgtttaagtaatacataaacatgtataagtatatatatacactttaggtctaattaaacctaaataaaaacttgattgaccagtgaagccatagttccatttccatccactaaaattagaagaacttagctcatataacaatttctaggttaatataatatattgctagtttagattaaagcatctctactttataaaatatgaaccatactagtaaagatcataaacatgtgaactaaaaatgttttagttaaccaaattattccttttattcaacttaaacaggaagtagcatgttctgaacctatcactcaaaagtcatgcacatataaaacactatatgcctaaaacacgttgtaacttgtaaaatctataagaaaatcattataactccaaaaaaattgtgaaaccaaatgtgttagtcttagaaaacacatctccacacccctgtgaagtctaatctaataaaaatcactttacaaaagtacttcataacactacctaagactatactactataaaccgataaaacttctaaaaattcataactccctaatggaataagataaaataaaaattctttcacctaaattcattttagatcagtaccaacccactgtgcataaatcatgcattttagagcattttggattttcagctctttcggtgtttaattgcatatcgtgtcctttatctagataattgcataatcggtgaagaagtggattaggtgctaacaattctctgatcaaggcaagttttctcctcccatcctttgaacacattgaatcccatgatttgaggaatgaaaatatttgtttgcaaagttgcatgtgaacttagactatatcggtatttgaaattgggttaaggtagttatgacctatttgctgcatattccaccttgaataattgatcctcttgctgtttgaacccctagaaatggttagagtacactctttgtgctcaaatgggtttatatatgctctatgtgcaattacttgcttagccatgcttagaaatacgcaaatgctcattccatctataattaaaatgtggttttgatacttgaacctttgctggaataaaatgaatatgatgggtatttgcgaattaaaatgtgtaaaatgtgattttatacttgggcggcaagtggtgtgcatatggtgttagttgcataccgataggggaagtgtttgcccaagtccataaggaccgaacttgtgtcacccatttaaagttatccgtacatccacatgtgctagtatgggatggcctaagctgattaatctatttaggactagccttgcattctggtaggccggtgtgtatgagttagtcgataattctgaggaattagtcgatgattcagaggaacttcctatttgccccgacgtggtagtttaggtgactaagtctgtccaatacaacggtattgtgccacgtgggtgggttcccgttgtgtccgccaccacggcgttaagtttaaggcgtgggcccgccacttaacggttctagacatatttccaagtatgcctaggatggaggaacacgtatcgtgctggtgcaaggctagattctaagtagtgtaaaggcttcgttatgacctctagatcacattcaacatgaagagtgtgatggagtcttgcaaactcaaaacaaactagagagttcatatcatgtgggtaaagctgtacaaactctgcagagttctttaaactaatcgattagccgtgctcacggtcatgagcgctttggtgatgtgtcatgagtatagactatgttttaaaaatgtgatcatgtgatattggtttgaaattaataaatgtgttgagttgtgtgtgtgaggtgatatattatgtcttgttgtcaaaggatgacaacaggagattgattataatggaattatgatgaattaaatattgaaacttaaaatttgttttgttaattgaagcatcaactcttttacaaaagaattgcgaaacaaaacttgctttatgctgaaaatgaactacatattgccttcctttgaatatatgccttacatgtagtatggtaggattgatttgtgcttgccagtacattaacttgtttaatgtactgactcttgctgtttgatataaccttttgtttgcaggtttagtcttagtctttgagtgatgcgggttctgattgcttcttctaggatgagaacttaatgaggtaaacccctagtcggtgtgcttgtgattgggtagtcaagcttccgttgttctctaataagtctatttggccggtcggcctatgtaattattaagttgttgtaagtcttaagtttctttcatcttagttgtgtttgctatgtataatcatgcttaagatgaaagtgtgaatctagtgcacatcctgggaactagattcacatgagtatgagttaggaatatttgagaggttgtagatctttagccatttttgtcaagtctcctgaatgtgtaacacatctggtcgccgccttcgagtggtttgacgggcacatctcaggctgaagttgactggcaggctaagggcccagcaatgtctccaatattcctctctcgaggtgtcggatgtttcattatgcttgtttgatgacttgaattattcacttcatctctcaaatataatggaaggtccggagagcctacgacaattaagccctatgcaaccaataatcaggttgagtacgaagcggttctcaaagggt

SEQ ID NO: 16732 - DNA, 1492 bp, Oryza sativa
gacttggaaacttgacttctgcagcggggcaactccattccacaggcaatccttgacagcaacgacgaaaccaacttcgacaagacagctcccactaggaagatcttcagctctggtgtgggggaaagagagcaagactgagtactacccactatactcagcaagtcataccggaagaggaggtatgatgcaggatatatccaaaggaggctaaaggctcatttgcataaagctagcatttaaaaccagtagttgaaagcagtaaaatagctgtagtgatttatcaatattaaccaaccactgtccaacgctacaccacgttgcaacaggcccaaaccacctcctgaactaaccagttccattagctaactaggggtgagactaatcacggtgaatctggtcgaccgcccataaccgcgggcacggctattcaaatagttttactctgatcagaggtgtacaactgtacccacaggacacagccccacgacacgttcctgtgcgccgacatgccaccatgacataccggaaagaggccgtgacagaacccttcgcataaccccctctaactaatcgcaccacaccttagggttcgcccccgtccccagcaggcaacgggcagccccccttttgtgccgtggtgaatccggaagccgaacaaccggacaccccggccgacccaactccatcacgcccaccctcgcctgggtacgtcggctagaggaaagctacactacaagcccagccgttgcccatgctggcttgtggtaagtacggtaagttcttccagggcatcccgcgaaccggtccttaatcgccatgggaacgactagcaaaaccatgtacccacagcccaccatgtagtgtattttaattaaccaacaccattgcggtggcactaatccaaagctatgccaataatcaaagtctatgctttaatgtaatccccctttgtgcactagttgaactaagcatagctaagcaatccctaatccaacatctaatcatcttaagacccaagttatcaatggcataaggtaaacaagatatggctgagtagtaggacccatcccacatgatattgtaaaacaatgcaatatttaataaaaatgcgggacatttgtaaattgggtacaatatgatcaatcgtaatgcatgacttacctttctctcgcactgatggaaccacagcaacgtcttcgagaaaccgcggatcgacgaaacggccgaaatctacgcaataaacaaagcacacaagcaaaacaggctataagactactgaaacaggaaacaaaaccatttttaatggattctatgtatttttatgaatttagtgagacttgaatggacttaatcagagctcggatgaattagatatgatttttagaagattatctgtgtttttactaataaagaaaaggccttaaataattactgcgcaataaatccccagggctgacgtcatcaagggagggggcgctgacatgcgggc

SEQ ID NO: 16733 - DNA, 2110 bp, Oryza sativa
agaagattatctgtgtttttactaataaagaaaaggccttaaataattactgcgcaataaatccccagggctgacgtcatcaagggagggggcgctgacatgcgggcctcactcggcagcggctcaaggggccggtccaccgtggaccgggaccacgcgggtggtccaccgccggtccacgggaccgacggcccggatcggcccggggccgatcggacggtgcgggcggcggcctggcacggctcggctcagcacaaagccggccgaccggccatgggggtgcggcggcggcgcacgcgaccaccggcgacggcaagcggcggcgcgagcggcggcggcggatggcgcacaggccgacggcggcggccgaaggtgatggcgagcgcgcggagagcggcggcgcgcggtgaaaagtgagaaggagggaggagaggggctcctcaccggagggcggcgaccagagcggggataaaggtggcggcgacgacccggcgacgaggagggcggacgggcggcggcggcacctaaggagggagtggagaggggttaggggtttggaggaaacccgcggcgacaaaaatggccggccggagttgaagggaatggaggggctcaccgacgtgcgaggaaaccggagctcccgaggggttcgggcgatgtgaggcggtgaccgaggtgctccaagcggcggtgaagctaacggcggcggcggcttggcgcggtggcggctctagcggcggcggcgcgcagttggaggcggcggcgagctgcggcgcgggcggcgagcggcgcgagctcggtaggagtcacgggagggagcggcgagagcggaaaggggaagaggagggcacggggaacgttttataggcggaggagaaggcgaacgtggccggaaggacctccgatttcgccggcgacgcggggaggagagagaggaaatggggggattcaaaatgtgaatcccgcccctttcgagcgcacgtgcgggccgggacacgcggggagagggcggcgacgtggggaggacgcgtgggcgacgcggcgtgggcgcgggaggagcggcggaggtgggcgcggcggttgccgacgtggggcgggcggccggaggaaggggacgaccccgacaggtgggacccacctgtcggcgtcccgaggagagagggagggagggaggactttggggaggggaggagaagcgggccggcgcggaaggaatgggccgacggcccaagaaaaggaaaaaggaggaaaaagaaaagagaaaagggaaaaaggattttcccagggatttaatattgcactttgcttattttaattggttaaaattatttccaaggctctgaaaattccactaaaaattctgttagcatattttgacatgtagaacccaagaaaaattccacatgtccgttccgattattatttgcatttattaattaaggattcaactctaggttaattcaacaatttctttaggcgatttatttaacaaattttaaagctaaaaaggggaacttcagggcgtgacaaagattggctagcttttgcttttcatgatctaattcggcattgcattcttcaagttgagctataagatcaatcttgtgggcttcaagccgatctatgttcgactgaatcgccccaacagagagttgatcaagcttggctttctcctcatgcacaagttgccgattggcttggatagtggcttcaatatcttttcgcacctgctgatcggcaatccgttgcttagccttctccagcttgaattgatgttgctcgagtgacacagctggagtaatggtatttgccagatcatccgggattaaggcttggatttcagcaaaccgtgcccggatggaaccgcagtcggccaccaagttgtctaatgatgactctagccgaagggatatatcttcgagtgttttcttgacattttcatccagaggggctagagccttgcttgtggattcttcttctacttctttatcaaagtaatctttgatgtcaaaggagaatagatcggctaaggtctggaaaagagaaatttaaagatagttaaatatcaaacagtgtcagccgatctaagatttatgtaatgaaagacttt

SEQ ID NO: 16734 - DNA, 921 bp, Oryza sativa
attcggtcgcccctttccttttccggtgaaatcaatagaggggaaatgatcttcgggatctcctctaccttttctcttttggaatcgtcggctaaaatcgtttggaaatccgtggattcgagtttgattcggatcgatctctctcctccgaaccctagactttccttcgcgtcgccggtcgccgtgggccttcgccgccgcctccttgcccctataaaaggacccccggtgtctccgctacccgccgccaccctcgcctttgcccgccgccgtctgtagcgccctagcaccgtgcagccgtgcgccgccgtcgccgctgcagctctagccgtgcgccgccgtcgctccggtcgtcgtcgctactcggggaggtcaccgtcgtggtcaccaagccgtcgccgatcccgtcgctgtcgaccgccggaacaccgtcgccgtcgtcaagccgaaggtcgccgccgcttcttcctcgacgccgtcaccgtccgttgatcttccgccgttgttttggtcaccggtgagttcgtcgcgttgccctctacgtgttggttccctccgttcgcgctgtcgtgtcgtcgttcgccggagagcatgcactcccgagccgccgccggtggtgacgccaccgctgacgtcatcgtcatcgttccccgtggcccggtcatggaccgatggatcttggccgtccgttttggatgaatcgatctcggccgttcgtttccgtgagccgccgccgtgcacccggttcaccgcgaaccctagccgctgacgcaataatccccttttcctttataaaaataattcattattgcgtcataattcaattaaaatccatataagtgttttaatctgatttaatctttaaaaattcataactaattcatcttagctcggatttagttggttcaagtctctaaattt

SEQ ID NO: 16735 - DNA, 623 bp, Oryza sativa
  unsure (1)..(623): unsure at all n locations
aatttaaattgaaaaatttaaaagtcttcttttggctttgggccgaaagccggcccaaaaccctctctctctctctctttccctcggcccagccggcccagtctgccgagccgccgctctcctctctctttttccgccgctgacaggggggccccgcttgtcagggtcttcgtcctccttcggccgccggcgcccgcaaaccctaacgcgccgccgccgccttttccttccaaatacgctcgattctttccttctccggggaaatctttagaggggaaatgatcttctcgatctcctcttccttttctcttttggaatctctggtcaattcgggttggaaactcgatggaatcgagatcgaatcggattcctctctctcccaaaccctaaagttttcttctcgccgccggtcgccgtgggcctccgtcgccgctcgctagcccctttataaggacccccaagctcttctctacccgtcgcctccttccctttcgccgccgtcgtgtgtagcgccctagcctcgggagcttttgcgccgccgtcgccgccgttcgtacagacgtgcgccgncgtcgctacagtcgtcgtcgtcactcgggaaggccaccgtcgggatcggcaag

SEQ ID NO: 16736 - DNA, 2911 bp, Oryza sativa
ttaagcactgtaggaaggttgtatacatgggtcatcgccgattccttgcagcaaaccacccggtacggaagaatggcaagcacttcgaacataaggccgaccaccgtacgaagcctaaacatcgcagcgggaaaacagtgtttgctatggttaaagatcttaaagtagtgttcggaaaggggcctggaagccagcatatagagagcgaagatggtcacgcggcgatgtggaaaaagaactctatattttgggagttaccatattgggaattcttggacgtacgccacgcaatcgacgtgatgcacctcactaagaacctttgcgtaaaccttcttggcttcctaggtgtatacggaaagtcgaaagatacactggaagcacgtaatgatctgaagcatatggaacaacgcggcgaccttcacccggaaccaaaggagaaaggaagccattacttgagtccagccagctacactcttagcaaggcagagaaggaaagtatgtttgaatgcttggagagcataaaggtaccgtctggatactccacgaatatcaagcgaataataagcacgaaggagaagaagttcacaaacctaaagtctcatgactgtcacgtgttgatgacacaactgctaccagttgtaataaggggtatccttccagacaatgtccgggcaacaataacaaagctatgtgcattcatgaacgcaatttcgcagaaggtcatcgatccggatagattagaagcccttcagaatgaagtggtgcaatatctcgtcagttttgagttgatatttccaccttcatttttcaatataatgacgcatctgctttgtcaccttgtgaaagagatccgtattctcgggcctatgtacctacacaacatgtttcctttcgagaggtacatgggcgttctgaagaagtatgttcgtaaccgtgctcgtccagaggcaagcatcgccaagggttatggaacagaggaggtcatcgaattttgcgtagaatttatcgaagaccttcacccaatcggggtacctgaatcacgccatgaagggagactacggggaaaggaaactctcggaaggaaagcaataatgacggtagacaacaatttattccgtaaagcccatttcactgttctgcaacactcttcattggtagctccttacatcgaggagcacttggctctagttcgcgccaggaacatcggtaagtccgatgcatggattacacggcatcacattgatactttccccgcgtggctacgacaacatctcatgggtaacgagtcgatcaaccaacaacttgccttcctggcgaggggaccgtctgggtcgatcgcgacatttcagggatatgagatcaatgggtacacattctacacgagagcccaagacatgaagagcacgaaccaaaacagcgctgttcgtgtcgatgccatgggacacgatggaacaactgccacgtattacggtgccatcgaggacatatgggaacttgactatggtcctctcaaggttcctctgttccggtgccaatgggttaggttgactggtggaggcgtaatgattgatgacagtgggatgacaactgttgaccttaacaaggttggatactcggacgaaccttttgtccttgccaatgatgtaacgcaagtctttttcgtgaaggacatgtctagcaaaggaaagaagggcagagggcctgatgagcctaagcgtcaagtggttctcccaggcaaaagaaaaatcgtcggagttgaggacaagactgacgaggattacgatcagttggatgggcaaccccctttcacggtgacgattgaccctagcatcctcctatcaaatgaagacaccccttactcacgcagcgatcacaaggagggaacaatagtgaggagaaagtacgtgcggtcaaccgtcaccgccgatgtaatgccgtaattattgtgtacacgatgtaaactattttggatgtattgattatccatataaatcaattgatgtatggcatatgttaattacgcacgattattagaggtttcaacaagtttaaatcatgtatatgttagttatatgtgatacttacaatttttaaaagttttaaatcacacaggtggcaatttcatatgtatgttaattagagtttttaacatttaatttactagcattcatatgctaattataattgactagaggatttttaaaagttttaaatcacgcaagtggcaatttcatatgttaattagagtttttaacatttaatttactatcattcatatgctaattataattgactggagaatttttaaaagtattaaatttaatatatttttaaaactatcattcatatattagagtttttcacaatttaatttactatctttcatatgctacttatatatgactattcgaatttttaaaaggtttaaatcatgcatgtggcatttacatatgttaattagagtttttagcatttaatttaatataattcctacgctaagtacatatgatgattacaatttttattaattttaaatcatgcagtatgtacattaatatcttaattagagtttttaccaatataataatatcattcatatatatgctaagaatatatatatattggaatttttattaattataagtcatatatttgcttattacgatttatccacttaatttattacagacaaaaataatttttcgaagtaattgtcatcaatctttgtactttaaataatgttaatgcattaacttctattttataaacacatatgtaagcgaaaatcatatgcagtgctataatctttagtcccggttcttaaccctaaccgggtttaaaaagaatttcgaaatagcgggaaaagatatttactcccggttgttgagaacaaccgggactaaagatcttt

SEQ ID NO: 16737 - DNA, 4877 bp, Oryza sativa
ttggagcaagcaagtgacgtaataatataaatgattgttatatttgtaatgcaattaattaagattattagacctgtaattagacttatcatataagattgtgtagtgttctaatattatttgagttttaatataagattattttattgcaaattagacttagtatgacattattgactacggaattggtgcgactcctaggaattgactattgtagtcttaattagacttagcatatacgcacgaaacacttagcatacattactattttagtcttagcatgtaatattatttgagttttaatataatattactttatttgtaattagacttggtatgtaattattgactacggaattggtgcgacaagtagcaattgactattgtagtcttaattagacttagcatatacgcacgaaacacttagcatatacatgactattttagtattagcatgtaatattatttgagttttaatataagattattttatttgtaattagacttagtatataattatttactagctagggttgtataatatacgtcacctagacttagcttatatcacgatttgtaattagacttagcacgtaaggttgtgtagggttctaatgtacgacatttacacttagcatacatgacttagattgttaaaacataaatgtctcgtgacttagcagatgtttcttgtatcaacagatggctgaccgcgatgaggaacagatattgtacgatacaatcgcggagggaagcagccagtactggaatgaagaagaggggaacgaggatccaaaccagtacttgaacgaggaagggaacgtggagagggatgcggaggggaaccagcaggggcacgtggaaagggatgtggaggggaaccaggaggaggaggctagtggtagtcaaccctccgttggacagaagagggcacgcgggcaacgaggtgcagcgaagaagcttgagggtcggcacatcataacggaagtggaagaagatggacgtcctagtgccccggccgaagccgccaagaactatgtacgtcacagcggttgggttgtgcgggataacgtgcctgtcagtacggtgtactggcgaagaacaagggcacgcggagatcatgagagctttgtcccagattcgagaaagagatgctgtggaccacaatgctcgagacattcacccttcctgcgggtacagaggacaaagtgaaaaggtggactctgaagaaaatggcagaacaatttcagagcttcaagggagatctgtaccagaagtatatactgaaggggcagacaccgaacttcgacacattcccaaagctaagggatcactgggacgagttcgttgcatataagacaggtgaacaagggaaggcgatgatggaaagaaacaaagaaaatgccgccaagaagaagtaccatcaccacttggggtcaggaggctatagcgtcgcgatgccgaagtgggagcagatggaggctagcttgattgagaggggtatcgaaccggcaacagccaattggccggaacgatcgaagttctggtactatgctcacggtggaacgctcaacccagctgatggctcactggtcttcggctatcagatacaagaggctgcgcgacgactaacagatgcagtggaagcctcctctcagggcacgttccgaccagacagagatagggacgagctgacactcgccctgcagactccagagcatccaggacgaactcgagggaaaggggtgattccttggaagattggtttcaaggaggacatccacacgtacaggagtcggatgaggagcaagagagataccgaggcgaagattgcagacctagagttccgggtatcgagctacgaactcaacatgcaagaggaggtggcaaggaaggttgatgaacgcatggccgcacatcggtcccatgatccccagccgaccattcctcctgcaatggtgagcacgtcaggaaaccgtagcagctgcgcctcaacggggcaggtaggatcacagagcatggacgccatgcaaacacaggacgaatcgacctgtcccgttgatgacatcactcagcggacaccatgtgagctgcatattcctttgaagaacttatcaataaaggtaagatttagccattccgctagttgctgcttatatatgttgattactaataaataatctctcacaacatgaaggtggcgtcgggcatggccatcccaacggacccttcaggtacttaccactgcaggccgattccagcaggatactccaaggtcgaagttgagttggtcgaaggcgcgtacgaggacctcgagctggattaccctggaggagacggtgagacgcatctacgagacacatgccatgccattattctatggcgcaggcggtacatcatcctccctgggcgacaagcggcgtctcgtgcaccatctcctccggctccgccatctcctcctcaggatcctgcaccgtctcctcctcatgctccgccagcaccgtctccacctcaggctccagcatcgactcctcaggatcctgcaccgactcctcctcgtgctcctacacctactcccccgcaagctcctcttccggcaccttcaaagtcaagggcccccctagctccaccgcttgcccacacaagggcaacaaagaaggcgaaagttgacgccgccaagatcaaggacccggggtacgattgcacgcaagaggagcttgacgcttacgttgcatcagaagtcaagagacaattcaagcctcgaagtccagaaaagaagattcctatagaccccagtgtcaggaacttcttcaggggtatgtctgcatctgtcaaggaggccatcaagctatcggactatgagcgaacgctgaagaaagcatcttctggaaagtccaaaccagtccctcagcttggagagcaaccaaaccaggagatcgagccgttggtgactggtaaagaaatgacgatagaacaatttattactgacaccggtctaactacggatcaattgctaggagtcgcaccaatcgaaaaggcggaagtgaaatacatgtacgaactcggtaaaccgcttgtcaagcctgagctgctgcagtccctacccacacaaatgtacaagttccatcagctgtacatggagatgagcgccaccggtagagagatgatcggagcgaggatcagggacacggacttcttgcaaggagatgacattctctggatcaatttcaggggaatctacgaactataccagctggacgccctcgacgtctctattatgagttgctggattttataagtatatcgttcagttagatttcttactatacgtctcctttaattaattaggtccttgtatataagtagaccatagaaaataatatactcccttttatcgttgtagaatggagattcaaagggcccgacggcggagggttttcgatactggattcatcgaccctcggaaagtaaacgtcgcaatgctcgaccaatatccacaagaaacagaggacaatctcgtccatctcctgaaggcgcagcattacaagacgttcatactgttgccatacaacacagagttagtttaattttactgtcttcctacataccaaatttcattcccgtacgaacttgctaagtgtttcatatgtaatgcatcccacgcacattgcagattccactgggtgcttttactcatcgacctggaggcctgcaccgtcaacgtatatgactcaatggataaaaaagagtctacgtttgacaaggttttcgaacttatagacaggtaccgtcataagttcctttgttaattaagaaaatcttgttatgttaattgctactacgaatcatagctttaaactccatgtagggcttggtatcggttccgtcatttggtccgcggcaaatggagagaaagacttaggcggaagttcaaatttcctgtgagtacacatgctctacatttatatttctccgattcaaatacatacaagtgtatattaattagatctctcgttgtttgtcatttatttgtagtgcgcaaagcaaaagcagggaactaacttgtgcggctattacgtgtgcgagtattgccactgccttgcagaccaaatcatcaccacaagagagctcgatgtacgtacaaataaattcaaaatttcattacgtagcgatttcttgtttaattactaatcaatttcatacattcatatagtttattcgcatgagggataacctgaccacacacaaggaatttatcgcggcggttcaagaacaactcatgggattcatcaacgaagaaatccttgatcccaagggtgaattctactacgacggaaacacaattcaccggtccttagcttctgagctaacagcgagtactactacgtcgaaatcgtagctagctaggacatataatggattgtaattaatacatgactacatatgttctatatgcatgtgtacacattttctataatgtaaatatattttgttcatatatatatctatatacatatgcatttgcataacatatatatgtataaatacatatatatatgtatgcatatatatgtattgaaacatatatatgaaacatatatatatataataatatatatatatatatatatatatatatataaccatgcagcaacaggggcatgcaaaaaaaaaaaaaggtcagctctatctttagtcccgggtggtaacaccaaccgggactaaagatcgatctttactcccggttatttcacccgggactaaagatagcgatctttagtaccggattggtactcccggtttggaaaccgggactaaaggggggttacgaaccgggactacaaagggtttctccaccagtgtcattttggacttgg

SEQ ID NO: 16738 - DNA, 1096 bp, Oryza sativa
cttccctggcgtcctgcaacatctgaccaagatcatccgcaacgtcgttaccatcagcagctatttcctcctcgcccgtttgatttcctttaaatccaacatactgagcaaagtccggaatattgtcgtcttccacttcatcttcttccatttcaacaccttgctctccgtgggatgtccaacaattatagcttggcatgaaccccgactcaaacaagtggaaatgaatagtcctggatgcagaatactccttctgattcttacacttattgcatggacaacaaataaaacccctttgcctgttagcttcggccactctcaaaaaatagtgcacgccgtcaataaactctttggaccggcggtcagcgtacatccattgccgatccatctacatgagtcaaaaaaaccgcacacaaataattattcttacaataatgacagtcatacaataattataagatatctttattcatacaaaaatcataaaatattacaccaaataattcttaaaaactatttgtaaagttttaaactaattttaatgtgtttaacttctttaatttttattttaggttggtttctattatttaatattaactttcactagagttttccttctcaactattatataaaccttgtttagcacatgaactaaatttctatatattctttcttccccacacacattttctctctcatcaacttacaactaaattttggagacaaaaaaagtgtgcaaaacataggtgcatatgtagtatgacaaaaaaaacattggaggatgaagttgcaaaccttttaggcacctccgatttgtatgtaatcaccaaaataaattcaatagaaattttggcatgacctcccctcttttttgaagaaattttgaagcttgctcgggtagctggaggaggaagaagacatatatataggggtgggactttagtcccggttggtagcaccaaccggggctaaagatcaccgggatcattagtcccggttggtattaccaaccgggactaaagttaagatctttagtctcggttggtagcaccaaccggggctaaagatcaccgggatctttagccccggatggtg

SEQ ID NO: 16739 - DNA, 7237 bp, Oryza sativa
ttttattctatgcatgttaagcaggtgtttgcctaatattcagtctcagctttaaaaagaatttgcaggggaaaactggctcccatgacttttcactaagaagaaacctcagccaaagccagccgagaaaggccacgaaccctggccccttgacacgtggatccacaccccatggttcaggccttaacaaatgctttgaggcccctgccccatacacgagggcccacccaccataggtcgtttcttaacaagtgtttaaaccaaggggccagcgtgtgatgtttcttaaaccaactctgaaaattcgctcccgagtagagtcgaacccagacactggttggtgctagtagagtgctgcaaccactaggctatagacccgttcgttatccattcttagtttcacatttgcacatatgtatttcattgtggttcagacttagaagaccttttacctttattgtttgtataaagttggtagtatgtctgtatgtgagaaaatcatatttttaattcccatggtataggaggaggttattaaagtggtccaacattggtcatgaagtggctgggattagtttttagcataagtgggtgataactgagaaggcccaatagcagaatgggagattccttggatgtcgtcagttttcataaacaagcactcgtctttcgtcaaagggtggtagcgttaatgcctagtgttgatttcatatgtatcagcatgacatgctaaaatttgataaattttgttcctatatgttcagagtgactatctgaggaggctttctctcagaatgctcaagttggagactgagcctattcaactagggcatcagcaggcagttgatcaatcttccgagtccaaagttggtcagtacccaacctcaatgcttcaacaacagaccagttgtgatcagcagagtctatgcattcaggtagataccaagctccaggagatgccaccgaacggtaagttacatttgaatttctagtttatagggaccatttgatccataagaaatagaagtaatatctaacctaaagaaactaacgatcccaagataagcacattgatgtgttggaaggaaactcaccaaacatgaatagtacttgtggtagataataccgtgctgcgtgcacataacacaaggttgttgttctgtttatattgtctgattgcataaagaaacataaatctggctaaggttaataattgatcatttggagtcctttatatttattgttattgaagccacaaccatctaataactggctggtatggttgtagtattatcgctggaatgtatatttacatagggaatcacatatacccagataacaggttaagacctaatattggcataacatctaattgctttagtcttttatcctgaaaattgaacacttgttcttactgaaaacagaactttgatggatgtctttattgcagaacacttgctcgaccaagttcctccacgaagccagaagaagctctgcatggatgacaggctaagtgaccttcctgatacaattctacaccatattatgtctctcttatcagcacaggaggttgcacgtacgtgtatcctgtccaagagatggaaggagctttcggcctcagcaccatgccttgatatctgtgtagataagtttggaatggacagggtgcggttcagtgagtttgtagcacatttgctgctatcccgggctcctaattcactgcatacatttcgtcttcactcttttgcaatcgaccatgccagctcttggatcaatcgtgcaattgagctcaaggcacaagtgcttgaattcaccgaatatataagatgggaatctttttacttggatccacagcttatggcttttgcatctcaatacctgaaatgtttgaagctcaccaatgttactctagactccaatgcgtttgaaccgctaaaccatgcatgcccagctttggaaaaccttcagttgtcacagtgcttccttgaggtgcctgagatttgttcagcttcattgaagaagttggatattatggagtgttctcttttgatgaatcttcaaattcagacccctcgcttggtctctttacgcttcaggtgtcttcaatacaaatgttcttcatgcagtaggtatcctgtaattacagcagcagtgactctatgtgatcttccgaatgccgagaacatagacttgtcatgttctgggagacaggtatgattgtgatggtgttttcaccctctttacattcttttcgcctgaattatatccgtgaaaactgcatttatctgttgtatattttttgtatgtttgcaaggttacatttggcagagaaattcaaaagttcccgatgtatggcaaattaacaagcatctctcttggtgaatggtgtctttctgacaagttctctcgattattttgcctccttcgacactcacctgaacttaaggagcttactcttaagcttgaggtgaacaatatcatagatgtatagttctggctataagatacttttctcttagcacattacgcaaagtcttggtgaaatgtttttaagtagcacttttccgaacttcaggtggaacgtcaagaccacaatggagaggatgagattcgcttgatggtgggaagatcattttcagccgaaaatcttaagaaggtaacaatctgttgcgcggaaggtgatgcaagggccgccatgttgggaaatatgttccgtgcgaatgcaacatctctcaaggaaatgcatatcaaacactattagatgctgaacaacgcttgccttgtatctgttggatttgatttgccagtggagacctaaaaatttagggacaattactcatttgatcctgttttgaagtctaactaccaatgacactactttaggtttgctcatttgaatatcaaaattgaccttatattgtgaaaaccaaatgatagtgttaactaaggggcgaattgtccttttttttgccccacctcatttgatcatgttatatcaacacttttttttattaagagcattttgaaatgtttgtaatgaatttggcatagctttgataattttgaataagtttaacggaattgtcttcaatttgacaagtttgattcaatttaacatattttttttttacaaaatttgaccacatattatccaacagcaaattcaagtctaaacggatgcccaacagcatgtgacaacaccgataaatccaacagaagagagctctgtccagcggtagtgatggtgcacacagagcagcaaccatcgccgcttctcctttctccatgtgccgcagccatcgccatcccacccttctcgctcgctggcgccgtcgatcctccgcgcgcagcaaccgccggtccggcgctgtcccctccgagcgtcgacgctcctctgtgcgctggccagccgcgttgccgcaggcccgcagccattgccgtccctcccttcgcgcgtcgatcggcgccgccgctcctccgtacgtagcagccgcgcgtatccccttcaagcgtcgctgctgccaccgctcctccacgcggagcagctggcaccgtcccttccaagcgccaccgctcctctctgcgcggcgcggccgcgtcgccgatttatatgtttggatagggttcgtataaccataggtattttggtcagttcacgctagcaatttggtcagacggcggtttcaattttgaaaaacgtggttaaatgagaaaacaaaaaaaaaaggtaaattaattattagatctcaaaacagagtcaaataagtaattgccaccaaaatttatcctcatacttatacagtatcgtgctgctttgctgctttgcatccacgcactttttgcgactaagctgaggaacaaaaaggattctctaccaatgatgaacaaaaatgtaacaagatctgcatatctaccatgcaagagttgtccagaaagatcgctaggagacagagttggggaatgctctcacgcttcaacaagaaggataccgcagtctcgacgatcaccatgcctcaagaggtaaaaccagaggtaagtggttttgtctcgatcttgaacgaaaaattgctcatacgatagatgcatccgtcaacgctggtgtagccaataaatttgatgcttttagcaagcattttgaacatatgatggagaggccacaaagtgagacaaaacctacattacatgatccctatgcatccatcacatctctatttcaaaacctttttttttaaaaaaaatcaacgcgctaaaaaaatccaccctaaaaccctaaattgtatattcctatagaatttatttagaggagaaaattttcggattgaaatttataatcaattatatatatttgatggtaaaagaacaaatgattggagtatatatctaccactttaaaaacacagtcattctccttccatccttttatcaccatcaccaccgtgtgctaacaactgtaggatcctactttcttcttagtctacacaactaattcctagtaatatgggcttagcccgtgatctatggacacattgtgggtgcaggcaatggcgtatttggttgcctgcacgcccatccgatctaggtccagcttgtgcaaatcacacctcgaagccaggcttggaggaaacacggaaattggcttaggctagagtatgttaagtcatgcatgtgaacaactagttgattgtctaacaaaggggttacatcctagtgaaattcagtcaatatgtaataaaatggacatgattgatatcttttgcccatcttgagagggagtgttgatgtaaatatgtgatgtgtctaggacctatttgtaaaatgttcagagaatagaatagagaagaagggggtgtgcaggagaagcaacccaccctgaaaaatcccccaatcgagcaagaccaatgatgcaactatttttctgaatccactctggcaggaagtaagagtgataatatatctggcctaaagaaattttctgaatatagcaatttacccaatccgatcgatgtactggctttgatatgttagaaattctaagtaattttccttgcaaacaaaagccactaccttgcaaatatttgggacttcctttgagatgttaattgacataataggagaaaagactagcagactgggaagaaaactaactttgtttgatcaggtcttgcgaactgctatctgaagctggctgctcaattctgtgccatataagcgttgccaacataatgtaggaacgctaaataactggaattaattggaatggtcactgtgctagaacatggtttgttgtccaaaagatctaggcgatctggacattgccaatccgaagttttcagtagagccttgcaacttagatggtagtggtttgaattttcagaacccagaagacaccatgggtggggtcccggtgcccatgtgatgcaatttgatagttccttgtaacaagttacttgttctctgcaagcactagcatcacaaattcataattcgaaatggtgaacatgcatatgcttttggacagacagatggattcaagaatgtcaatcaccaaatgaactagaaccaaacttgtctcttctttcatgtaggaagaagcgaactgttagagaggcaatttacaaggaacaaatggataaggagatcatatagaagtaacaaatgtttggtgatttcctggcaatcttccattgtggacaaaattgcaaaacataagtttcatgggtcatttggcatcatctgggatttatatgctagtctgtttcgcaaacatgcctatctactgtctgcaagctaaaaacagagcaaatatgcaagttctttgtggctattattgcaggagaaaatattaacagccgatgaactacaagctagaggatggctgaatggtgatatttattctgtgatcaagtacaggaaactacataaatatttgcttcttcaattcaatgactattctctccaaacaagtatagctcaagatatatgattcaagtggtaataacctgacatcctgatggaatgaatcaacggtatgcaaaaatagaagcaatagagacatttgttgaggttttttggaacggaaaagcggcacaagatagtgccttttcattgaataaaacaggagaaaatacaacccctaagggtaaaaaagaaaagctgttacacgtaatatgtacactatacaagatgtggggcgaactctcgtagacgcttggcccctgccagaacccataggccaacctcatctttgatttttgttagcagggagctcgttgccatctctttatggtcaaagatcctctgattcctctctttccaaatctcccagacaactaacaggataagggatctgagtcccttacatttgttgaggttttaactcttagctatataggtcttctttcattttgtttctacttgtaataaactttcttccagctatatggaattatggattgcatagccatctttagaatggttggtttaaactttaaaatcgactgaaaatagtagaaaaatgtgctgccatatgcatagatagttccataaaatagacgtgacatgtacctttactatacctgcatgtcttccccgcttaatgatatctaatttgtcatctaggagttaagaaaacaagaatcacagtaaattaaagtagttatttctctcacttattttttataaattcagaaaagatcattaaattattactgcagattgaaatactaacatacttcatatcgttgtacgtgtgatcaactgaccatgcaatgtgtctggccttttcactactgaaaaaaatgacagtttatccggccccttttttcaaaatatatcaaaaaaaagttacttcatttgttttaaaatatataatgttgttaacttttaaaactgacttttatcattcattttataaaaaaaataactatatgtaagtattccttccatcctaaaatatttagctatccttctagttcaaatttgattattcgtcttataaatgtagctatattttgagttggagggaatatcatttatctgtgtttctacaatagttgaaagtggtaaatttaccttaatctatctaagtttttgcatgaacagagtttgtctgttcgtacccatctcagccgtcagtctttttttcttttttcttctgatgattcgggcccattatatttcgacgaggacgacgacgagcctgtgtcgcttcatagcttcaccattcccaggcacgcat

SEQ ID NO: 16740 - DNA, 6879 bp, Oryza sativa
  unsure (1)..(6879): unsure at all n locations
atttcgacgaggacgacgacgagcctgtgtcgctccatagcttcaccatccccaggcacgcatcctcttctaacatattccgcggcgccgccgacacctcgtgcattggcgccaccacgcccacgggccgcctccgccgacgacgaggacgacgacgtcgacgcccttactacatgctcctccttgccgttgctcttctccttcttcgggttggccggcggcgctttgccttggtattcttcctcctcctcctcctcgttgtcgttgtcgttgtcgccgcggccgcggctcccgttctcgtggtgcagcacgatgaagccgatggggccgtcggggtggtcggactgctcggcgcctctggccagcctccgcgaccggaacgccagcagcttgacgacgacgtcccgtgtccatctctggctgtcggagatggccatgccgttggtctcgacgaacttgccccacccctcgatgaaccggtagccgccattggactcgaggtacctgcaggtcatcccgtactcgttgccgccctggtcgaacaccgtcaccttcagccccagcttctccctgatctgcttctcttcctcctttttaatctccttcttcttctcatcctttttgatcttcttcttcttcttcttctccactgcgatctcgtccttcttgtggacgatttgcgtctccttgtcggtgaagagatgggtgatcgggcattggtcgaggtcctccttgcgcttgcaggagaagagcagccggttctggttgcggtggacgtcgctcatacgcagcgtcttctcgcagacgaactccggctccgtcgcgtcgagctccgagaggcgcctgcgtagttgcgcgctgcaggtgcctaggttgcggaaccggtcgtcccgccgcgtcttcttcctctccggcggtgctgccgcggtgaccatgtagctgatgatcctcctcgtcgncggtgatctgggtggtggtncgncgncgncgncggcacgaatcccgtcgtgcatgagcttctttcgcggcggttcggtggtcgccgttgatgcttcaccggagactttctgcttcccaagcttgatgttgcaccgacgtaattccctttccagggtaggcccgtcaagacgtggtggttgcggtggtgctgccgtattactactacctgctgcggccggagctccgccgccgtcttccattggagtttctgagacgggaacggcactgttggtttggtcggaagcgccgccgccgccatgtcggagatccggcggaggcagagtatctcgggacgacatcatcgtgtctcgtacctgccaaaattttgaatcgtcaggattccatgtgtagagagggagacgatgagacagagacagagtagaaaaggcgagacagagatagagaaggcgaattaggtaaatcctgtaaaagtggattaaagcgatgccctttgcctcgggtcgccctgcgtgttatataggacaggaacagcccctaccgtggcttgttacaacagaatccaaagattacaaggataggattagatcagaacaaataaactacatcgcaacaaccttatcaggtcacatgcgataacaaccaaaacaaccaaaaccaattctatctttaacaccccacctcaatcacaacttacccaagttgagattgttcttaaacatctcaagccgtcgaacaggaagagcctttgtgaagccgtcggcgacttgatcatcagttgaaataaaccgaatgtctagcaacttttgtgcaacctgttctctcacaaagtgaaaatctatctctatatgtttagtccttgcatgaaagactggattagcagacagataggtggcaccaagattatcacaccataatcttgcggcatttggttgttttattccaatttcatctaacaattttcttatccatattacctcagccgtggcatttgcaagtgccttgtactcagcctctgtgctagacctagacaccgtcgcttgttttctggcgctccaggaaaccaagttagaccctaaaaacactgcaaagcctccggtggatctcctgtcatcaacacaccctgcccagtctgcgtcgaaaaaagcactgatcaaagtacttgctgatctgttgatctttagtccaagacttaccgttccttgtatataccggagtatcctctttacagcactccagtgatccaccgtaggttgctgtaaatattggcatactttattgacagaaaaggaaatgtcaggccgggttagtgttaaatattgtaaagcacccacaatactccgatattgtgtggcatcattctgtcccagaacagctccttgagttgatgacaacttttctgaggttgataaaggagtgttggttggcttgcacttggccatgccaactcgcttcagaacttctgtagcatatctctcttgggacaacactagcccttgggagtttttcttaacttcaatccccaagaagtaatggagatcacccaaatccttgagagcaaaatccttctcaagatccttaagtaaagctttagtagcctgaggagatgagcttgcaacaataatatcatcaacataaactagtacaaacattgtataggtaccacggctatagaaaaatagtgatgtgttagctttggaaggtacaaagcctaaatcctgtaatttcttactcaggcgagaataccaagctcgcggagcttgttttaaaccatataatgccttgtccaatttacagagataatgtgggtgtaccttatcttcttatcctgggggttgcctcatgtagacttcttcttccaaataaccatgcaaaaaggcattctgtacatctaattgtctgagactccaaccattagaaacagcaatagatagaataagtctgacagtagcagctttaactaccggactaaatgtgtcctcatagtcaatcccataacgttgcttaaatccttttgcaactagtcttgccttatatctatctattgacccatcagattttcttttaatcttgtatacccacttacaatcaatcatatttttttcttgtactggtggaactagatgccaggttttattatgcatgagagctgtaaattctttatccatagcaaccttccaatttctattactaacaacttcttgcaaattgacaggttcacctgtttctatcaaaaaaccatacctgacagttccattagtgtactccttgcgtttccggatccctctctgtgcacgagttactggcccaactggtgcagtgacagcagtctcttcaggtactgcaaacgcctcagtgctagtctctgggtcctgtgtactatctccagaattggttgccgcagacgatccaggggctggctctccggtcggcgtgccagagccatgtgacgaagacagctcgggctccaattcctgcatctgcccttcaccaaccggagaggctgcttcatgaaggtcagcgcctgctgcacctgctgttggctgacgtgcatctgctgcctgctgacatgacggagactgctgatgtgatggatccatgctgccttgtgcgctagaagctggctgtgcatcctgcatgaaatattgcccgtttgaccttgtttctgcacctttgaagctgaaattttgtgctgcatttgcatcaccatctcccgagttgattacagctgcactaatctcatcattttggttagtgtcagggttaggattattaaccagtggttcaaccaacaattcgcccccggaaccaaaggatgaggagggttgcaagtgagatggaagcagaaggatttcagctctaagtttggcgccagcattagtgtgaagagaagcaaacggataaacctgttcatcgaaagtaacatcacgcgagatatatactcgtcctgaagatggatcgagacacttaaaccctttgtggagagtactgtaaccaaggaagacacatcgttttgatcgaaaggagagtttatgggtgttgtagggtctgaggttgggccagcaggcacaaccaaacacgcgcaaagcagcatagttgggtttgacatgaaggagacgctcaagaggtgtagtatagtcgataactttgctgggtgttcgatttatgagataggttgcagttacaaacgcctcatcccagaatttaagaggcatggaagcctgggctaataaggagagacctacctctactatgtggcggtgttttctctcggcggctccgttctgttgatgggtgtgtgggcaggaaacatggtgctctatgccaatgcgctgaaagaaggtgttaagccgctggtactcacccccccaatcggtctgaacaaccttgatcttgcgttcaagcagccgttctaccaggttctgaaagtcacgaaatttttcaaaaacttcagatttgtatttgaggagatatagccatacatgcttactataatcgtcaatgaagctcacatagtaacttttattaccaactgaattgggtgctgggccccaaacatctgaataaactaaatctaagggaccagcagaaacactggtcgacttctgaaaagggagctgatgacactttccctgttgacacgcatcacaaaccgatgcttgactagaatcaggaattacagggagattattctgactaatgactctattaacgacagcaaaagaagggtggccaaggcggtgatgccacctcgccgttgaaggcttgacgacactgtgagcttgcttattcatggaggtagagtggctggatggaagtggataaaggcctcctctacatcggccttgaagaaggagcttcctcgttgccagatccttgataaagaagacatggggataagtttccataaaggcatgattatctctaaggaaatgatgaacataaactaggttcttctgcgcagttggtatatgtaagatatttcgaaggagaagatttctgtttgaggagcgaattgtagtatgacccacacagttaatatccatacctgtgccattcgcagtgtgcacttgatcattgccgttgtacttctccttcaccgagagcttctcgagctccccggtgatgtgatctgtggcgcctgtgtccaggtaccagttggtgtcgactccgtaggaggtagctgcgccggccaccttctcttctccagtgaaagaggtatcaaacctcttccagcacttgatgacggtgtggccgatcttgccacacagctgacaggttgggcggtttccattgttcttgttgtcgttgccgcggccaaaaccgccacggcctccattgccacctccgcgtccgcgaccgcgtccatcacgccctccgccgccgccgcgccctccacgcaacatggagttagctgaggactatgtgtcgccttgaaggagttccatgcgctgctcaaagctcaggagcaacgcatagagttcagccaccatcagaggttccactcgtgttgccacagaggaaacaagtgggttgtagtcgtagtcgaggccggcaaggatgtaggagaccagatcttcttcatcaagaggttttcctgtagtagctatttcatcagcaagagatttcattttacttacatactcggcaacactcttgttgcccttcttggtggtggagagcgccatgcgggtgttcaggacccgcgccctggactgcgacgagaagattgcatctatggcttcccacacctcagaagccttggtgagagttgcgacttgaacgagtatgtcgcgcgagagcgacgacaacaggtaactgaggacctgttgctcttgtgcaacccaggttgcatacgctggattggccaccttctcggtgacttccttcccgtccttgtccttgcttgccaccaccagagttgtcgccggagcgacggcagtgccatcaagaaatcccgccatctgagctcctctcagtgtggcgagaacctgtgctttccacagcacatgattggacttggagagtttctccgatactgactgcccatggagagagggagcaggaacggaggacgacgaggccatagattgaaactgggtggagggagaatggctctgataccatgtaaaagtggattaaagcgatgccctttgcctcgggtcgccctgcgtgttatataggacaggaacagcccctgccgtggcttgttacaacagaatccaaagattacaaggataggattagatcagaacaaataaactacatcgcaacaaccttatcaggtcacatgcgataacaaccaaaacaaccaaaaccaattctatctttaacaaatccctgttccgtacgtatcatccgcggggacgaacctccgcacggccgaagaggcaatccgacaccagggttgtgggattcaattgcagagaaatcttgggcctcatctaaatggacgcgaagagacggcgcggtggcgcatcgacgtcgacggcgacggcgacctcttcccatcctacgtccgcgctctccgctgccttctcgccgttaacacatcgttttcttcctttctctctccggcgctagggtttgcatcggcgctaggctagggttcttcgtgaaggagctccgggagcggagggggaggggaagaagaagaaggagcaggcgctggcgccgctcgccgccgcgctcgaggcggcgctcgcgctgctccggctcggccgcgaggggagccgaacattaggtttctttttttttttgcggggaaacattaggtttcttgatttcttgattaggtgaatttctgatggttgacagcgggtgtcctaggtgaactcggttcttgatttctagggatttttctctcttaccaatttcgtaacttaaaacttataatacgattgaacaccctgagtttatggg

SEQ ID NO: 16741 - DNA, 681 bp, Oryza sativa
aggttaaactcctcctgtttgtcctcgtcccacacggggacaccttccttcttccacaactgtttaagatcttctaccagtggtcttaggtacacgtcgatgtcgttaccaggttgcttggggccttgaataataatcggcatcattatgtacttcctcttcatgcatagccagggggggaggttgtagatacacatcgtaacgggccaagtgctatggccgctgctcatctctccaaaaggattcatgccatccgtactcaaaccaaaccgtatgtttcgtgcgtcctttccaaattctttaaattttctgtcgatgtttcgccactgcgaaccatcggcggggtgtcttaacatcccgtcctgttgacgctcttcagcgtgccatcgcaacattctagcattccccttgttcctgaacaaacgccttagccgtggtattatagggaaataccacatcaccttagcaggaattctcttctttgttagctgcccgtcaacttctcctggatcgtcccgtctaatcttgtatcgtagtgctttgcaaacagggcatgcttctaggttctcatactcctcaccgcgatataggatacaatcattcggacatgcgtgaatcttatgaacttccagtcctaacgggcggactatcttcttagcctcgtacgttgtctcgggcaat

SEQ ID NO: 16742 - DNA, 579 bp, Oryza sativa
ggcggcaacgagtacgggatgacctgcaggtacctcgagtccaatggcggctaccggttcatcgaggggtggggcaagttcgtcgagaccaacggcatggccatctccgacagccagagatggacacgggacgtcgtcgtcaagctgctggcgttccggtcgcggaggctggccaaaagcgccgagcagtccgaccaccccgacggccccatcggcttcatcgtgctgcaccacgagaacgggagccggggccgcggcgacaacgacaacgacaacgaggaggaggaggaggaagaataccaaggcaaagcgccgccggccaacccgaagaaggagaagagcaacggcaaggaggagcatgtagtaagggcgtcgacgtcgtcgtcctcgtcgtcggcggaggcgcccgtgggcgtggtggcgccaatgcacgaggtgtcggcggcgccgcggaatatgttagaagaggatgcgtgcctggggatggtgaagctatggagcgacacaggctcgtcgtcgtcctcgtcgaaatataatgggcccgaatcatcagaagaaaaaagaaaaaaagactgacgg

SEQ ID NO: 16743 - DNA, 1052 bp, Oryza sativa
ctcgggtttgggggcaatgtttcctctagacgaagagtggctaacaccccgtcactccaacctcatgcatggctggagtaacgtacgtaaccatgcatgaacgaacaccaaatcactcgaggttgaagacaactagctagccacctaagaaacgagaaacgagaaacgagaaacgagaaagatgaccttagcggcaaccgcacaacggctcaaaccaacccagcaaccaatcctcctctccaaaaccccccacttccttcctctcctcctcacggcctcacagcaagcagccaagcacacgaccgatcgcgatcccaccaccaccggctgccggcgggaagaaagctagctagcaaaccaaaccaaactaaagccatatatatggcggaggaggcccgcggcggtcagcgcgtcgtcgtggacgacgatcgcgaggacgcgtcgtcggtggcgtcgtcgacggagcgggcgttcgagggggagccgctgccgtcgctgggggagacggtgacggcgcggtcggcggcggtgagcggggtgctcggggcggtggtgagcgtggtggcgataaggctgaacctcacgtcgggcctccttccgtcgctgggcgtccccgcggggctcctgggcttcttcctggcgagggtgtggatccgggcgctggacgtggtgggggtgtcgcacctgcccttcacccgccaggagaacaccctcatccagatcgccgtcgtctcctgctccaccatcgccttcagcggtattccctccatttcatataactacgagagtaattttgacttttttctatagtcgtttaagtaaatttatagaaaaatttagcaacgtatgtagcaccaaattaatttcattaaaatcaatatttaatatattttaataatatgtttattttatatttaaaatgttgttatattttcatacaaactagcatggtggcccgtgcagattgcgcggctagcatcattaaattttctctcatataatagcatatatgtttactcattatattactcaaatatattaaaatgacaaca

SEQ ID NO: 16744 - DNA, 19195 bp, Oryza sativa
ataagatataaatcacacttaaagtactataagtgataaaacaactcataaaaaaataaattataattacgtaaattttttgaataagacgaatggtcaaacatgtgagaaaaagtcaacgacgtcatctattaaaaaacggagggagtaattattttctgaaactaggctgacccttacatttttcttttgctattctgttcatacatttgtcaactagggggcctcacatgtacagatgccatctgtccagttcttctcatatctgcactttgatactaataagcaattatttgaaattatacttgtctggcacatgaattttttgcctttaggtaacattgttgcaaacttagtaccttgcatcaaagtattgcttgtttctactcctatgcctgaataaatgaatgcttacttactacatattcagagaccgaatacttcagaaaagttacaaatggtgccaaacaggaaggaatcaattaggccccgtttagttcgctaattttttttttccaaaaacatcacatcgaatctttgaacacatacatgaagcattagatgtaaataaatgaaaaaactaattacacagttagggaggaaatcgcgagacgaatcttttgagtctaattagtccatgattagctataagtgctacagtaactcacatgtgctaatgacgggttaattaggctcaaaagattcgtctcgcggtttccaggcgagttatgaaattagttttttcattcgtgtccaaaaacccctcccgacatctggtcaaacgtccgatgtgacacacaaaaattttcatttcctcaactaaacacacccttaggccttagctaggaattgaatcatctatacggattattttagttgtactatattttctaaaaaaaatattttagttgactattggaagactataattcttgacctatatatgctagatactggcctcatgcatgcatatgctaacattcctaggcaggtctgtatttccctctaggtcattataatgtgattaggtcaaaataaagtgacatcgtgtctatttttctttgctaaaggggtatttcataggtttgtcttagtatcgtgtttatactgtcgtattgaatgatccgagtcgattgctttcggtgcatataatgcacacagctctagttttctggttgggttggctcgatggctttatacgaattagcggtttttgatccctctaatcctgttctggatccaatgtggagacaaggtatgtttgtcattccttttatgactcgtttaggaataaccaattcgtggggtggttggagtgtttcagaaggaactgcaacgaatccaggtatttagagttatgaaggtgtggcaggggcgcatattgtgttttctggcttgggtttcttggtagctatctggcattgggtatattgggacctcaaaatattttgtgatgagcggacgggaaagccttctttggatttgcccaagatctttggaattcatttatttcttgcaggggtggcttgctttggctttggcgcatttcatgtaacgggtttgtatggtcttgggatacgggtttgataattttttttcccaactgatggttgtcttccaatgtgatcacattggtgtgtttttactgaaatagcaccactacctacatattgatatcccaaattttactgactggtgcaggaaagcgacgataactggaacatcagaagctattcaggcagcagagtctatgataacgcagaggatggagattgtcaagttaggagaaaagaagtctgatgccaaattaagagaggatggagattgtcttttctagttttagcactatccgcaaaaaaaagcttgagagaaaatttaagatatctattgttccttattgagtctgattgtgttagtaactggagtagtcagtcaatcagctgttctatttattccttatttttgttgggaataggattatatttcatattttttgatgactgaaatattaatgtttgatcaacaatagcagcaggaaattttatgatattattgttatgatacatgatgaacaaattgagtcaatatgtgactactaggaggcgttgctgctgctgttgttgaactgctgttgctgctcctggtaggattcaatcctggccgctgttgttgaactgctgttgctgctcctggtaggatgcaatcctggccggatcaatccacaggtggtttgattagtgactccacctggatccattcaatcctggcctggatcaattcctagcctggatcagtgcctaccctgccgaacaaggcctaaatcaaagaccgctcggaagctgcctgcgctggtcgtgacgtgctcgtgcggcattgcggcaggagggactgaatcaaggtgctagaggcattgaccgaacggtcaagctatatcagcagccggtacagaagagttctgtcagattcatatattgattagtactatcgcatttttcattgatttttatagatttgtacaagatggtgtacgcgcagtaagtagggaattattttcaatgctacaagtggtaatttcatgtataaatgccaacggttcacatcttttgccatatggcttacatgcaagctgctgcaaaaaaatgaattttagcactaaattctgaagctgatttgattttttttgtcaaagtttatttttcagcacttaaatattatatcggtaagaatatataaaagttgtatctataactttttattgttaacgagcttgacttattttcagcattaggccaaccaatgaggccttagggcatcctcaatgtttgtggtgtagtataaaattatttttccattctatgaatagtgagccattgttaaagccatatccataatgctatggttagaatttagccacaagatgggctcacatagaatggaaaaataattgtttcatctcttgttcatgaagtgaatgagagagaaaaaatattttctttttgcttgtggtagaccttaaacataaggtgcaccctaagctaatgctactttccacaatgtatatggctcactttacaagtgcaatcattgccttaaggtcatctttttttacaagtgcaatcattgccttaaggtcatctttttcatacattgtggttgcccttaaaggctcgggtggattttaatctggatgatttcatcgtgataaggaaaacaccaaaataaaccatccattttagccaaaagttttgtgtaagttattttcacaagcaacccaagtttagtcctccgttcaccactatccacatgtacacttttggtccacacgcatattggttatgagcaaaaataagtgaaaacctgtgcgcgtaggattcgaatgtggttttccttgacaatgagcaaaaattgaaatgtttttgcccgtattttggtacgttatatatgtttgagtcagtttttaagttcgtccgcttttgaaaatacaaatccgtatgtgagttggattttaagtttgtttgcttttggaaatacaagaggagtcatataagaaatatctttaaaaaaattcgtatgctaactgagatgaaatacgaactcctgattgcagtccatgattttctttaaaagaatattcatgtgaattcccataatgaattttaccctaactaaaccatataacaataataaaattaaaatagtatttacccgttgcaatgcacgggtattttttctagtccattaacaggttcataatagtggtggacacaggattttggtgacgggggtacagagtttgtgaagcataatccaatgacaaaataaatgaagtgctaatatgtgttattagtgtgaataaaaatcatcactatacaaaattgtacaatggctaagaaaaaatgaaaatacccttgaaaagggatgattttgtgcttaagagcagctgttttttctttgtccgatggcgcaggcccgctgcaatttttttttgtggggaagagcagctgttttaacatagctgatcgtgcacacacaaactatacatgttaaatcacatttgtttgttgaaaatggggaacaattgtattgtcgactggctgtacccgcctacggtatttgtagagtaagagaatcgttggcgttaggtatatgagagattgagtaaaaagggacaagagacaaaggatttttatagaggttcatgcccccttgttaacgggtaatagcccactcatattagccgaagccgatgttgcctttatatatcaatatctcacgagtacaatatttggaatgacctaatctactctctgcccatctagcgatatgaatctctaacatgtggtcgacggctagcgtagtctactttttcgaatatgaactcggcaagattggagttggcttgatctgtattggtttgtattccatgtcccctctcctcttggagtgctgtatttgtgtccttaggtggtcttttgtctaagtagaaccagagaggcaaattctacgtccatcgaggtttcctctggtggcacgatgacaaaactattgttgtggtcggaaggagtgccgccaccgtcatgttggagatccaacaaaggtagagtcgtatcaccggatatatgacgacatcgcatcgtacgcagatgccaaaattttgaatcatagggaagagtaaaactcgaattatatgtgtggtgttggagagggagacaatcagatgagacggaggccgagatggacatgacgagtcggccaaattccttataaaacctatatataatataactgtttgcaccaatacgtgttgttgccgcagcggctggtcctactggcatcgtccatggtgatggacctccacatggaaggcgaggccatccgatggccaacacaacacatgcgcttcacgtcatagccgtcgcgcaggtcggcaggtcctcgctggcaactcggccccaataagtcactttagctcgccgccaacctcaagtggcgcgtgtccttcgaacttcataccatagcttgatcaaagattcatttcctctgtacccctaggtgggcaggttggaaggggtcgttattcattaggagctcccagccgagccaatatgcgcgcccgttgctgacatgaagggagctacccaatgcttcaaatctcaggctaagccttatagttacagttaagccatttaatggcaaaatttactacaagatatccacaaaaagtgtaattagctagaaaacaatgcaagaatgcatatctattgtggaacacaaaaaaactgataattaactgttggacactcacggtattattttattatatctagagcaaatagagagaaaaatagccgcggaagtacgattttgcggctcgcatatagctccgacatcgcggtggccacaacatttccggcaccggtgtggtcctcatgttgcagcaacgacaagcatgggaacgatgcggagccacaggcccaggtgcgtgggccctcttgaacccctagagagctgcctcgccaaacaacggcagcggcagcggtggcggcgtcggagctgtatgcgagctggacttggtaggcaggggcaaaattgtatttttgcgactgtttctctctccatttgcttttggatattatgaaatagggaaattttgctacaggacacttcgactgcgtggttttagccataggacaccgcccgaactcacttttgggggaaaacactccataaacatggtaatttaccaatggacaccgcgtcgataaaataataatttccggttaaagaggagagagaaatcgcgtgaaagttctaaaatacccgtgggcccacttgtcatatcttccatctctcttcaacggaaagcgtcgtcgtccgtggagtggagcgccaggagcatcggcagtcttgtgtgtgcatgatcagctgttttaacatagctgatcatgaacacacaaactatacttgttaaatcacattcgtttgttgaaaatggggtacaattgtattgtcgacgggctatacctgtctacggtatttgttcaggtattggctaactctggattccaagtgtagtttgtgagagggagacgatcatacagagatagagatagagacggcgagaccgaaatagaagcgatgagttgggtaaatccctatgaatgttccatacaaatacgtgtcatccgtggggacatacctccgcacggccagagaggccatccgacaccagggttctgggattcaattgcatagaaatcttgggcctcatctaaatggacaaaatttggaaattccgaagatcgaatgcagtccttttctttcaaaatcaggaaacaatgggtaaaatcatcagaggatctcatataaatatcaacacacacaatccattaacaggttccatacagtggtggacgcatgattttggtgtcggggatacatagttagtgaagcataatccaatgagaaaaaaatgaagtgctaatatctgttattagtgtgaataaaaatcatcactacacaaattgtaaaatggttatgaaagaaaatgaaaatacacttgaaaagggatgatttacttaagagcagctgttttgacatagctgatcgtgcacacacaaactatacatgttaaatcacatttgtttgttgaaaatgggggacaattgtactgtcgacgggctatacccgcctattggctaactcaggatttcatgtgtagtgtttgagagggagacgatcagacaaagatagagatagagatgtcgagaccgagatagaaacgacgagttgggtaaatgatgaggacatcccagctacacttgacgtaaacaagggtgatggtttacgtcataagtcacatgaagaaaatgaagatgacgtaaaccaagttgatggattacgtctcagcaagaacgatccagcatatcatggtcaattacgtgcaaccgtgctaggaagatataacaagaggtgaactcgctctttgctcaacttaacccaaattttaataagaattttataccacctaaatgctctacctttgtattgctagttttacgcccgaggacatcatcactatgccaagaaggatgggttacgttgaggacgacaagggttacgtcaaggaggaatcagcccatgcccaacgagcagccgtctacgccaacaagaagatgatttacactgcaaaggctcaatttccaaggcttgtgcgacccatccagtcatgggatggctgcatggcatacatggttggaaagagggacaagtttagattccaacgcatcaaaccctacctaaatattattttccaagaagaagttatggcacttttactgaaccttgcgcaggagctaaagggctgtgcgcgaacccaagaaaactgtttgcattctcatttatgttaggcttgaccaccaaaacgtggcttcttatgttcacacctcatctagaagggatgttcctattataaatagccccctactgcattcattagacaatttttgttcaattgaaaacctcatgtatgagaaattgctgaagattgtataagtgtcttacctctttattcttgtgagttcttttggacttgtgagaaggcaactttggtgccccctagttcgtgctctatggcttccagttcggctgcaccgtattgtgtggattattctcggattatggttctgtgattgctcggtttgacaggtcagagtccaggaggcttcggatcgttatgaatttggaaattccaaagattgaacttagtcctttttttttcaaaatctggaaacaattggtaaaatcattagaggatttcatacaaatatcaacacacacaatccattaacaggttcataacagtggtggatgcaggattttggtgacaggggtatagagttagtgaagcataatccaatgagaaaataaataaagtgctaatatgtgttattagtgtgaataaaaaccatcactacacaaaattgtaaaatggctaagaaaaaaatgaaaatagtcttgaaaagggataatttgcttaagagcagctgttttaacatagctgatcgtgcacacacaaactatgcatgttaaatcaaattagtttgttcaaaatgggggtacaattgtattgtcgacgggctatacccgcctacggtatttgttcaggtattgtcacgcccataaattcactagtaatttccggacttatttgtgcataaaatcctgatccaggaatcagccgaggtacacaaactgacaatttaatatacaaattcatcaaattaactaaaacgataaatacttacttaagaggcacttagtcctcaccatgaagaaaactgcagcagaaaataaaatctagcgaagctccggctccactcccataggcagctcaactggggtataagccaaacgtcttctccttcgcaatttgtcttcaactgaagtttgattgattattgcaaggtgagcatatgacatactcatcaagccacacagcaaatatgcaagtgcataaggataccaaaggatggcataatatagggctcacttgcaaaagcagcatttagcaaacaattgagaattgtaaaacagtagagtaattaatcatcagtattaatcaacactgaacagcacacccatgctgcccaggcccaaccattctgaacaaccatacctggctgcacagatctatctccaaaccaggaatataccattctaaaccaggagctaatcaaattattaccagttatagcatcatttattatggtaagaagtgtgagactaatcacgaaagacattgttagacctgcccatgaccgcgggcacggctattcaaatagttttactctggccagaggtgtaccactgtacccacaagacacaacccaccagcatgttaccgtgtccgcgcagacacgtcaccatgttgagtgattgtgacaagacccctcgcataactcaactcaaagcagtgcaccattcctggatcataatcacccccttataaacaaggcatggactccccagcgacccccgtgggcttatctccgccacttctcagtctagtgctccgtaatgagccttgttatacaaagtgtccagccgttgcccattctggcttgtggttggcacggttaatgtttcacaaccgaaaatcgtgaaccggtccttaattgtcatgagcactaccatcaaaaccatgtgctcacaacccaccattatcaagttttagttggcacattaattaattaaccaatcacgattgaccatcgtgagctatcattaaatatccatcattaagtaatagtgaaacattagttatcccaatcgtgtgctaatgtttctaagcatggctaagcaattatgtctaacatctagctgaaccaatatataaagctcaactagtcaaattataataacccaaggtatcaaggaatagagtaatcaatgcaaacaggccataacaaaggaacaggttcacaccacccagtgacattcaaaaataaatgcacagttgaaataaatagagaatttaaatataggatcaacatgctcaaaggaactgtgtttgggatctgtgtgacttgccttgcaatattcggtcttcaattaatcttcttgaatacttccaacgcactcgcggaccttcgaaacgacggaaacaacaagctaaaacgcaaaacgaggaaaacgactaagaaactccaaataaacaatacatataaagtaaacaaacatgtagatcataattttagatgaattatgagacttgaacggcctcactctgacttcatatgaatttattacgaattttacaagatttaacttaattaaagcccatttaaaaaggattaaataaatttaattcaatttatggataattttaatatgtagatctttattttatacaactttagagacttgaaccaactaaatccgagctaagatgaattaattatgaattttcaaagattaaataggattaaaacatttatatggattttaattgaattatgacgcaataaagaattatttttgaaaaggaaaagaggattattacgtcagcgggctcggctcacggtggaccgggtgcacagcggcggtctacggaacggacggccgagatctaccctatccaaaacgaacggccgagatcaacttgatctaccgcggttcacgggacatgggcaacgatgacgtcagcgatgacgtcatcatcgacggcggctcggcctcgcgtgctcgctggcgaatgatagcgcggcggcgcgaacgaaggacacctacgggttgcgggcaacgcggcgaactcaccggtgaccaaaacagcggcagaaggtcaacggacggcgacggcgacgaggaagaagcggcggcgaccttctgtttgacgacgacggcggggctccggcgatctacagcgacgaaggaggggcagacaaggtcggcgactgtcacgcccggaaatttactagtaatttccgaacttatttgtgcataaaatcctcgtccaggaatcagccgaggtacacaaactgacaatttaatatacagattcatcaataactaaagcaaataaatacttacttaagaggcacttagtcctcaacatgaagaaaactgcagcggaaaaataaaatctagcgaagctccagctccactcccacaggcagctcaactggggtataagccaaacgtcttctccttctggattctttttcttcaactgaggttgattgattattgcagggtgagcatatgacatactcagcaagccacacagcaatatgcaagtgcacaaggataccaaaggatggcattatatcggctaattgcaaaagcagcatttagcaaaacatttaagagaagtaaacagtgagtattaaatcagaatttttaacaacactgacagcacacccatgctgcacaggcccaaccattctgaacaaccatacccggctgaacagatctaactccaaaccaggagctaagcaaattattacccagtataacatccatagctattgtgagaggtgtgggactaatcacgaaaaacattgctcaactcgcccataaccgcgggcacggctattcgaatagttttactctgatcagaggtgtaccactgtacccacaagacacagccccacatcatgtcaccatgtgcctcagtaccaccacggtacctcggaaaggggctgtgacagtaccccttgcataacacaatccaccgcagcgcaccattcctggatcataatcacccccttataaaacaaggcatggactccccagcgacccccgtgggcttatctccgccacttctcagtctggtgccccgcaatgaaccatgctatacaaaagataaaaccgttgcccacgctggcttgtggttggcacggttaatgtttcacaacagtagctcgcgaaccggtccttaattgtcatgagcacgactctcaaaaccatgtgctcacaacccaccattatcaagttttagttggcaagtaattaattaaccaatcacgattgaccatcgtgagctaccattaaatataaccataagtgatagtgaaacattagttatcccaaatgtgtgctaatgtttctaagcatggctaagcaattatatctaatatctagttgaaccaatatatataaagctcaactagtccaattataataacccaaagtatcaaggaatagaataatcaatgcaaacaggccataacaaaggaataggttcacaccacccagtgacattcgaaaataaatgcacagttgaaataaatagagaatttaaatataggatcaacatgctcaaaggattgtgtttaggatctgtgtgacttgccttgcaataatcggtcttcaattaatcttcttgaatacttccggcgcactcgcgaaccttcgcaacgacggaaacgacaagctatcacgcaaaacgaggaaaaagactaataaaaaccaaataaacaatacataaaaagtaaacaaacatgtagatcatatttttagatgaattatgagacttgaacggcctcattctgacttcaaatgaattaattatgaattttacaagattaaatctatttaaagcccatttaaaaagaattaaataaatttaattcaatttatggacaattttaatatgtagatctttattttacacaacttttgcaacttgaaccacattaaactgagttaagatgaattagatatgaatttttaaagattaaatcggattaaaacctttaaactgattttaattgaattatgacgcaataatgaattatttttgaaaaggaaaagaaggattattgcgtcagcggctagggtttggtggaccgggcgcacgggcggcggttcacgcgaacggacggccgagatttaaccgatccaagatggacggccgagatcgatcgggtccacggcggcttacggcggacgaccccgatgacgtcagcggtgacgtcaccgacagcggcggcggctcggcggagaagacggctcgaacggcgcacgctcgccggcgaacggcggcactaggacgcaaacggagggcaccaagacgtagaggacaacacggcgaactcaccggtgaccaaaggaacggcggaagaccaacggacggcggcggcgacgaggaggaagcggcgaagctcttcgggtcgacgacggcgacggcgctccggcggtcttcggcggcggcgaagcggcggacggggacggcggcgacttggcgatcccgacggtggccttcccgagtgacgacgacgaccgtagcgacggcggcgcacggctggacgaacggcggcgacggcggcgcaaaagctcccgaggctagggcgctacacacgacggcgggcgaaggcgaggaggcgacgggtagaggagagcttgggggtccttataaaggggctagcgagcggcgacggaggcccacggcgaccggcggcgagaaggaaactttagggtttgggagagagaggaatccgattcgatctcgattccatcgagtttccaaaccgaattgaccagagattccaaaagagaaaaggaagaggagatcgagaagatcatttcccctctaaagatttcaccggagaaggaaagaatcgagcggatttggaaggagaaggcggcggcggcgcgctagggtttgcgggcggcggcggccgaaggaggacgaagaacctgacaagcggggcccacctgtcagcggcggagagagagagaggagagcggcggctcggcagactgggccggctgggccgagggaaagagagagagagagagggttttgggccggctttcggcccaaagccaaaagaagacttttaaaacctttttcaatttaaattatttcttaaatgcaattccatttactaaaaatacttccttagctcaaataaatcccagaaaaatctaggaattatagatttaagcaaagtatttaacaaaattttatctagcccaattttatgttgagatttaacaaattaaacttagatcttctcttataagcttttaaaatcatttctaataattccttttaaacaacaatttataatttaaggatttttaaacaagaaaagctcttaacaattatacttagatcattaatgatcaaataattactgaactgttctttgtattatttaagaatttagctctgaaaaatccgagaaaatttcagagagttgatttaaacatggagaatttaataaaaattaaatccatccatgccttatatttaggaaattttatttcccacattttacttcacttgtaaattaaagaacatttaatataaattctattaataatttattaaataatttataaatcctgaaacaaaaatcaggatgtgacagcgacgtcttgacgatcacgacaatggctttcccgagcgacgacgacgaccggagcgacggcggtgcatggctggacgaacggcgtcgacggcggcgcaagagctcacggggctagggcgctacagacggcggcgggcgaaggcgagagtggctgtgggtagaggggagctcgggggtccttttatagtggctagggggcggcggcgaaggcccacggtgaccggcagcgcgaaggaaagtctagggttcggggagagagacgaatccgattcgagatcgaatccacggatttccaaacgattttagccgacgattccaaaatagaaaaggtagagtggatctcggggatcattttccctctatcaatttcaccggatcgggaaagggatgaacgaatttggaagggcggcggcggcgcgactcggctagggttcggccgggcgatggctggaggttgacgacggccctgacaggtgggccccacttgtcagcgggcggacgcgcgcgcgcgagcggcgctcggctgcaggctgaccgggccggggagagagagagagagctttttgggccgactttcagcccaaagccaaaagagaactttttaaacctttttcaatttaaattattcatgaaatgcaattccatttattaaaaatacttccttatctcaaataaatcccagaaaaatctaggaactatagatttaagcaaagtatttagtaaaattttatctggccccattttatattgaaatttattatttaaaattagatcttctcttttaggattttaagatcatttctaataattccttttagacaacaatttataatttaaggatttttaaacaagaaaagcacttaacataattataattagatcattaattgattaactaattactgaattgttctttgtatcaattaggaattgagctctgaaaaaatccgagaaaatttaagagagtatacttaatcatagagaatttaataaaaattaaattcatccatcctttatatttaggaaattttatttcccacatttaacttcacttgtaaattaatgaacatttaatataaattctattaataatttattagataatttataaatcctgaaacaaaaatcagactgtgacaggtattggctaactcaggattccaagtgtagtgtttgagagggagacgatcagacagagatagagatagagacggcgagaccgagatagaaacgacgagttgggtaaatccctatgaccgttctgtaccaatacgtgtcatccatggggacagacctccgcacgtcggagaggccatccgacaatagggttttgggattcaattgcagagaaatcttgggcctcatctaaatggatgaaatttggaaattccgaagatcgaacttagtcctttttttttttcaaaatcaggaaacaatgggtaaaatcatcagaggatctcatacaaatatcgacacacataatccattaacaggttcataacagtggtggacgcaggattttggtgacggggtacaaagttagtgaatcataatccaatgagaaaataaatgaagtgctaatatgtgttattagtgtgaataaaaatcatcactacacaaaattgtaaaatggctaagaaaaaaaaggaaaatactcttgaaaagggatgatttgcttaagagcaactgttttaacattgctgatcgtgcacacacaaactatacatgttaaatcacatttgtgtagatgtgaaaacacgaggcctggaagatctgcttaacttcagtgcaggtccaaaaaatcttgcctttaggttcgtgagcgtgccagttgatttgatcctacaatcaacaagaaataaagacaaagaaaccgcggttaaatccataaacgatagccgatcggctagttgccgatgatatatcatttatctccaagccgatgtcatatgtgaattgatcggcaatcatgaataaaatgaaaaagaactaaatctactctatcggctgtagatattaacaatatgtagtccttatgtcgatatatacttaaatcaaatgattgggatatatcggtcgccacgccgagacagtataaatcactcagatcgaaatatatactaacaatgagactatatatgttcatagcatagccgatcagatagatccagtatgtatcggctaatactccgataccactctatattaagatattaaagcaagtaaaatatatcaaacagaagcgtaatatatctagatgtaacaagatcataacataaagggcagatctagcatatcaattaagtacatgaaatataaggctaaatcagataagatcgcctgaaactctgatactactataaccggcaaccaaaagcaggctagagattgagattctaagtacgacttataagatcaaactcaactgatgcagctataagtatgaaaagaaggacaatatctagaccatcaagccgctgattgtttcatagggtggtagatatcctatataatctaagtcaacgttggtatttaacctaatcggctgccttctagcaacagatgttagccgactggaggttagataacaatattgccaaagattatatagaatatacgataactcgacaaattacataaacaagattagagtatcataaagatggaagcactaatcccaggaacgcaagccgccataagaagttttacctctagttgaagatcgaaaccgatgcagctcaacccgaaagcaagagctcgtcgaaacaaaacgaaagtaaaagggtggcgatgcgccgagattgtattgaacgtgtgttgttgtattacatggggctcggggtctatttatacccgagattacaaaatatgtccatgtcggacacggcttttatctttaacaaactctaagatacctttgcgatagacttttgcccaaacatatctctatggaaattacataaaatatcctaattaatagatacaattgccttctcaggactcaatccgtgcatgacaatcctcatgaagcaaattaactcaacctgacaacgtgtactgcgtcacattgtcggactcggctcaatcggctaaccttgtccaactcggattttaccgatcccggtcacaactgattcggactttagccgatccttgctctgtttttggaacgatttccatgttgaattccgtttcagttttatctccacctccgatgttgaaattaccaaatttggtcgttaacatatgcccccccaagtccagaatatttggtaatgtttcggattttccatattcgtgtctccgagagtatcgctcattgccgtttttccgaccgttaccgcatcgctttaaatactaactgtcgtccccaagaaatttcacaccgttagctccgttttcaccgcttaagccaactttgtcttctctctctccggcgatccccttggcgcaccttacgaccccaaggcgatatcccctccgaccaaatcttccgcccgcggagatgtcgtcctccgccagtccgtccgtggcgccatcggccgaatacgtagaggtaagtatccatcggctagatcctctcttttcacaatagattggttcttccttgccttatcttattttcttcttctctgttcttgtttacatctgtagcacttgtccaatctggtcgtgatccttgtcacatgagcaccactattttcttggtccgatcggcaatcttgatcccactgagttcatcatcgccaaaaccaataggatcccttttagattggccaatccaaatctaggccactgaaagaataccctcaaatcttggccttctcttgagaaaacttctcctgagaaaagttgtgctgtgtggtataagccccgtatcggctagcaagcaggtccattgggatgaaccaggaatcggccaagcgcttgctcttactttggcaaattcggctaaggatgaacccctgatggcctctgccgcttatttttggtccaataccctcaatgcttttctgttaaaccaagggccgatgaccccaactctgatcgacatcactatgattaccggattagatgtaatttcatcggctaaccccatgagcttgaacaacaagaaccagtttgactttaggaccaaaagcatagggggctggtctggctatgtagcaacatacatgggcaagggatctgtcacccctcgagaacacactacctttctcatgatgtggctcgagaagtttctcttttatggatcgagctatggtccgactaccaactggcaattcttagccgaagcccttgaaactaagaggcaacttcctttgggcaaaatcctcctcgactatctgtatcagatgttgagtaatgcatcggccaagatagccaccggttcagtagtgggtgcgggtggaccatggtggttgttgcaaacatggctcaatctcattgttatgagagttgtgaattggccacccctgacagaagctgaattcccgaggctggaacccactactaatgatgatggggaagaggtcacccaccgccgatgcatatcatatggagaagctgcatcgacaccaaccgattctggagcaaagctatcggccgaactgctcaaagattagttctgcagtttctatgaaggcttccagagagatgcttgagtttggttcccttatgaggactcagtgaattttgatcacccggcagacttcaggtttgaggatatcaactctgaaaagtataaaaaatccacagaagtcttctcggctgccattagtccatgcattcttcctattggcatccaccaagggagaaatatacacgtgtcctatgagttctatcatccgatgagctcagctaggcaatttggaatgggacagatgccaattagcttattctttgccgataaaatccaatgcagaggggagatctcatccacactaatgatggatcggctgctcaatatcccaggaccctctctgggtagcattgataacatagagttggcaaggtttaggagcagaaactttgacagatggtggggtgaatggaagcaacatatattccattagccggcctctacgtacatgacagttctgtttcctgatgttgtccctcaggtacatctttactttgtcaattctgcttgaataattgtcagccgacttgaatcttgactaccttctctctttaccttgcagacaacataatctccccctcctcgcaagagtaacagtggaagggacatagaatatgctctaggacttttaccaaatggaggtggattagctcctccggtcctcgtctatcat

SEQ ID NO: 16745 - DNA, 1042 bp, Oryza sativa
ctccccctcctcgcaagagtaacagtggaagggacatagaatatgctctaggacttttaccaaatggaggtggattagctcctccggtcctcgtgtatcatgcccccaggacctcaagtctgcttcaagagcagacgatagagccagccgatgtcggcaggaagagaaagaccaaggcaccggcagttgatccatcagctctggttcacaaaaagaaagcccagaagcataaacccaagctagccgacgacttgcctgccttagatccatccatcgagcaagctctggatgaagaagaaattgaggaagacgtcgatcaagcggcagccgaactgagcgatgaagaagaaaaaacaccattagcttcacccaagcaaactcctccaactcctgctgccccgactcacttctcaagggtaaaccactcaccttgactccctcttataatcattttattcatagccgatcactcataaatctcgttttggcagaaaaagaagactgctgtgaggaagaaatcgacagcaacaacacttaaaccagctccaccagtaagattttcttatacaaattctttctctaatctgatcatagctgatatttacttcacacttgtctttttgttgcctcctcctccttcaccacctgtgcagcaaatgtcaattgaccgtaccccatcggctacaggaagtcatcatgttgaagaagaggaacaaccagccgctcctgccatcctagaaagtctttcattgacataagatcttagatcggctgacactgtttgatatttaactatctttaaatttctcttttccagaccttagccgatctattctcctttgacatcaaagattactttgataaagaagtagaagaagaatccacaagcaaggctctagcccctctggatgaaaatgtcaagaaaacactcgaagatatatcccttcggctagagtcatcattagacaacttggtggccgactgcggttccatccgggcacggtttgctgaaatccaagccttaatcccggatgatctggca

SEQ ID NO: 16746 - DNA, 1646 bp, Oryza sativa
atagtgggtagtactcagtcttgctctctttcccccacaccagagctgaagatcttcctagtgggagctgtcttgtcgaagttggtttcgtcgttgctgtcaaggattgcctgtggaatggagttgccccgctgcagaagtcaagtttccaagtctagcttgttttatcttttccgctgcatttgtaatcttttatatttttgcaagacgtggatctgtatgtcaacaattgtcgtttgtgtaccctggctggtcctggacaggggtttaatacacattcagcttagaaattctggttcgtgaatttctgggcttgacaatcttccaagtgctgttgaagaacagagtctagattgagatcggctatcaaaaatgtggctgacatgaccaagtccctcaaagtcatctctggaaccgacgcccaagacatccaagccatcgaagaagtagatcaaattagacaacgggctgtgttggctatccagcgttacttgtctggataattggtcttgtaataggataacttatttttgtaatcggctaagaaactctgatacccccttttgtcactgaactgctgtgccgattaataaatcttaacttgttcaaaaattcgcaaaaatttgcaaccgttcgtatatatgtgcccccctaattttataatgatgaaggcattgaaaaaattataatttggactaaggaggacatagccatatcggccattgtacatcggtaaaacacaaccgattacggtatgaaaacgactaagggcgatataaacatatcggccatttgtacatcggcaaaacacaaccgattacagtatgaaaatgactaagggagatataaacatatcggccatctcaaggcgatgtaaatacatcggctatcatgcatcggcactatccagccgatcatgcattaacccaaacacttgggtaatatttcttcaagtatttgccattgagggctcgtccataaacatctcaatcaagtccttgcaacatataagcccctttggacacaaccttatggatttgaaacggtgtttcccaattcggtgaccacttgctgaatttgctatctcgagttcctatcggcaaaatcaatttccaaataagttcacctacagaaaacaccactttcttgttgtaatgtcgagcaatgtgttccttatccttagtaacttctgcaagggctctcaatcttgattgaaccaagtcctccctctcatcggccatgagattgtaatattcatcggctgtcaactcattttgtaagtctatcctccttgaaccgattcgcacttcccatggtaaaactgcctcatgttcataaacaagtttaaaaggaggaacttggatcgaaccgtgacaagccatccgataggaccacaatgctttggccaatctagtatgccattgccgaggataatcgaaaatctttctcttaatcaatttgatcaaactcttgttagacgcctcggcctgcccgttagcttgtgtataatatgatgaagaattcaaaaatgtgatacccatgctatcggcaaactgaacaaactcatcggacacaaagatcgagccttcatcggttgtaattgtttgaggaataccaaatcgataaataatatgctcttaaacaaa

SEQ ID NO: 16747 - DNA, 1121 bp, Oryza sativa
  unsure (1)..(1121): unsure at all n locations
tgttctggatatgtgagatcattgcaaatgtgaatctcttccagcggagcttgctcttccggcactcgtaaacatttctttagctgagacacatggaagactgggtgcacatccgcgatattttctggtaactgtaactgatatgcaacttctcctcgcttggcgatgatctgaaatggtcccacatatcttggtgccagttttcctttgaccttaaacctttttgttcccctcatcggagaaacctttagataaacgtaatctccctccttaaattccaggtttcttcttcgggtgtcggcgtaactcttttgtcgtgattgtgctacttttagacggtcacggatcaagcaaaccttttcttcggcttcttgaataatgtcaggtccaaataccgctcgttctccagtctcggaccacattagcggggtatgacatcgtcgaccaaacaatgcctcattgggtgacatttttaggcttgcttgaaagctgttgttgtaggagaattcagcgtagggcaaacatctctcccagtccttgctaaaatccagagcacaagccctcagcatgtcctccaggacctggttggttctctccgtctggccatctgtctggggatgataagctgtgctaaatgcgaggtaacttcctagggcttcatggactttctcccaaaaatgtgaggtaaactgtgtgccccgatcagatataattttcttaggtacaccatgaagacatactatcctggtcatgtataactcggctagcttagcactgctataatttgtcttaacgggaatgaatctcgccgtcnnnnnnnnnnnnnnnnnnnnnnnnnaaatggaatcatatcctgttgcgggtttgggcaatccaacaataaaatccatacctatctcatcccatttccattcgggaatcctaaggggttgcagcaagcctgccggtcgctgatgctcagccttcactttttggcacacgtcacagagtgctacgtattccgccacatctctcttcatgttgggccaccagtatccttccttcagatcttggtacatcttcgtacttccggggtgcaatgaatatgccgattcgtgagcttcctttaaaattaatcccct

SEQ ID NO: 16748 - DNA, 6027 bp, Oryza sativa
  unsure (1)..(6027): unsure at all n locations
cataatttgtcttaacgggaatgaatctcgccgtcnnnnnnnnnnnnnnnnnnnnnnnnnaaatggaatcatatcctgttgcggttttgggcaatccaacaataaaatccatacctatctcatcccatttccattcgggaatcctaaggggttgcagcaagcctgccggtcgctgatgctcagccttcactttttggcacacgtcacagagtgctacgtattccgccacatctctcttcatgttgggccaccagtatccttccttcagatcttggtacatcttcgtacttccggggtgcaatgaatatgccgattcgtgagcttcctttaaaattaatcccctcagtccaccctgttcgggtacgtaaattctctttttataccatagaacatctttttcgtcggttgaaaattcctttgcacgtcctgcagctaagcgttccttcacctctcggacttcctcgttgtccttctgggcttcttctatttgggttctcaaaagaggttgaatgtctagggtgtttatccgtccacgacgtactatatgtaggttcagctgagctatttccctcctaagctcagggaccaatccttccattctcacatgattgcaatggctcttacgactcagagcgtcggccaccacgtttgctttgcctgggtgatagtgaacctctaaatcatagtccttgattaattctaaccatcgcctttgcctcaagttgagatctgactgggtgaagatatactttagactcttgtggtcagtgtagatatcgcaatggtttccaattagataatgtctccaaatctttagcgcatgaaccacagctgcgagttctaggtcatgggtagggtagttttcctcatgtggtcgcaattgtcgtgacgcataggccacaactttcccgtcctgcatcaatactcctcctagtccttgccttgaagcatcacaatatataacaaagtcttttttgatgtcgggaagaactaaaataggtgccgaggtcagcttttctttgagctgctcaaagctttcctgacactgttctgaccacacaaacttcttttccttcttgagtagttgtgtcattggtcgggctatcttagagaacccttcaatgaaccgtcggtagtatccagccaagcctagaaaactctgaatttcagtcacatatttgggtgctttccattccgtgacagcctccactttagcagaatccactgctactccaccggccgagattacgtggcctagaaaagcgacttcttttaaccagaactcacacttgctgaattttgcatataacttatgcttccgaagtttctcgagtaccaatcgcaagtgttccgcatgttcttcctcatctttagagtagattagaatatcatcgatgaataccaccacaaatttgtccaagtagtccatgaacactttgttcataagattcataaagtatgccggagcgttggttaaaccaaacgacattacggtgaactcatataatccatagcgtgttgagaacgcggttttgggtatgtccccggttctaattttcaattggtggtatcctgaccgaaggttaatcttagagaacaccttagctcctttgagttgatcaaaaagatcatcaatccatggtagtggatacttgtttttaatagttactttgttcagtgatcggtagtctacacacattctcatgctaccgtctttctttttaacaaataacactggggctccccaaggtgatgaactggggcgtacaaatcccttctcttgcaactccctgatttgctttttaagttcttctaactcattgaccggcatccgatatggtctcttggatatgggggcagttccgggtatcaggtcaataatgaactctatgtcacgatctggtggcattccaggtaaatcttctgggaacacatcaggaaatcgctgcactacgggcattccctttaggggtagcatggtaaatatacctccggcacgttcggttagcctaggatcttgatccatggttgctctcatatccgatccccagggtgtggtcagggtaacttctctatgtctacagtcaattattcctctatgctttgctaaccaatccatacccaaaatgacattaagagtttggggtattagcaccataagattggagggaaataccacatccctaaggcggatgggtacgtcaatgcaagctatatccactgctatctcacccccaggtgaatgtactaacattggttgtcttagtttaactctggttaaattgtgttgttgactggctttcaaagatataaatgaatgcgatgctcttgaatcgaaaagaactttaactggagtgaagttgagtgaaaatatacccatcagtacgccttggtcttcctgggcctcttcagctcgaacgtggttcacttgcccgcgtccaaatccggtagcggtcctgttagtctgcggagtcctgaatagacctcgtccagcagcaggggtagcagtcccgtgaatagccgttgcattagctccggtgcgaatgggtgtcttgtttggatgaggacatttattggcgaaatgcccgtactctccacagttgaaatagcttcctggccttactgatccagtggcggcctgattcggtgcaggagcgcggttctgaatggtaaccggcctgtggaaattgctggaggcggcaggtcgactggttgtcaccactgttggtctccatgccgaggaggttgtccctttaggacgctggggtgcggtctgaggcgagcggttcatggcaagcctccttttacgattgtgctccacgaccttccggtcgttctccagcctaacgaccttattgattaaactctggaaactatcgtggtcttgtccaatcatgggcccgcgtaatttatcattcaagccttcaatgaatttgtcgatcttttcctcctcgtcggcaagatctctagtcgcgtagcgcgccagctgagtgaaacggttcaggtactcttgtactgtggtattcccttgctgtagtctcctgaactcattcttcttcatccgcatcaccgcagcaggcacgaagttgtcacggaaggctgtggtaaattcctcccagtttggttctccggcatcttcttctcgggcttctttgtacgtgtcccaccagtctccggctggtccttccaattggtttgccgcaaagatcactttatcggcctcacgtactcgaacaagagttagcttcttctcaatgatccttaaccaatcttcagcatccataggttcttcagctgtggcgaatgtgggtggcttggtcctcataaactctccaaagcttgaccctccgcggtcgccttggttgttcgcgatagcttgcagaacttgagtttgggtggccataactccggccagagtggttaagtcgggtgtctaagtttcgtcattgctggttgttgcccgacgtcggcttgccatctgtgtaggttgatggagtaagtatcctaattttctaactagctcctatggctttatcccattaagggagttgtgttgatatgaactttgttttgcaagcatggtggaataaactcatttataacacaacaacaatagatatcataaataacatcatagagtttcacaaatggtacataaatcatgatgcaatcgactgcatacatacgcagtccaaataaggttcatccaaaagatacatcaaactaatcatcaaactactcgtcaatctaggtaagggagggggggtgtctcgcatactatccaaaaatccatctgatacgagatcgaagctgcaaggagtccgtcagtctagtcctccagccatccgcaggatcctggggcaggtagagggtggtcgctggcacgcgcaaacctgagtccccacggctcagaagtagtggcctctggatctggcttgggcctcttgcccggaggtcgtgtgctcttgcgagcagtgatgagggtgcgaggacctccaaggaaggtgatgcggggaacaggggtctcatcctctgaaggatcagtgatgtctggctcgatctctggctcggtgtcggtcccctctgtctcggagtcgacctggatcggagtctccaaactggaacccagctgcggagaaagtgtaaggatcagtggagtgtgcaccatctccgggacaggtggctgtgccgctgtcgggtccactaggtaaggtgctgactcgtagctagcatactagcctctcccagaagagcatggaacgccggtgggtaccgcggggtgaggaaaaagtagcggtcacggcctactgctgtggaagtagaagcccctgtggtgctgatcttggctactcgaagctgctccttcagctggctgacgtgctcctgactctctctcagttgctcctcaagagtatccatcatcccgcggcgatcgttgtactggccagataactgctggaactggtcgccgtggacctggagctgtgccttcagtgagtctatctcactgccccaagcctggtgctcctcctccaactgaagctgctgcactgagaggtcagtcaactcagtctccagctctcccatacgtctctggtggtcgtcaatctccaacagagcctcctcgtagtagtcatctactgcctcagcccatcgtgacaaccgagtcaccatcgggttgtagcagcagggcgtgtcctgaactgtgcaaactgagttgctctcctcccggaacgggtgatgagcaaactaggtactcactaactcagctcggtggatagagctgagtcggaagaaggcctcccgggctgcatcctgcatcgcggtctctggcaggtctcggtggtgacgtgtctgaaagctgtagtccaactcggaagggactcgagggtgaaccttaacccgagccttccaaactgagccacactgtctcactcggtatgacgggaacccagagtatcgcagacgcctcaacatccgatgcagctcgatgacatacccctctgattgaggtaagctcaactcccaggtagcgggtgaatccggatctgccatctaattttaagaaaaacccaaagtcagttgagagtaaaacttgttttgtaaagaaaatagttaagagtaagatgaaaattgtaccgagttttgtaaacatagcgtttttatttttgaaagtattactaaatgggaatttctcccttggccaacttagaaaaggggtggggcgccttttggtcttttcttacagtcgtatggctctgataccagctctgtggacccccgtttttataacaggaatcaattgtgtaaacagtaccatttccctggatcaagtagtctggtacacacgaattcatagctgaaataccaagtgcacatacacgagtgtctaatacgaattattacatcataaccccgcaggcgtagtcttaaatcatcggaccgagcggtccggaatacatccaaaagcagaaatagataaggcagcggaattcaggcagcggcatgccattgccacaggcaacgaccgtactaagacctactgagcgccatcgtcttcatctccctcctggtagtaggcatagggatcctccgaggcttcatctcccgcttctgattaattttatatttgcaagggtgagtaccaaccgtactcagcaagccaccacagcaatgatgcacatgacagaggaattcaaaggatggctatggttcttttgcgcaaagcaagttttgtaattcttttcacaagcctaagacctagcatagactgatcaagttttaataccagtgttcatattaaacaatgacggttctgtccaccatccattgtgatcccaaggatagcttcccgccattgagtcgttatggttttctgaggacgtccacgttccccgcctctcaggaagtggctccatcagcataaaaatcatcatgcaatatcccatcccacacaagttaaagaatttagagtctagccaagtgtaatacatgtcccggtgctcaataaccgcgagcaccgctatt

SEQ ID NO: 16749 - DNA, 5687 bp, Oryza sativa
caccctagaataaacaaaaccccaactagtggacactctactcctggtatcactagtatgattttaggtagatgctacgctgtttaattaggtaacattaggtggttttacaactctagactttgggatattcatatcacctggacactttggaattgttggtttattgtggaattggattcacaccgccccctctattcaaaatccccaaaatggttttaggctgggctcggggtgcatggttttgatagtagcacctcggccatataaggaccggtcttcgggcctctgttgcaaagcactaccgtacttccacatgtctagtgggtaaggcttagtttgtggctcagtctggttataaacaaaagtacacggatggagatggacgaagtcgggggtcgatggacatctctaggacaaatgaaggctacacgagctgcggcccggtagtcgagatgtcatggcacagggccggtgtcctgctgctaggggctcagtcctgcctacctgtcccgggggttccggccgtaggtggggttgggtcggtactcttgtctatggctaggatgggttggaaactatgtcacgtcttccgtccgtataccgtggtggtatgtggcacgtggttacacgtgaggaagatgtgtcttgtgggtaaagatgtacacctctgatcagagtataatctattcgaatagccgcgccctcggttatgggcaagccgagcaatgtacccaagttagtgttttaattcttaaaatttgcttaacaactaaaatgtggaatggttggcctgggttggcttgggacgagctgggacccagggtcgggttgccagttcggtctgaatcatcgtaggccttgggttaaggcaggttcgtgtgggttcacggccttgattaataatattgtatagctctaggatcgtgtttacaaaatagctttgggcaactaagtgacttttaaatgctgtttactgcaaaacttaacccctatattattatccccttgtacccccttgcattaattatgcatctccggtgtggcttgctgagtactgtggttgtactcattcttgctctatctttctccccccttcagtaagagaagctttggagaagaagtcttaggtggagtcttggcttataccccagttgagcgcctgtgaagatggagccgtaggcccgctagtccgctgctgtttatttttgattgtcaggccttaagtgcctttgtaataatgtaaatattatcgatataataaagatgtgtcttttatatcatgtttgtatggtgtaccccggcttttcctgggacggggattaatacactagcgttcgggaaaatgcaattttctcggtcgcgacaatttccttgacatacaagtttagaatttaatccgagtcctcttaaagatattctttctatacatggcaccccatacctagtcggactatacatgccgtgtaggtatggggtatccataatctccacagtagcccctgagacctttacagtcgacgaaacaatctcttctcgtagcacaaaatgataatccgagtactccgacttcttctgccttgatctcccgagtaccaaaatcaaagactgtgaaggtctaaaaatagaaaaaaaccgggtgcatcgactagatgcacctaattaggtgtagcccccgactatgtgattagttaaaaaactaaacatatagtcaagatgcaaactacatccaacagagtggtttgacaactgaatatcatatagcaaagcatatgcggcgttcaataaaacatccagccgactgcttttagctttaatataccaaaaatgaagatatgaaaaggcccgagtgaaaaacactctaaagatccataaattcacacatttgataagaatccgagtaaaaactctcaaaaagatccatcaaacgtgatataaatgtgataacataacaagtgatgagtctaactagcttaggctatgactcacaccagaaaaataagcatataacatgccgagtgaatgactgtattaaaaccagtcatctcaataaaacccaaacagccttcgcagcctaataaggcctacaaaattagtataacacctttctgttgggcacctttttatttgcatcataataattccaaagaattatctaaccgcatcaaaaatgattttaacagcatcgggctaaactgtcgtgagcaagtgttgccaaagcaaaaatacctaagtccctaaggatcacaactagcaacgctggtaatagaattgggctgaagtactgtaacatcccggcctagggcttaataggattaatagaatactcatatcaacaagttgcaacttcttttccaaaatccaatctccaaagaactccagggttaagcgtgcttggcctagagcaatttgggatgggtgaccgaccgggaaattcttcccgggtgcacacgagtgaggacaaagtgtgcagaaaagacatgtgttggtctgtgagggcagtctatgacctatgaaagctatcagatgtaagcgggcccggcctgggggaaggcgggacgttacaaaatggtatcagagccgactctcgcggtttcacgagaatttcccgggtgcacacgagtgaggacaaagtgtgcagaaaagacatgtgttggtctgtgagggcagtctatgacctatgaaagctatcagatgtaagcgggcccagcctgggggaaggcgggacgttacaaaatggtatcagagccgactctcgcggtttcacgagaatttcccgggtgcacacgagtgaggacaaagtgtgcagaaaagacatatgttggtctgtgagggcagtctatgacctatgaaagctatcagatgtaagcgggcccggcctaggggaaggcgggacgttacaaaatggtatcagagccgactctcgcggtttcacgagcgcgtgtgtcgcagttgcgcagtaccatttccctggatcaagtagtctggtacacacgaatttatagctgaaataccaagtgcacatacacgagtgtctaatacgaattattacatcataaccccgcaggcgtagtcttaaatcatcggaccgagcggtccggaatacatccaaaagcagaaatagataaggcagcggaattcaggcagcggcatgccattgccacaggcaacgaccgtactaagacctactgagcgccatcgtcttcatctcccaagcagaaatagataaggcagcggaattcaggcagcggcatgccattgccacaggcaacgaccgtactaagacctactgagcgccatcgtcttcatctccctcctggtagtaggcatagggatcctccgaggcttcatctcccgcttctgattaattttatatttgcaagggtgagtaccaaccgtactcagcaagccaccacagcaatgatgcacatgacagaggaattcaaaggatggctatggttcttttgcgcaaagcaagttttgtaattcttttcacaagcctaagatctagcatagactgatcaagttttaataccagtgttcatattaaacaatgacggttctgtccaccatccattgtgatcccaaggatagcttcccgccattgagtcgttatggttttctgaggacgtccacgttcccgcctctcaggaagtggctccatcagcataaaaatcatcatgcaatatcccatcccacacaagttaaagaatttagagtctagccaagtgtaatacatgtcccggtgctcaataaccgcgagcacggctattcgaatagatttggtttactcacactgcagtggatgtacactttacccgcactccgcgactgcccaacacatgagcctcgtcccaacacatgagacgcatcacggcaaagcttttcgataacctcgcattggcagtacccactccatgaacttaaatcctcatgcactctaggcgtccatgtttctagcagtgagaggagttctggcgctcccgggaaagagaagtctctcacgcatattaaattatggttcaagttaagttctctctctcacacactcatggcagtcctaccaatggcgacaccgatgtagggcacgcttctcggccctacctcaacggctgtcccatcgtagcgcacctgcctcactcaggggtgaaccatctatgcaaggatactgcctccgctcggctatctaatccgctaggtctatacccatacaagaagtgcggttgtacgggggttgtttcatgcttaacttcatggctcggttcttaattgaccggggacggtactagccttttccagataccacccaaatcctccgtccgccccagtcaaaaacagttatttaattttatttctcctttcacaaatcatgtcatcaacatcatggcaatgtggcgctcatgtctccacatgccgcatctcaattaccttcccaaaggtaattgccccagcatatagcatttgataaatatgagtatgcatgattctagaatagcatttctaagcaattgtcatagttgactagggactcatacgtaaacattgttacaaagatttaagggtaaacaataatcaaggcatggcataatcacaagtaggatgttcatcattgcatgcaattttatttgtaaacaaaacaatttcgcaattgggatcaacatgttcaaggaatagtgatgacttgccttgctcagagtcttgcgggtcttggccttcgcttggatccgcaactctctcgggctctatagttacgtgcaaaaattgatttgaattcggttagaattcaaataaaaatccaaataaatccaaatgaaagtcgaatgtgaaagtcgattcctttttattaactttactatctgcgaactacggcaaacccaattttgacttaaactattttgcgggtataaatattttgttgtcataagtttttaatttaatctacccgagcattatatccatataataggttagagatttctatcacgagctaaatatcggacgaaatcctagaaatattatatgatttaatttagtctatgactaaaagattaaatataatgcacggctaaaatccctagtaattaaatccgaatttctaccgtgaaccgatgacttttagagattaccaaaaataatctataataatctataagaattcatctaattgtttagttattaattatatctaaattactaccaattttaatctaatctgatcaagaaacatatttttataattaactcggaatttcgaccgaaatactattacgctcgagcaatttccaaaaataatctacgattaaccccgaccatttttatttcctaaatcctcctaatttctcccccaatttcccttctattttctccttttcttcttttctattttccctctttttctctcctctctttctttttctctcttttctcttttcttttctttctctcctcccggctccttcctcctttcctctcttttctttttctctgctccctcccggcttctttctatctctctctctcggctctttgcttccccgggcggcgacggcggtgggcgcgaggtgaggggggggggagacggctcaccggcggcggcggtggcggcgacgacggcgatggcggcgcaaggcggcgacgcacggcgcggcggctccggggcgacggcgcggcggcttcgaaggtggcgg

SEQ ID NO: 16750 - DNA, 11469 bp, Oryza sativa
caactaagtatctttaaatgctgtttactgcaaccctaaccctttatattataactcccttgtactcccttgcatttattatgcacttgtgggtgtgtcttgttgagtacggtggttgtactcagtcttgctcaatttttttcccaaacccagaagaggagtctctggaagatgaaggttttggtgtctagctcgtgcctgccgtcaagcgcctgtggtcgtcgccctagtcttccgctgtttctcgtttgtctttgtgtgtgctgggccttcgctgcccatgtaataaattaactatttacgcttccgcttgttgaactctgaattgtatcaacttttggtgtaccttgcctcctgggacaaggaataatgcacgcacgtaaggaacgcccgttgggttatttccggtcatgacagttctactgcttgggcagcctcatcccctgtaggcaatgaattccatgtgtcttggtacactggaggaagacaagagtactcaggaaggactggttcaggatttttgaacatagaaccagttggcgtgccaacctttgttcgaggtcttgaagggcatggagaaatatttttggcttagtgttcccctgagttgaaaaccagcgcccccaacaacgcacggtttgctcttgtttggctggggcttgaggaagaagatgcggcggaacaaggcaaaatgaggcctaatgcccagaaaagcttcgcaggcatgaataaaatttgcaatatgcactatggagtttgggttcagatgatgcaggctgattccatagaaattcagaattccccgaaaaaatcttgaggttggaagggagaaaccgccatagaagaaatgagcaaataccacgatttcatgtgtatcgggggttgggaatgcttcgccgaatgccggtcaccacccgatgatctccttcgctggaagaacgccgtgcgccaccatctccttcagattatcttccgtcacatcggagggcgcccactgactctcgaagctttctctttctcccgccatgaatgtgaactggatggtttgatttggtccgagatacggctggaaagggatggggaatcggagcggtggacgcggggagaaatttcgtgaagttttttaggatggattggagcggattgatgaaccctagtttggccggcgcagttttgtactgtagcaaggaatggggaaaatggcgagagtctcggcggggaagacgaagagacgttttatttcacttcggtgcttttagggtatcgggagtgctaacaggcctgggcctgcacagtacttcagcccaattttatttccagcgtggctcgttgtgatccttagggacttaggcactttttgctttagcaatttgtgctcacaacgatgtggcccaatgcttttgaaatcctttttaatgcggtttgataattctttggaattaacatgatgcaaacgaaaggtgcccgacaggaaggtgttatacaatttttgtaagccttattaggctgtaaaagctgtttgggttgatttgagatgactaatttattaaaggtcattctcttagcatgttatatgcttaatttggttatggtgagagtcatagcttaggctattagactcgtgaattaccatgattaaaaatcatgtttggtggatctttttaagagttatttactcgaattcctatcaaatatgtctcttttttggacctttttgagtgttatcactcggccctttttgtattttttatccttgatatgttcaagttgagaagcagtcggctggatattttactgagtaccatgcatgcttcgctataaaaccactcggttcttgactacatgtttagtttttcaactaatcatatagtcgggggctacacctaattaggtgcatctactcgatgcaccatgttttattttcgcccttcacagtttttgattttagcactcggcaagctggagcaagttgaattgaggcactcggattactgttttttgttttgagaaggctattattgtcaactgcgaaggtctcgggggctactgtggagattatggataccccatatctacatgacaattataatttagttggatatacggtaccaaatatagatagaatatctttatgaggactcgggttagtttttaacttgtatgtcaaggaattacccgagatcttagtcggttacgattgcattttatctgtaattacatattccgttagggatatggactgtactttgtaaagcggactctttcccctatataaggagggttcgtgtgcctctcggggcacgatttcttttttccagtttatacaatcaataacacactcggcggaataatccccggacaggagtagggtattacttcttgaataagaaggcctgaacctgtataaaatcctttgtctccaaacccatccactttcctagcttgatagccaccccgttttattattgccgaaatcttgtttcgacaatcttactacaccaataagaaaaatccgttccatcgaaaacatggagcttagttgtaaacttattagccatggcaaaaactctagatcggttaaaattcaaagaagaaaacaagactctgatacgacttgtaggatcgaaacacaagaactaagccaaccagagggggggtgaatggttggtatacccaaaaacccaaacttcttgaggaaataaaagttaccctcgaatcgatgtagatcggtctgactgcgcctgtgccgccggtctgaccggtgttgatcgtctggttggactgccctggaatcgcctctgcctcctgaagccgtcgccggtctgaccgccgatgagttgctagttagaccgccgaatccgataaaacacaaatcgacgaactctcaaagtatatgacaactttattgcttctctctgtgtttacaaagtgcaacagccacactccttacaaaaatcttgactaaacttgaaaccctaactaaactatcaactcaattgctctaaaaagcactaccgggaagcctcacgctccctctctatttatacatgaggtaggcagcctaaagccacgaaccaaactcatactagaagtcctaatccgcataggaaacctcatcgtacaagaaacaaactttacataaccaatcataccaaatttggactccttccaaattcgagtctgcatcccatacacacacaatacctccatcgtatgcaatatggaatcttcaccaaccacgtgcattgaactctagcctaagtatcccgcatgatatctgaccatcgcggacattgcctttccacgaagtcgactcccgatccatcgccggcaatactatcccgaggcatcaagtcacctacacatgaaacaaataaagaaaccatattccgagaccaagctatctccaacttgactcattagtagcaaacaactgtattacatacgcatagtatccatctagaagccataatcatgaaacaataacggatatccaaataaacaacctgaaaccgaaaccgacacagagtcggccgatcagactgcaggctccaccagtctgaccgacagcacatgcccggtctgaccggaccacatcacgaccagcagttcctattcacctgcaaattccaatcatctcgaaaaccacttcgtaaataaattccaaatatcaaaaccaataatcttagatgccaattattcatcacagaataataatcaaaaacacctttgattttacacatggcctctcctgtcctccagaactatgcgtctcctgcacatgccctgtatcttcaccatgaagacgagttgctaggctgcaagactactgctcgtgacttcctgagacaaaatacgtaagtgtttttctcttctaaggcggtgttcccacatagttgttcccatccgaaacagtaatcacggaaaacggagtggtccattagcacgtgattaattaagtattagctaattttttttcaaaaagcgtgcgtgtggaaaacgagaaagaggggttgggaaaagggataccgaacagagcctaagggtgtgttcggaagtgcttgttccccaccggaacagtgcccacggaaaatggagcggtccattagcgcgtgaaaagcactaattactataacttcattttgtagcatatttttcagaaacattgcaccaatttccaggtgaaatggcaagaacgaaaaggttgaatgtagtaaaaatcagtgcccaatacaagagtggagatggcaatagcagtgaacatatctagggctgtcaacaagccaagctcgagcgagctcgtctgcccaagctcgagctcgatacaagctcgagcagagctcgagccgagcctattgcaccttcgagcttttaggcaagctcggttcgagctcggctaccgagctcggtcataagtagtataagatatattttagtgataatcccttgataagtgtaattattttctagttaatcacactaataaaagagtaaaaaatgattaaaataaatatattgtgctaacacatgataatttattgtgttaatagatactaatatatatatttatctattagtttattaaatcaataaggtaaacaaacaatataaattgtacacagttaagctcggtagaaactcgagctcggctcggtaaagcttgcgagcttttgcccaagctcggggtcggctcaattggagctcgagccgagcttgaattgagcatagaacgagccaagctcaagctacttgtgaccttcgagctttttttgacagctctaaacatatcccagtgcaagcactagaagataatgagatcgaactagagcagcaagatgatggctccttgaatatgtcaggtatgactacaatgaagatagctaaaaccagtaggacgaactaaatgtttatattgaaaaattgggctcagctactattgttcttgtttaattttataggtgagagtgctaaagaagacaaactttaacacatccactactagagaaagcgtttttgctcccggtttgtaaccccctatactcctagttttacaatcgggagtacgaatccgggactaaagatggatatctttagtctcgggcgaaataattgggactaaaaatccatctttagtcccggttggggcagtgccagtcccggttggtcactgttggtatttgatatggttacagataaaatccgcaagcgcacggatataccgatgtagcacttcccctacggagtattccaagggtatcgaatccaagggaacgtgtgtgatcagagcttcctccggttcacccaaggacaccaagaaaatgataggccaggatagagaggatttactagtgagaaacagtgtctagggaaagcttaattttaatcctaacgcaatacttcaggcactggcaacccgctgttcctagatgtcgctctactacgtacccagacagggaggacttaagtgctctcgagggctgtcaccacctctacacccacctcaacgtactgtgggatacgcagcaattattggataataattacctaaacaccacgtctaagcaattaatatctactttagtgtttataactcaccaaagcaatcactatattttagttgattatagcgaacaataatcccgtatgctaattaggaactaaccaagaggtaattctcacaagataaatctaaattactcaagaagaatattatattgaattcagaataataaacagaataaaagaaataggagaagattaccgacaactccggaattcttccgactccttctactctactctcttcctattatagtatacaatattatagtacaatagagcctcttataattcagcttaagcttagaagtgtgtgtgtgaagtgagggagtgaagcctttatatagaggtaggtatgactgttggcgaaggggaaatgtccgaagtaccccgcaaccgccatcagggagtgatctggagcgtccacgccaaaccccaggatcaacggtgaacctgggctgggccctcctggcctggccttcggtcggtggattccccgatccttcgtctatccatttctcggagttttgggttgattcactaatgttttgatgaagttcacaaaccctccttgtatggatacataattctcctcactttagtctgattttcctcccaacttcagggtttatcatctgcatacaaatatacaccaacacttgtggaatacgtgagattaagcacctatcactatgttggatgttttattatccgaactttatgcagacgttggcggtatagaatcgacatttaacagccgccaacaaaaccccccacacttagcactttgctcgtccctgagtaaaggtcagtgtagaatgaatttcttcaagagatgaatcaagcatataaatcattcacacccatacctatacctgtgaattttatcagtggctatcttaccatcttgagtaattgataaatggaatgatcttgattccagtccttcttgcttctctgttagactcgtggggtttttatgaattttcgcaaactagctcttttcctcatattgacttttctctcttgtctctcaaagatgtatattttctttttggatcctctccaaggcaaagtatgccagaattcatccctattctaaggctgttatgtggagcttggtagggataaactggtgacatacttgcatcatatatattgcaaagtcagaaatatggactcaagaagatcatccgtcatactcctagatcaagggtctttatttgtggttgaaaatggaaatatgttgtggaatgctggaataaagaaatgattctcctttttcctattctttctctccaaattggttctcttggcatgatcatggaaggggcatggctatattttcttttcaactttgctcaatgtttttaggacaagctttatttccatcttcttctttcttttttttcttttttttcatagccatgcctttccctccttttctcattttctttttgccatgaactttcccaagaaaagaaagcatagttcattgtaggagtttatttgaatgatatttttgtggaaagccaacttctagtgtagaagcttagcttaattttatatgtgaaattggaaagtggaaatgatactgactccttgatcatgacagtatgaaagatatctaacacaagtcacacaaatttgacaaaactcaatataatgtcaagcagtcatatgcatgataatgtttgattattaatgtacttgcatatggtcttggtaggtataaggtaaagtcaactggaggatagagtttttaaaatagttctatttttgaaaacaaattcccaagagtcataagaaagttgcaaggattcctttcatcttaatcatctcacataaagcaattacttagatgcataaggttccctaatcatggatggttattcacaagcacaagttcagctgagaataatgaatatacaagatcaatcacatgaagaatttcattagttggaaattttatctcttacttatgcttgaaccagttgttttctgaattttcagctctagtactataccatggtggagatatacagataaaggacgtgcttacctgcttacctgtgaaaactgagagggataggggccagcactggttcggccgaaccactctggtgcctgatccctctgcaactttctgcagagttcagtgcttccaggtgttcagatatttcaacaattctcagggcatatgcacgttagaagctgggatatctcgcccacacttattcaaaacctgaattttcttaaacataaaacaaaaacaaactttggcaaacattggggtaaacaccaatgtgccacattattaatagcaagtgcttacatgattggaaaaataaaaccaagcacctactactattttattcatgggaaaggaaacatctaattagcataatacttattttcctttcccatctctatgaatgcacgcttgattttagcgtacaaaccacgattaagggtatcaaagctattcctaatttcagcgagttctacccctagctccgcaatacgatccctaagctctatgttctccttgcggagtttcttcacttgagcggcgagcttgtggatcgagggcttcggtgatttcacctcatcctcttggaattggccgggagccctcacaattggagggggcgtcaaatgacgcttcaccttcataggtggagggctatgggattccgctgcccccttcttctcccatgccgtcaaaggccggagtaaacctgtcacgcccggaatttctatccaaaattctaaacgcttacatgtgtgtgaaccctcatccaggaatcagccgaggcacacaataacaaattgataatagagtacaattattactctaattaataagcaaataaaatatcattacagaggtagatagttcctctcaatcaataaagatctaagcagcggaaaaaaaaagataaacggcgcagacgactccactccacaggcagcttgaccagggctatacctaatcctccacaccatcagcatcactgtagaactcctcctctgatgaatgattgcaaggtgagtatatgacatactcagcaagccacacagcaaatatgcaagtgcacatgataccaaaggatggcatagtatggtttcatttgcataaataatatttaataaacatttcagaatttaataaaacagttaagtaataattaaacaatattaatccaacgctatacaacataccatgttgcataggcccaaccattctgaacaaccttcgcggctgcacagttctatctccaaaccaagaattaaccattccaaaccaggagctaatcaaattattaccagttatagcatcatttattatgatgggaagtgtgagactaatcacgaaagacattgttacacccgcccataaccgcgggcacggctattcgaatagttttactctggccagaggtgtaccactgtacccacaagacacggccccacgacatgtcaccatgcgcctcaataccaccacggtacctcggaaaggagctgtgacagtacccctcacacaacacaatccaccacagcgcaccgttcctggatcataatcacccccttataaacaaggcatggactccccagtgacccccatgggcttatctccgccacttctcagtctggtgctccacaatgaaccatgctatacaacaggtaaagccgttgcccacgctggcttgtggttggtacggttaatgtttcacaaccgaaactcgtgaaccggtccttaattgtcatgagcacgaccatcaaaaccatgtgctcacaacccacctttatcaaattttatttggcaaattaattaattaaccaatcacgattgaccatcgtgagcttccattaaatatccataagtgatagtgaagtatgatttatcccattaatgagctaatatttctaagcacggctaagcaactataaataacatctagctgaaccaatccaatatataaggtccatgctagtcaaattataacccataggaaaataaagtcatcttcggccataattaaatgggaaaggctcaccacccaatgacattcgaaaacaatgcataagttgaaataaatcaatagctttaaacaggttcaacctgctcaaagggttgtttgggatctgcgtgacttgccttgctggccttggaactcttcaaattcttctcctgcgaaaacggactctccggaaatgtcggaatctaaatagaaaggggcaaaatcaccaaacagcacataaacaagcatgaacagtacatgtggatatttttaacatgtagatctcaattttagaaaaatttagagacttgaaccaactaaatccgagctaagatgaattagttatgaattttcaaagattaaattagattaaatcatttatttagattttaattgaattatgacgcaataatgaattatttttgaaaaggaaaagggaattattgcgtcagcggctagggttcgcggtgaaccgggtgcacggcggcggctcacggaaacgaacggccgagatcgattcatccaaaacggacggccaagatccatcggtccatgaccgggccacggggaatgacaacgatgacgtcagcggtgacgtcaccaccggcggcggctcgggcgtgcatgctcgcgagcgaacgacggcacgacagcgcgaacggagggaaccaacacgtagagggcgacgcggcgaactcaccggtgaccaaaacaacggcggaggatcaacggacggcgacggcgtcgaggaagaagcggcggcgaccttcggcttgacgacggcgacgttgttccggcggtcgacagcgatggtggaggggcggacgaggtcggcgacggcttggcgatcacgatggtgacctccccgagcgacgacgacgaccggagtggcggcggcgcacggctggacgaacggcggcgacggcggcgctaggctacacggcgctagggctctaccggcgacgagaggccaaggcgagggtggcggcgtgtcttacgtgcgtgcattattccttgtcccaggaggcaaggtacaccaaaagttgacacagttcagagtttaacaagcggaagcgtaaatagttaatttattacatgggcggcgaaggcccagcacaccagaagacaaacgacaaacagcggaagactagggcgacgaccacaggtgcttgacggcaggcacgagctagacaccaaagccttcatcttccaggaactcctcttctgagtttggggaaaattgtgcaagactgagtacaaccaccgtactcaacaagacacacccacaagcgcagaataaatgcaagggaatacaagggagttataatataaagggttagggtttgcagtaaacagcattaaaagtcacttagttgctcaaagctattttgtaaacacggtcctagagctatacaatattattaatcaaggccgtgagcccacacgaacctgccttaacccaaggcctacgatgattcagaccgaactggcaacccgaccctgggtcccagctcgtcccaagccaacccaggccaaccattccacattttagttgttaggcaggttttaagaattaaaacactaacttgggtacattgctcggcttgcccataaccgagggcgcggctattcgaatagattatactctgatcagaggtgtacatctttacccacaagacacatcttcctcacgtgtaaccacgtgccacataccaccacggtatacggacggaagacgtgacatagtttccaacccatcctagccatagacaagagtaccgacccaaccccacctacggccggaacctccgggacaggtaggcaggattgagcccctagcagcaggacaccagccctgtgccatgacatctcgactaccgggccg

SEQ ID NO: 16751 - DNA, 2607 bp, Oryza sativa
  unsure (1)..(2607): unsure at all n locations
cagcgagggtgcggggcgggcccgcccgtcagcggcgcgcgcgcgggganaggccgtatggcccgcgggaaagaggagagaggggaaggaagatgggccggaccggcccaaggaaggaaagaaggactttttagggtttttctttttataaaacctttttaactttgtttatttcttaacaattattatttgtgctctgaaaattccactaaaatttatttacgtattttaggcttttaggaaatacacaaaaatcctccaagccttatttgacttttaactttgcacattttaattgttggaggctttcacacggattttaattattctaggcataatttaaaggatatattttagggtcgttttgggatgtgacacggcgggtagcggcgggcttgggggtcaatttataggggtttagaggtggcggcgaaggcccacggcgaccggcgacgcgaaggaaagtctagggttcggaggagagagatcgatccgaatcaaactcgaatccacggatttccaaacaattttagccgacgattccaaaagagaaaaggtagaggagatcccgatgatcatttcccctctattgatttcaccggaaaaattaaaggggcgggcgaatttggaaggagacggcggcagcgcggcgctagggctcgggcggcgggcggccggaggtagacgacgacctgacaggcgggccccacctgtcagcgtccgagggcgcgcgcacgtggctgctgcgggcggactgggccggcttgggccggggagagagagaaggttttgggccgactttcggcccaaagccaaaagaggattttaaaaaccttttttaatttaaattattcattaaatgtaattccatttattaaaaatacttccttagctcaaataaatcccagaaaaatctaggaattatagaattaagcaaagtatttaatgaaattttatctggccccattttatattggaatttattaattaaaactagatcttctcttctaggcttttaaaataaattctaataattccaatttagacaacaatttatatatttgggatttttagggtgtgacaaaacccttaccatacccaccgccgggagttcgcactccttgaatgcggaaacgctccccctttggagtggatggtgtagcggtgggtgtggtgtacttgtggagcacctcatcccctgccttggtgaagagggtgcccacgtagcgctcggcgggaggcggcgcggccttcccgtcatcttggaaaaggcattgagcctttaacaagccgaactctcccgtagtcggctgttgcgcagggaaatccccccggatttttgttcttgtaacatggcgaggggagagatatcgcgctgccgaacggggggccgaacgggccgagagtgtgcaaaggtgagggaaaggatgaagaagaagtgttatgctgtgatccgaacgttctacctacaaacgcacgtctaaacggactcaggacgagcgggggagactgccattcaaaattggtgccgatcgggcaccgtgatggttcggccgaaccctggtgggtccggcaggccaccagatttttcctaggcccacaaagtcctaaactaagcacaaaaatgacaactatacagggttttaagcatgcaatagatgagatcatcatggttcatctaaagttttatttggctcaaggaaaatctttaaacgttgaccgtttaccttaaatatgttacctgattcgtcgtggagtgtgattgccccatgtgaagaggtgtcgatgacatcgaacggtccttcccatttactgcgcagttttccatggccgaaaagcttaaccctggagttgaatatcagtactttgtctcctggcttgaatttcttgatttttatccttttgtcatgccagcactttgtcctttctttgtatatctttgcgttgtggtaagccttttctcttcattccttaagttcagcgatctacatttttctccattctcctgctccctcaaaatccatgttccaatttctgatggcccagtatgctctgtgctcaagttctacagggagtcgacatggctttccgtaaactatctgatatggggacattccaatgggtgtcttgtatgctgtccagtatgcccatagtgtgtccggcaatctatccatccatcttgttcccattttgttgaccgtcttttgcagaatattcttgatttgtttgtttgatgtttctgcttgaccactggtctgtggatggtaaggagtggccacattgtgtttggctcccatttctcgtaggaggtctcggaaggttttgtcaatgaaatgagaacctgcgtcacttatgaccaatctggggtaccaaatcttgggaagatgatttctgtgaacatcttcttggcatgcctcgcatccgcggcgctgcacggcataacctcaacccacttggagacatagtctactgccaccagaatgtactcgcagctacgagacctagggaaaggtcccatgaagtctataccccaaacatcgaatatctcgacttgcaaattgtatgtgaagggcattgcatcgcgagcagtgatttctccttgcctct

SEQ ID NO: 16752 - DNA, 4089 bp, Oryza sativa
agtagacccgatataggtatggctcatcccatatgtgacagcgactttcatacttcaattttcattgattttaccctcgtggtatgtacttggataccatgtagttcactatgttggcataccacgggttggagtcgtgaaccgtcatcagcatgtcatctcttaaaaaatcattgatcggttgttcctgcatgttagtgatctgcagcctggacaaatgatctgctacggaattttctactccctttttatctttaatttctaagtcaaattcttggagtagcaaaatccatcttaagagacgaggtttagcatctttcttagtgagcaggtatttcaaagcagcgtgatcagtataaattatcaccttggctcctactaagtaagatctaaacttatcgatagcaaaaacaaccgcgagcagcccttttcagtagttgcataattcaactgggctccggttagagttttgctagcgtaacagattgcatgatgctttttatctttggtttggcccaagaccgcaccaacagcgaaatcgcttgcatcacacataatatcgaagggcagagtccaatcaggatgttgaatgattggagcagaaacgagtgcctttttgagaatttcaaaagattttaggcacgcgtcatcgaagtcaaagggcgtatccttggctagcagattggtcaggggtctagcgattgtagagaagtccttgatgaaccttctataaaagccggcgtgtcccaagaaactatggattccttttatgttcatgggaggaggaagttgatctatcacatcaattttagctcgatcaacttcgattcctcgttcggacactcgatgcccaagaactatcccttcacggaccatgaaatggaacttttcccagttaagcaccaggtccttttcttggcatcgttgtaagattttgtctagattctgcagacaatgaccaaaagtatttccataaactgagaaatcatccatgaagacttccatgatatcttcaatcatgtccgagaaaatagacatcatacacctttggaaagattcaggagcattgcacagtctaaaggagatcctacgatacgcatagatgccatatggacatgtgaacgtagtcttactctggtcctccggatggatgggaatttgatgatatccagaatacccatcaaggaaatagaagaaggaatgatttgccagccgttccaacatttcatcaatgaagggtagcgggaaatgatccttttttgtagccttgttgagcttcctgtaatcaatacacatcctccatccggttacggttcgttgcggaattagttcattctgagcatttgcaacaaccgtcattcctcccttcttcggcacaacctggattgggctaacccactcactgtatggtacgggatagataatcccaacatgcagaagtttcaagacctctttctttacaacctctctcattgcattattgagtcgtcgttgaggttccctagagggagtactctcggggtcaataggaatacgatgggtgcaaagtgtgggattaatccccctaaggtcctgaagcgagtagccaagaacagaacgatgcttctctaacacggtgagaagatgttgagtcttgtcttcagagagcttgtcactgattataacaggggcttctctgtcattgtgtaggaaggcatatcgtaggcctggaggtagaggtttaagctcaagcggaggtcgaggtggcggttccatgattggcaggtcgagagtctcaccaggatctgcttcttccttgatgaagtcggggacctcatcttccagaagggccccgggagactcatgaggagaaactgcggtaacctcttccgctgactcaatttctgggagagggtcggtcaaggtgatccttgcccacgagaatggaattgagaattcattctctcctagagttattttgaggctacctaatcggggtgtgttgatgactagttgctcaatgggcagcccgattaggatatcaaagtcttggatttcaaagacatggaaatccaagatcgcctccctgtcttcaaagcagacaggcacatcttgcacaatcccaaatccttcgatgatatttccgttcggatgcttgaagaattgtttgtcggggtcactgccttattgcttaaataagcgaatgcaaaagactcagagacgaggttgaccccgacagttggactgtagagaataccgacatcgttcccttccagatggcaaggaatgattcagggagcggtatttatctgaattacttcggatgaaagctctgcctcctttagccattcgtcgctcattatggatgtcaactcccggacagtttctcgcaggaacccaacttctataggatcggaaggtgacaaaggaacgggtggtttcctcttgctaaagtagttcagggtattgccgtagtcttcgtcaaaaccatccctgaacattattgcggcacaatccggagtctgaatttcttcattcttgacggacggctgctcaggaaccttctcatcaatcgagctagcagaaatggatggttcagcaagtggctcaataattagaggttcctctatcctagacacggatgcctccggctggggttcattggactgcgtcatgaaggaagtgttttctaggatgcgatccaaaatcgtttttccttctgacggcgtcttgtgcatgaacgatcctccagcggttatgtccagatagaatgcagactcctaatccaaacccgtatgaaaatgctggagaagcacatactcgggtaaggaccgggttggtccggactgcactaaattagtgaatctagaccaagctgcaccgattgattcgttttcgatctgcttgaaactgagaatttttactcgaagggcggtaatacgggtgactgggaagaaggcaagacataatctgtctcgcagctttttccagctaccgtttacacatccaacggtagaggtgtaccattggtttgctctctcttgaagaggtccaccgcacagtttcttgtctcatgccacgaatcttaaggcatgagtagacttgttcaaagtctcgcagatgatagtagggattttctagatcaaagccagaaaaaggattttcccttaccatactaattagctcgagacgaatttcatagccagttgtataaatgggctccgattaaggaggtggctcatagaattcgccccgaggagcagacggctcaaccagaggttgctccatgatcgagaagagttgacaggaatacttctctaggatagcaggggtgaaggtagaataaaaaaatgaaaaaggatacgaggatgaactgggtttgaaaatgatcagcaaccgttccccggcaacggcgccagaaatgcttgttggtatttgatacggttacagataaaatccgcaagcgcacggatataccgatgtagcacttcccctacggagtattccaagggtatcgaatccaagggaacgtgtgtgatcagagcttcttccagttcacccaaggataccaagtaaatgataggccaggatagagaggatttactagtgagaaacagtgtctagggaaagcttaattttaatcctaacgtaatacttcaggaactggcaacccgttgttcctagatgtcgctctactacgtacccggacagggaggacttaagtgctctcgaggactgtcaccacctctacacccacctcaacgtattgtgggatacgcagcaattactgaataataattacctaaacatcacgtctatgcaattaatatctactttagtatttataactcaccaaagcaatcactatatttaagttgattatagcgaacaataatcccgtatgctaattaggaactaaccaagaggtaattctcacaagataaatctaaattactcaagaagaatattatattgaattcagggtaataaacagaataaaagaaataggagaagattaccgacaactccggaattcttccaactccttctactctactctcttcctattttagtatacaatatagtacaatagagcctgttataattcag

SEQ ID NO: 16753 - DNA, 1246 bp, Oryza sativa
aagcatgttatttccatcaatatccctcctaatcattactggagttgcctttctggctttctttattattcgtcgattattttatcagtcctccttctattcgactattacttttgttctcgccgtggctgccttgttcatagagctatggcaaataatctctggtgtgtgttctaactggactaagctggccttgctccaataccatatcaaaaggaatggccatcaccgatgttgtctcatccagaaagcactagccatggtgctgcgcttccgtgctgtgcagcggttcaacgacaaaatggggcagaactcggtgctgcagcctcgtcggttccacaatcctccaatagtgttgccaaagaagatggttcatcgtgcaagccttcacaaatccgccaatgtcccaacacaagtgaaggctgctgtcttagcggcactaaagagaagtaatggacggctcagcaatggcgtggcagccattcagcgtagcacactgcgtgatactgtcatctggtcttgccaaggagatcacatcgtcactgccaatgtcatcctcgtgtggcacatcggcacaagcctttttgagatgaagtacctgcggatcaaatcttctccacggactgctgatatgatcaccgccacccatttgtcgcagtattgcgcatacctagtggccgccgtccccgagcttcttccgaacgacgctacatggaccaaggcgcactgcaaggaggtggcgagagacatcaagaaagctctcgatggagaaggaaatgactttaatcattttgtcgatgctcttggtgcgagctgcaggcacaaagttttgcagcaagggtcaaagctggcgaaacaactggtaggagaagttggaaggctcgaagacggagaaggagagaccaaaggcgtaggcgaggcagcgttgtggaagctcctggcagagttctggtcagagatggtgctctacctcgcaccgtcagacaacgtcagaggccatgccgaggctctagctcgcggtggtgagttcatcacactcctgtgggcgctgctgctgcatgccggcatcacttcacggcccggcagtgtcgccgagccttgagcccggcaatgtcgacgaggcagccgcaggtgatatgtaccgctgcgttagttgtacgtttttcaagttctatgtattcgcagcaaacattcgctcttttgagctaactgtagctgttagtgtcattgagaagattaccatgag

SEQ ID NO: 16754 - DNA, 1091 bp, Oryza sativa
tgtagccttcatttgccctgaagatgtccatcgacccccgacttcgtccatctccatccgtgtacttttgtttataaccagactgagccacaaactaagccttacccactagacatgtggaagtacggtagtgctttgcaacagaggcccgaagaccggtccttatatggcgaaggtgctactatcaaaaccatgcaccccgagcccagcctaaaaccatttttggggattttgaatagggggggcggtgtgaatccaattccacaatactccaacaattccaaagtgtccaggtgaaatgaatatcccaaagtctagagttgtaaaaccacctaatgttacctaattaaatagcgaagcatctacctaaaatcatactagtggtaccatgagtagagtgtccactagttggggttttgtttattctagggtgaacaaggaaataataacaatagcaataataaggtcataacaaaggtaaataggcatggctagataaaacagtgataacgcgggaatttaaataaagcgataatgcaataatttaaatcaacataattttataaactgggattcaatatgttcaaggatgatgtgacttgccttgctcgctttcccaaacgtcggcttcaacttccacgaagagcggatcttccgaagctgcagcgtctacacgaccaacggaaaagaaaaaggcttttactctaataaactccatataacaagcaggaacaaagcacaaaaatgggttcttgacttcttaaggaaaaattagagacttgaacggtccaattccgagttcaaatggccaagttatggccatttgaagtttatatgctctttaaatgaatatttacgaatttcttcatttaaattttaattaaaaaaaacccatttattgcgtcagccgagggaggggacgcgcggaccgggtccacgggggtggggcccacgcgtcagcctctcggtccacagtggaccgggagcacgcggctggcggcggccggcgccgtgggtcccacgcgtcagacgcacccgcgggcgcgggcggctgacggccgggcccactttgcagccgcgagggcgcgccc

SEQ ID NO: 16755 - DNA, 742 bp, Oryza sativa
tatggcggattttctcttccacccccaagattcttccgggggattttgggtttcaataggattagtttgcatcacctaaacccgaactccatagttcacatcgccaacttcatacatgcctgcgaagcttttttgggcgtcaggccgcattttgccctattccgccgcatcttcttcctcaagccccaaccgaacaagagtaaaccatgtgttgttgggggggctggtttccaacttaggggaactttgagccaaaaatattttttcatgcccttcaaaacctcaaacaaaggctggcatgcaaactgttctatgtacaaaaccccgagcctgcactccccgagtactcctgtcttcctccagtttatcaggacacctggaactcacttccaatgggagaatcaggcgcttgccctaatggaccgtatgctgaaactgaaggagcaaggcctgcaaggagaacagatcacccggcattttatcaagagccggctagctccaattaaagagagatcccgtacggcctttgagtttgatggcaagcatgacccgaaccgtgaagatccagactctcttgattttaaggtcatgaaggagagaatgtacaaaatcttctcaaacgctatcatggtcagctattcgcatttgctaccagtggtgccatacaacgccttcaaccctcttccaccggtatgtattcaaacatttcagccttcctcaaaagtatgcttttatcttctgt

SEQ ID NO: 16756 - DNA, 5950 bp, Oryza sativa
cggcggctgtcgggctaccccctggccgacgcaggctcccccaatgcccttgatttcgtgctccgtggcatgggtcagggtggcggcggtggcagcgccgagcggtttttccgcgtcctcatcgacgagctctggtttgctagtgatttctactactctcccatctcgttgagctccttcagcggatggtgtgccgtgctcaaccacctcttctccgccctgatcgtcgtcggcgctgtcaccgtgggatggatctatcgcacgaagcaagtggtgattttcgacggctcgcaagcgttctactacatcgtcactgtcgtcctcctgctgtccgtcgtgttcatcgagatatgggagatcgtcgccgacgtgtgctccaactggaccaagatggccctgctcgcccactacatcaggcacgactcgccgtggcgccgattccgcttcgtccactcggcgctcgacgcggtgctgcggtggttcaggccggcgaggcggtggcgcgacaagatcgggcagaactcggtcctggagccacgccgtttccgcaagcgaaacgggtttctcgccgagaaattctacggccgcgccggcctcatggagtctgtcggggtctctttgatagtcatagaagcgatgtacaggtccttccggaacatttacggcctgcggacgaatgaactagcaagcagacgcaacagcgaatcggccagtcggcggcaacgccgacagggtgaggtattcttccctgagacggttccagttcgagttcgacaccgtcaccgacaagatcctcgcttggcacgttgcaactaggctcttcgagataactcacgcgcgtacttcaccggacaacaagatcgtcgcctgccatctgtcgtactactgcgcgtacctggtggcggccgtgccggagctgcttccggactgccctgcgtggacccaaaaacggtacaagaaggtggcgaccgacgtgcgcgcggtgctgggcagtcacggcatcgccggcggtagtacggcgtcggcgagcgacgcgcagctttcgcagctgggcgaccgcgacaaggtgctgcgggatggagtggcgatcgttgggcgcctggtggaggagttcgccgagggcgagggcgtggacgaggagttggcgtggcagttccttgcgaatttctggtcggagatggtgatctacgtggcgccgtcggagaacgtcaaggggcacgttgaggccatgggccgcggcggcgagttcgtcacgctcgtgtgggcgctgctcctgcacgccggcatcaccacaaggcctccggcgcaagcagtattataccgtagggaaactgtgtgaagagtctcttttcagttatacttacacaaattaaaacgagtatgtgtgagtgtgagcaaataatcgatctactagatctagatcgacttgtggttgagattattaattatgcatggggcatggagtgtgcgcgtacgtagtggttgccattgagtctagctagtattatggattgtgggatcgatggcacgatccaaattagttgtctccatacttttaagcatccattagtattgtaattttgttgagattctcaggaagaaaactcaggaaattgcggcccaattcttgtgttatctctctgttatcgaaaattgctatacgtacgacattttgagtacgatcttcgtacgatcaaatgggcggctaacgtggacttatggagcatgtcagtcttgtactcgttctgatgcatgtcatcgtcatcgccagcgccacgtagggcaagaggttggcggtgatggtggttgtgatgtgttcgatgccggcgccggaagtccaaaagtacaacaccagcacgatcgcggaagtccaaaagttcaaaggttaattagacccataccactgcaactttacgaaattgaaaaaataccactactattcgtcatatcggctatatgccgctggaaatttttaaaattggaaccattccacttccgtccctttttccgtgctctctctcacaccgtctccattcggtcctcatccccctccctcgacgtctcggacctcgcccacgcgctgtcacgcccagccatcgcggcgcccaaggatgtccaagccgtagccgcacttgccgccgcggcggacttcccgagtcggacaacgccaactcgatccaggtccgcctcgctgccgctgctgtggagatcgaggaggtccgggtgagccggatcgacggcggcgagggcagcgtcgacggcgagtggacatagcaggttggacttgacgacgagggagtcgcagaagctacacctacaataaaatggctacttagctcagtggctttgcacgctcgactacgtctcactctgcttccagagaacaggttctcaattatctcgcacccccccaccccacttcacccacccaacaaagaaaaagaaaataaataaatgaaaatgaattagagtgcttacttttcaggtcatcgaccaagtcttctgtctgtccatgcctatctgtcgatgaacacgcccaaatagtttccgggacacttattggggcattttacacttattggggctttgtttttctttattttgagatacataaacgtactcattggcttttcagttgtcttttaattcattgctagctgtatttaatatttataagattttgcgtgaaaattaggtgtaattattccaaataaaaagatttctaggattcagatttattttataccacaatatataagcattactactctgattctcttagcttctatcatatcaatgtttttagagccaatcaaatgcttcagaaggacatctaagaaatttaataatcaaatattgataactgaagtgactaatggaaaatttttggcccgagtagtacttactaaagagtaaactgtgatcacggtacataaacttgcacgatggatacaaataggaacaacaacttataaatcgtttctatacaattactagtccatgcgaacttgagccaaaacaatatacgcaagcaaaattgatttaacacggtgcgccttgataacatctttgcatgctagcggtttttttttcacaaaataaaatgtttgttttaaatacaatcagtactctagtagtgtaaagcaacctacaagatattgcaatgaaattattattgctgactgctatattctgcaaaactgaaattgatctagtgtgtgtatgtctgcacattgttctggtactacacatttgattaattttacacgtgtggattgttttagactaggttcgtacaggctagacaagttattgcatctgaatgggcatttgtcaagtttataccccctgagtgcaatttggtctttactaaacacataaaaatccctatattttgagaaagagggagtaggagccaataatgattggctaagataaataaatatgcggataaattgaataacagatgttgtgagattggctgagatgaggaggtaggtacaggagtggctatattttgagataaaaattaattatcaaaggtaccagctatatttgagaagaaaggagtataatacatagtacaagctatatttgaaataaatgatattctatgattatatacacactttttagcggatctattccgttctaatatttccaaattctaacctcttgccacataatttacaaggatatattttaatatatgtttttttttaaaaaaactttataacaaattccttcgtgagagagtacacaacatgtgtggtgctgcactaattgatgggtccatctgttgcttggccgtgtttcctgacatcaacctaaccatgtgtcggccgtccggcttgactccttccgagaagcttcactgtaataccaggcactccgccgcgtctagactcttgagaaggatgaaaagaagataacagaatgaaacaccacatttgcagcgatgagcgcgtatattcctctgctgctcctagatatttgttcaccacctgtgctaatagaccccgttcgtttctattaggaggtgttttagggctgttcactttcatgccattttcaaccttaccaaattttagtaaaattgtcaaaaaagtggctacatttagtttgctgccaaattttggtaactatataagaaatcatgccaaaagttaccaaaattttagcaactatgacattagatcggggtgtcacatcgggtattatatagggtgtcgtatggggtgtttgcgtactgataaaaaaactaattacagtatccgttagtaaaccgaaagataaatttattaagcctaattaatccgtcattagcacaggcttaaaagattcgtctcgcaaagtagtcgcaatatgtgcaattagtcattttttaagcctatatttaatactttatgcaggtgttcaaacgttcgatatgacatggcgtaaaattttaaggtgggatctaaaccggcacccttaggctgggttcattacttagaggttgggaacccatctccccgcatggaaaacagagcagtccattagcacgtgattaattaagtattagctattttttttcaaaaatggattaatttgatttttttaggcaactttcgtatataaacttttttttttttggaaaaaacgcaccgtttaccagtttgaaaagcgtgcgtgcggaaaacgagggaaatgggtggggaactagaaattccgaacacacccttagagcaagtataatagtaggctataagccggctaaatgctgatgtgaaggagggaagagaggagagagaggagaagcatgctgtaaacttacagccggcttggatacaagaaccaaaaaactctgtgagagagacaagtgggccatgtattaattgtaaagagctaactattatatgggtaggctcaaagaagactacaaataacgttatagccaacaagtcagctgtattattagccttgctcttagagcaagtttaatagtatagcccactactagctccaattcatctatagccaatctaatagccaattcatagaatagttgcttattatactattaatgtatggtcccacctgttatacacacattgtctcttggagtccgtgctgcagctgacaacagatctgtagtccgctgctcttctcttttgtcttttatctcattaaaatatatttgtagctagctaatagtctcctattgtacttgctcttagtacacttcctcgttatgggtgagcaactcactcgttttccattattacacttcctaacttgataaatcatatgttttgtgcaattattttttatataaaagtttcttaaaaatgaagttatgtttttactttattgtaattaactaatactccttccatcccagaatataagcgtttttggacttcaacgtagtctttgagatactactttgaccaacaatatttataaaaataagatatttaaataaaaatgggtgcatattatgatagttttttcaatgataaatctagcaacatcaattttacattattgatattttttattttttatattaatagtcaaagttcaaaatgtttgacttgacacttgttgacgaaaaatatgcgctcggccgatggtgctaggtctgtgttggcgcgaactaaattgacgaacacaacggccgaggagatctgcttagctccagtgcaggtctaaaggttgatgagatgcgggcgtgccagtcagtttgatcctgtaactgaaagatatactaatagcagatcaatgagccgatcggctgacaagccgatgaagtaattccagccgatgccgataccagctgatagcgatattggccaatcgactatatatggttgatgtagaatatgacacttgatataaataaactaataaagacaatcgactgatgataatataacaaaacaacaaatacaatccagtagaaacc

SEQ ID NO: 16757 - DNA, 17914 bp, Oryza sativa
catctagataaaatattgtggctagattaccattgtgattagcctaatgacctacttggcttagttatttatgccttgtttgatatctagcatgatagaatttatgagtttttcttgtcctatcatgtcgcaagtaggttatgcttgctgtatatgctttcaaataataatgcttggaataaaattaatggcttagtatgtattatttccaacattccagaaacctttagaaccattggtcatggctgctcatgctgttgatctgatgaggcctgagaagtttgctggtgaaaactttaagcgttggcaatccaaagttcgtcattatctggtgtcgcagaacttgtggtatgttattccacaagtgaggccgctgacccaacagcagcatgcggactttgagaccagtaatgatgtggctttaggtgtcatgctttcgctcctgtctgaccagctctacgacgtgtatggtgcttacaccagcgccgcagagctatgggaggcactggaccgtaaatattcggtttcagatgcaggacgttggatatatgtcgtggagcaatatcatgactttaagatgattgacaaccaatcagtggtgaagcaggctcatgatcttttaacgattatgggtgagatgtctcagtttggtgctattgtgaatcctaagtttgtggtggggggcattattgccaagcttcctccattttggagggattttgccactgcacttaagcacaaacgggaggacatgatggttgatgacctgattgccacctggatgtggaggagaaggcgcgtgcgaaagacacgccgactatggcacaagaagggacatcaaatgccaacctagtgcagaagtcaaatgcaaagaacaagggcaaacaagcagtgcagaaccataaggccaaaaacacaaccaattttaagaagaaaattacttgctatgtttgcggcttggaagggcacaaggccaacaaatgccgtgacaggaagggcaagaagaatgttcagcaagggcagaaaattgccaacatggttgtgagcgaggctgggtcttcagggtatgattctactcctgttgcactttcagcgtatcaatcctttgattggtgggttgatacgggagctaacattcatgtatgtgctgacattaatttattttcttcatatcaggctgcaaccggttcctccatcttgatgggcaatggttcaggtgctgctgttcttggagtagggaaggttgatctgaagctcacttcagggaaaatcatctctttgaagaatgtgcagcacgtaccatcaataaagaggaacttgattagtggctctctcctttgtcgagatggctataaattggtttttgagtccaataaagttgttatttcaaaatttggtttatttattggtaaaggctatgagtgtggaggcttgttccgcacatccttgttagactcctcaaataagtttgttagcaacattctcagtaattttaataaagatgctgttgtttggcattcaaggttatgtcatgttaattatgatagcatttcacgtatgagcagcttgaatttaattccaagcttttccatagtcagaggttcaaagtgccaaatttgtgtgtaagcaaagcaacctcgcaagccatttaaggcagtcgaggaaaggaatttggcgcctttagaactagttcattcagatctctgtgagatgaatggagtgatgactaaagcagggaaaagatactttctatcatttattgatgatgctactaggttctgttacttgtacttactaaaaactaaagatgaggcattgagctactttaaaacctaaaaggccgaggctgaaaaccaactagaaagaaaaattaaacgtctacggtcagatcgtggtggtgaatatgtgtcagatgagttctcccaattctgtgcggatcatggaataattcatgaaattacaccttcctattcaccccaatctaatggggtcgccgaaagaaagaaccgcactttgactgacttggttaacgccatgttagacagtgccggtatgtctaaggcatggtggggggaggctgtattaaccgcctgtcacatcctaaatagagtgcccactaaaaatagtgagatcactccatatgaaggatggaaagggagaaagccatcactatcatatttgcgcacttgggggtgcttggcgaaagtcaatgtaccaataacaaaaaagcgcaaacttggaccaaagactattgattgtgtctttctaggatatgcacataatagtgtggcctacaggtttttagtagtgagatccgatgtaccggatgtaccgataaacatggtaacggaatctcgtgatgcaacattttttgaggatatttttcctatgaaaggtacaggaacatcatctagtcgagcaaattcaacacctgaatttcctgtatatgtagaacaacatgaacatacacatgtggaggatgacaatgaaatggctctaacaaggagcaagagaccgaggattcaaaaatcctttggtgatgacttcattgtgtacctcgtggatgatgtgccgaaatccatttcagaggcatatgcatcacctgatgcagagtactggaggatgcagttcgtagcgaaatggattccattttagctaacgaaacttgggagatcactgatcgaccatttggttgcaagccagtggggtgtaagtggatctttaagaaaaaacttagacccgatggtactattgaaaagtacaaggtaaggcttgtggcaaaggggtacacgcaaaaggaaggcgaggatttctttgatacttattcacctgttgctagacttactactatccgtgtgcttctgtcgctggctgccttatatggtttcgttgttcatcaaatggatgtgaaaacggctttcctaaatggtgagctagatgaagaaatctatatggagcagcccgatggctttgtagcactcggacaggaaggcaaggtggttaagttattgaaatctttgtatggcctaaagcaagctcctaagcaatggcatgagaagttcgatcgaacattaacatccgctggtttcattgtaaatgaagctgataagtgtgtgtactatcggtttggtgggggagagggtgtgattttgtgtttatatgttgatgacatactcatatttgggaccaatattaatgtggtgtctgaattaaaatcatttttgtcccaaaaatttgacatgaaggatttgggagaagctgatgttatttcaaacattaaattgatcaaaggcgaggatgggattatgctttcgcaagcccattatgtggagaaagtcctaactcgtttcgggttgatggactgtaaaatagctccaacgccttatgacccaagtcttaagcttcgaaagaacaaaggactaggaaaggatcaattgagatactctcaaatcattggctctctcatgtatttggcgtgtgctaccagacccgacatctcatatgctgttagcaagctgagccggtttacttctaacccggagatgatcattggcaagcactagaacgcatattaagatacttgagaggcacaatgtcatatgggattcactataccgggtaccccgctgtgcttgaggggtatagtgactcaaattggatctcggatgccgatgagatcaaggccacgagtggatatttgtttactcttggtggtgctgcagtttcatggagatcttgcaaacaaacagttttgacaagatcaactatggaggctgaacttgtagcacttgacacacccactgttgaggcggagtggctgcgtgagctcttgatggacttaccggtaggtgaaaaacctatcccggcgatccttatgtactgtgataaccaaacagttctcataaaggttaagagcacaaaggataatatgaagtcctcaagacatgtgaaaaggcccctaaagtccgttagaagtttgagaaactccggagtgattgctgtagactatgtccaaaccgcaaaaaatctagcggatcctttcacaaagggattatcacgaaatgtgatagaaaatgcatcaagggaaatgggattgatacccatgtgagtcacacaacagtggtaacccatcctatgtgatcggagatcccgtgaagtaggtaatgggtaaaaacaaactgttgggtgacaggagagtacaaaactttcttacccgttcctgtcgaagatgcagtactctcattctgtatggtagggtgacatatgtcttaatgtgctctgaggttctcttagagacgaggtactgtcctacagggtacacttggaatagcacacctatatgagttaactgtggggtcgcagttttgagacatgggaactctctaaaaactcatgaaaagacacaggggcatgaccgataaacgccccaaccagaggcttggttcctggtggcctcgtatcagtaatgacttcaaaataaacttgtctacggaaagctagcaattcaaggtctgtccattgtctagctgtagatgggtggaacttaatgttctagacagtatgatcaacccttaatgggtctactgttgaaacgctggtatacaaacaacaaatggcagtttgtcgtaattaatcgaggactcaacatatggcattgaaattggtggggattgatggaaataacatgcttggaaacattgatcatttcatcaatttaaatgcctaatgcttagccgcacgatcagcatgtgttggatgacaagatgcttgcatacaacaacctctgctgatcgagtcaatcacctgaagacttggttctcacgtgaagagagaacgtgcgcttgtggccgtttggcggctgcgtttctcacggagccgatccggctttgacgcggaggagcaacggattgagcgtgggctgccgttcagtgttagctctatataggagtcaaggagacgtctttgaaggacacagaacacaatagccatctactctgaaattcctcaactgccgtcgtgttgcgtcgccgtcgatccaagccgaccgtggtgctcatcgtgcaacgagcattccggcgagcggtgtctccgagccttcgccgcattcgcacctgcacgggggcggtgtaaaggtttctgggcagcgtatttctacgcggccgctcgacatcatcgattgactgcactgcttcaactcgctgatctccgtcgatccattcagtgagtgaattctttcgtttacaaaggaaaggaaccagtgcatttctaatctagttttgttcgtacctgagttttgtatatgcatggtactgttcatctagattaaaatattgtggctagattaccattgtgattagcctaatgacctacttggcttggttatttatgccttgtttgatatctagcatgatagaatttatgagtttttcttgtcctatcatgtcgcaagtaggttatgcttgctgtatatgctttcaaataataatgcttggaataaaattaatggctaagtatgtattatttccaacagatataaccaaattgagtgtttcaagcgctcccccaacgaagtgccaataaggaagacaggagtagtaaaattcatttgcaaaggccagctcattaataaggatttggaacatgcggtcatggtcgttggcatcaccgagcatgccatggagcacaaaaccaagagccctttgggaaccatcctccactaagggatgtccagcaaaacgccgtctcaggctcttaaacaaggagaatgataggcaaagctccttgagtcctgactgagataccaatagaggatcaccggacaaccacatgttccaaatccggtctgttgttaacaacgtaaaggaagtagtagtgcccagggaggagaccttgatacgatagccatctggggttttctctaagtgctgcttctcttctcccatagttatgtaaggaggagggcttccattgttgtctttctcattatacacctgcgccatataccccgagatgaccttcacatttcggccaagagcaaatgagcacctcgctctctgaaaggcagccaatttgaccaaaaccttaatattgcagagcgcacatagaggcagcatgggacaaaaaagtagcaagtagggccaggtgtatgacaccagccttgttgtccatatagagtagtagtagtataacaccagccctgttgtccatatagagtaggcagaaagctccacaaaagtccgggagatgcttgtaccaccaagaagtgatcggccgtcggtagacaccgaaaggaaggccgtgtcggtattgatcttgatgatttgaatgaggacactccatcgaatgagggatcttgtgaagaaaaaaggcaagcactgcacaccatcaacaacattgtacccatgataatcaactaatcatcaacacgacaagcatcagataggtaatattggattttttttttgcctgaaatttctatatgaatgtaatttgttcagataatgtaacttgttttagttctgggttctttaattggtaagactactatctgcacgagggcagaactatactgttgagaaatctagctactatcactgaattaacggttggaaatacctgttgagattcatggttttggaaggagtagtactggggatatacatgagggcagacgacactttgagctttcaccttcgacatatagtgtgatatgattaggctgtaagcggaatgaacactacggaggcgccccactggagaaaccggagtgccggatggcggcaccggtggccgtatgtgataagcgccacctgcagcacggcgaggacgccggtggaagccattaaaagagagacgatgaggtactgaccgtggatgaatacgcttagatccatgatgatgatcagcagctacaataaatggctagttagctaagtggctttgcaagctcgaccttaagctagctcattccgcttccagatcgaacaggttggtatgtgtactgtttgaggggaggctgagcctgatattccttctgtccgttcacgcggaccacgcctttctctcgatgaacactccaaaatagtactatagtttccaggaaacttactttacaaatgtcatgatgcatctcctaatcgccagtaaataaatagagtttaggcccctttgattcaaaggaaattcataggaattttagatgatctcattcctatagaaaattttcctatatagccatttgaatcaaaggaatggatcttatagaatctgtggagattatggataccccatacctacacggcatgtatagtccgactgggtatggggtgccatgtatagatagaatatctttaagagaactcgggttaaattctaaacttgtatgtcaaggaaatatccgagatcctagtcggtcatgattgtattttatttgtaactacatattccgttagggatatggacggtattttgtaatacggaccccttcccctatataaggaggggtctgagtgcctctaggggcacgatttcctcccagatcatacgatcaataatacactcggtggatcaatccccggacaggagtagggtattacttcttgattaagaaggcctgaacctgtataaaattccttgtctctaaacccatccgcttttccagcttgatagccaccccttttagtattgccgaaatcttgtttcgacagttggcgcgccaggtaggggtagcgtcaagttcttcgccgactagtgcgatgggtttcgtttccggcatcgacgacttcatcttccctcctgggcaggcgtttcgtttcggcagcctcgacttcatcaccaacgacttcggcaagatttctctcctcaactcggattcgaaccagtcgggaagaggccagatctccgctccgttcggtatcccgaactcgcccgagatctaccccaagatcatctctaccgagttgacttcaaaccacttggacgagatccaatctacttcaaaatgacccgatcaagacaatggggcctatccgccaatcctgatgaaactccccgatgatttggctgctgtcttcaccacaagggcgtcttctccccgtaggcctaggcgggatccggcttcagccccggttcggcctagctccagggaagtcggcgtcatactccagccactcggcacggtttcgacgaaacaactggacggctacctcagctcccccggcgtcgactcgcgaccaacggagatcgtggagtacgacgacttcggctaccgctatgactaccgcaacctcaacgacttcgacgaaggctttgaagacaactacacgcctctctacttcggcatcttcatggctgacaacgagatggaagaatagcgcaaagcccgagaaacagaagagctacgcgtacaacaggaagccgaacgacaccgactagaagaggagcgccaagcacaagagcgagaacggctgcagcgtgaacaacaggaacgcgaacgggctgcaaaggaggctgaggaccgacgacaacgggccttggacgccgggcgacgagcacgagagcttatcgggcagcaagacgtcgagggaactgcggtttttcgcacccctcaacagaacgcggttgcagcgatcaccctcctcgacaccctcctcaaggaagacacactcaatcaagctaatcacgtcgtcaacatcttgaaccagaccaagaccatgatcgccgcctcggtcccggttaactctgcaagcgtctgcacgctgactggcagccgagttcctcatcttcgatctcaagactatcaccaaccgagcctcagcgtcgccggcacgggatccagtcgcaggagcaggggtcacgacgagcgatctgtccattcacctcccgaacggcacagggagcaccgagttgaacggcgacgctacccacctcgcaggcgccccgtcgatcttcacgatactatcaaccagcgtcgcgcggcacaaggctacgcaccattcaccaaatcgctacgacgacgacgtggatggagtcggtgcctttacaagtgacctgtgtcgagtggattggccagccggcttcaagccgactagaatcgagaagtatgacggcaccactaatccagagtcttggctcaccgtctacggtctcgcaattcgcgcagcaggaggagacaacaaagccatggcaaactacttgcctgtggctctagcggattctgcccagtcctggcttcatgggttaccccgtggcacaatcggatcatgggcggaacttcgtgaccacttcatcgccaacttccaaggcacctttgaacgccctggtacacattttgatctctacaacgtcattcagaagtctggagaatcccttcgagattacatccgacgcttttctgagcaacgtaacaagatctccgacattaccgacgacgtcatcatcgctgccttcaccaagggaattcgtcacgaagacctagtcagcaagttcgggcgcaagcctcccaagacggtcaagcagatgttcgaaaaagccaatgagtatgccaaagccgaagatgccattatcgcgtccaagcagtcgggcaccacttggaagtcgaagaaagatacgccgactacaggagggagtggaagtgctaatcacaaggatcgcaagcgtaagcccgaggaacttgtggcaactacaacactatcctcccgacaacgttcgcgcgtcaacacttttgacaagatcatcaactcccaatgtccgcatcatcccaattctaatcacgcggccaaagattgcttcgtctacaaacagtttgcagaacaatacaccaagaacgcacgtaaggcctccgacggagatcaaagcatgtcaaagaagaaggatgatgacgatgatgtcccgactggttttcaagaccatcgcaaggaactcaaccacatctttggcagacccctagcttatgaatctaagagaaagcaaaagctgaccgaacgggagattaacactgttcagcccgatacgccccaatatcttcggtggtcggagacaacaattaagtttgaccactcggatcatcctgaccgagtggtccacccggggcggtaccccctggtattagacccagtggttcgcaacgtcgagctttgcagatccctcatcgatggtggcagtgcactcaacatccttttcgccaaaaccctagacgacatgcagatccctcgcacggaattaatgccgagtaatgcgccctttcacggagtcattccagggctatctgccacaccactcggccagatcactcttctggttactttcggcactcgggagaacttccacacagaaaacgtctgcttcgaagttgctgatttcgagacagcgtatcatgccatactcggacgcccggcgttagccaagtttattgccgtcccgcgctatacctacatgatgatgaagttgcctggtcctcgaggagttatatccctgcggagcgacatcaagcaagccgtcacatgcgacaaggaaagctgcgagatggcccagacccgcgagatcacgctcgcccgaaaagaaattcgactggctgcgtccacagcaagcgaaggtgaagtgcctgcaaccaagatgccgaagagcggagaaagcgacgccaagaccaagaaaattcccctagatccctctgatcctactaagactgctgtaataggcgctgagttagattgtaaataggaaagcgctcatcacctttcttcaaaataataaagatatctttgcgtggaaaccatccgatatgcctggtattcctagagaggtgattgagcactttttacatgttaaggaagacgctaaaccaatcaagcaacaactccgccgttttgcgcaggataggaaggatgcgatcaaggaggaactggccaagctgttagcagcaggcttcatcaaggaagtccttcatcccgactggctggccaacccagtcctagttcagaagaagacgggacaatggcgcatgtgtgttgattacaccgacctcaacaagtcatgccccaaagatccctttgggttgcctcgcattgactaggtagttgactcaaccgccggctgcgagctactcagctttttggattgctactcaggatatcatcagatccgactaaaggaatctaactgcttaaagacttcattcatcacacccttcggggcctactgctacatcaccatgccttttggattaaagaacgcaggagcaacctatcaacgcatgatccagagatgtttttcaactcagatcggccgcaacgttgaagcttatgtggatgatgtagtagtcaagaccaagcagaaggatgatttgattatggatctagaagagacctttccgagcatccgcgctttcaggatgaaactaaaccctgaaaagtgcatcttcggagtactatcatggaagctgcttggatttatggtgtcccatagaggcatacaagccaacctggagaaaatcactgccatcctcaacatgaaactgccgagctcccagaaagacgttcaaaagctgactggttgcatggcagtgctcagccggtttgtttcgcgactcggtgagccggggatgcccttttctaagctgttgaagaaaacagacaatttccagtggggacccaaagcacaaaaagcctttgaagacttcaaaaaacttctcactactccaccagtcctagcttcaccacatccacaagagccgctgttgttatacgtgtcggcaactttacaggttgtaagcacagtcctgattgttgagcgtgaagaagaaggacatgttcaaaaagtccaacgaccaatctacttcgtttgcgaggttttggctgactccaagacaagatatcctcaggttcaaaagctattatatgatgttttaattatcgtcaggaaactatctcactacttccaaggtcactcggccacagtggtcacatcgtttccactcggggatatacttcataatcgcgaagcaaatgggcggatcgcaaagtgggccttagaattgatgtccttggatatatctttcaagccgcgaacttcgatcaagtcccaagctttagccgacttcgtcgctgagtggactgagtgccaagaagacatgcccaaggagaagatagagtattggactatgcattttgacgggtcgaagaggctcttaggcactggagcgggggttgttctaatttccctgaatggagaaagactgagctacgtattgtggatatatttttttgcatctcacaacatggcagaatacgaggcgcttcttcacggactaaggattgcgatctctttaggaatccgacgcctgatagttcgtggagattctcagttggttgttaatcaagtcatgaaagagtggtcctgccttgatgataacatgaccgcttaccggcaggaggtacgcaagttggaagacaaattcgatggacttgagctcatccatgttcttcgacataataatgaggcagacgacagactggctaattttggttcaaaatgagaaacagctccttccgacgtatttgttgaacatctttacgaaccaaccgtaccaaggaaataaacaattaaagccatggacactcaagacgtaagcatgattgaagccgactggagagagcccctcataagatttttgaccaaacaagaactccctcaagacaaggatgaagccgagcggatctccaggcgcagtagactctatgtcattcatgagaccgagttgtacaagaaaagtccatcaggaatcttgcaacgctgcatgtctttggaggagggaaggcaattgttaaaagatatacattcaggcatctgtggtaatcacgctgctgcacgaaccatcgttggcaaggcttatcggtagggttttttctagcccacagctgtgtccgacgttgacaaaattgtgcgaacatgtgaggattgtcaatttttcgcccgacaaactcatctaccagctcaggagttgcaaaccatcccgttgtcttggccgtttgcggtttgggggcttgacatggtcggcccgtttaaaaaggcagtcggtggttatactcacctctttgtggctgttgacaaattttccaagtggattgaagctaaaccggtcattacaatcacggcagacaaggctagagatttcttcatcaacattgtgcatcggttcggggtacccaatcggatcatcactgataacggcactcaattcacaggcggagtatttaaagattgagaaaatccatgaaatgccattgacaagcactctaatcccagaaatgccattgacaaacgcaacttcctcaaaatgccatcgtacaagcgtttttctccctaaaatgccatcacagccagtgctgttaactcctctccgttaagttgtatgaaaagacattcttacccctgggcaacctttgtgctaaaacaacattattttgtattgtttgctcacagaacattattttgaattgatgcatatttaaattcacagacgtgtattattttgctatcaatcaaattatttagaaattaaattcataaattttggcatcaaaattatttcagaaattttgctatcaattatcagggttgtgatatgagcaaaaataggggcatcaattatcagggcaacacacacagaaagtaccaatcatgatcaacatgaattttcacaaaataaagggttcacaatacttagcatcacaacccaatatcacagaaagtaccaatcatgatcaacatgaattttcacaaaataaagggttcacaatacttagcatcacaacccaatataaagagtacttagcatcacaacccaatataaagggttcacagtacttagcatcacaacccaatacaagagtactttgcatgcatgcttaatacatcttagttcagacaatacatgtgacagtaagaaactcaatcaattattctcctcttgcttctagtccccattgctggactactcttcttgcttctagttctcattgctggactgtcctgtggtacttcattattcttcctccttttggcaggtggagtagtaggttgtactgttggggatggttttctcttgattttcttgtctttgtcctccttttcacccttcttccccttaccctcccccttccccttcaccttctacttctccttctccttccccttccccttccccttccccttccccttggcaacaggtgcagcaacttgttgtagtggcacaatggtcatagagctgaaaaaaaagttatttagcaatcaatttaagttggcattaatcaagtgcaatgggtacagtaaaaaacataattggttaccttggtaaggatgggaaaggcacattattagactcaagtccagaatcactaattgtcccaacaacggcactttaaaatcatatattacacattagttaagttgctgcagcctaggagcaataaaaggttaacaaagtggaaagtggaagatagaaatttcaccttgataggctacccaagatttgacttgacatagcagtaggatcaatgttttcagtggcaacagtggcagcagaagtagattttggttttgatttccttttcagttttctacaggaaaatgaaaataagtgaagtttgttggcaaaggaaatcaacatgaagatatggatatagaaatcacctttgttttgccactaaagcataggcctctttggcttctggatctgcttctttgcaacttgtccatctatggccataatttttgcagataggacacttttgctgacatttggtacctgcttttctcttgcccttcttattcccctcaaccccacctttgtgccttaaagttttgggcctccctgcagatctcttcaatattggaggataaagaaagaaatcacgtgtattctttggccactgggaaatgtcagttagagctggaatgcgggctgcatatgtggctttaaatctggccacactatagcattcatcaacataatcatgcacctgcacccccctaatagatgtgatgaagcacaaggcatgagcacaaggctttccagacacttgccactctctacatgtacatgtcttctcttcaagatcaactacatgcctcttaccaccttttgtgaaaaatgcaataataagattatgtccatcaacattaataatgggaattgcaggtataaaaattcaatacgacatacaacataacattacctgggtctttatcagtaacctcggcaatgaaatcatcacttctatctaggtcaaagtttagtcctctacttttctcaagaagctccttcatgacacaaggtagaatgatattaccttccaatttggctgccaccttcttcctcacacgaaatttatccatcaccttttttctaatcttatcaaccaattcgtatggcataagacctttatgctttctgatccaattgttgaagcactccgctaaattgttggtgatgtaatcaaccttagagtgcgtggagaactcgcttcgcatccataacctacaaaataagcaaagacaaaatattacattcagcttcagttcacgtactgaaaaaacaagtattcgactaaaaaagataccttttgtggtgggttttcaagtatgctatagcttcagactttacttcacctattaaagccatatgttcatcgaattctgtaggagtccatgcatatgctgctggccataaatgttcctcaaaaactttgccatggaacttgagcttgaaattggacacaaggtgtcgcatgcattccctatgctctgcataaccaaatacctcttcaatagcatagtcaatgccttttcctgcatctgaacaaattgatagtccagctggttcaccaatagcttcatgcagtttctccatgaaccaaagccatgtctcactagtctccgagtcaataataccataggctactgggtacagccaattgtgtccatcaatagcacatgcagttgctagctgacctctatactttcctgtcaagtgtgtactgtcaattgctaagtatggcctacaacctcctaaaaaaccttgaatgcaagggtgtagtgccacaaatagccttgtgaatctcttcttgtccttgaatgtcatatggtcaatggcgactatacttcctggggacctcttctcgatctctgccttccaaccatatagcttgtcaaagctactatcccagtcaccatacaatttactcattgctaattccctcccagaatgtactctcttgtaggggatggttaccttatgtgtgtccttaatcctccttcgcagttccatggccccaacactagcatcctcacgtagccaccccataaccttatcacaaacccacgctctctttgcattcctgaccttctcgctttttctagtactaagaaaaccatggtacatctcatggaccttaatctgaaaaagaaaaaagatgcaattagataagaaaataacaaaatatgcaatgtaacacatacctgcactgctggaccaccatgaatagttgatgcatgaagcctccatccacatccttctttgatacatctagctctgaatctactaggatcagtttttttaacaaaaaactcgaattctttcttaatggaatattgagccacagccaatctaaactcacacattgaaggataaatagtctcaacagtcatgggtgggttctctttgtcatatgcaacttgtgggattactggatctgcctgagcatctcgtgcaatccactcttcatcatcactatcagtgatactcagatcatctcccccttctacctcaggcacattatcagtttcagcaatagagtcatcactctcagatgaagagtcatcactctccgatgaagagtcatcaataccaactgagtattgtttctcatcatctacacctacatgctcatagtgcgggaatggattttctaggtatgcatcacttttggatgcctgactagtgctgccttcctgagtaaaaaatgcctgagaggggactgaaagtgatggagtgcaaggcacaataacttgggacagattaatttggtttcccagagtgattaccactttaccccttttagtatgatgaaagcactcaaacattgctgtcaagtcctgatctttgcatattggaatgagttctttgctactagcatgaatataatgcaaacattcagtttcatttaaagcccatggattttttcacaaatatcacccagaaaatctttgaagttagttacgtctgcatcaataggccatttgaaagaaaaaccacccggaaattcaggcctacatgtcttgcccattattctcacgtcaagtaaataagtagaagatgggtccattctgttgatgaacacatcgtcgatgtgtgagaagaaaaatgtgaaaaatgtaactgctctgactccctaatacaagtatattactcatagggcataagatgaaagacatacccatccggaatccaagatgaatccatcccctcatgttcatgctccccttcactgtgctccaatccatctataattccaccacaatatctcattcacatcagtgtagtgcagattcttcaaatgaagccaaacaaaagaaggaaaatggacccccctgagagggatgggccacctgctgggactattatgccgctgccagtgacctcctcgccggcccctgtgaccaccgtaccggcgcatgcagcccccgcaccaccccttgtgccggccgcttgccacctcctcgcctcccgtcgcctgagagactaccgccgacgcgccgacgcctggagccgccgcgccgtcacctggaagcaccacatcgcagtcgagggccgccacaccgccgactgggagccccgcgccgcctggggccgccgcgccat

SEQ ID NO: 16758 - DNA, 1567 bp, Oryza sativa
cggcgcggagggtccggccgccatcaatggcgccggcgagatttgcgggggcaaatccgcccgtttgaacgcgagagagagagggaaaatggggggaaagggagagggaatcacggggaatgattccccccactttattgcacgcggggacggcgggatgcggcggaatccgcggcggcggcggcgctagggcgcgggggaggcggcgggagcggcgggaggaaggggatgacgggtgggccccacccgtcagcgagggtggcgggcgggcccgcccgtcagcggcgcgcgcgcggggagaggccggatgggccgcggggaagaggagagagggggagggagatgggccggaccggcccaagggagggaaggaggactttttagggtttttctttttataaaacctttttaactttgtttatttcttaacaattattatttgtgctctgaaaattccactaaaatttatttacgcattttaggcttttaggaaatatacaaaaatcctccaagccttatttgacttttaactttgcacattttaattgttggaggctttcacacggattttaattattctaggcttaatttcggggatgtattttagagtcgttttgggacgcgacaagaactgatggagcgcatgataaagctgaaagagcaaggcttgcaaggagaacaaatcactcggcacttcataaaaagtcggttagctccaatcaaagaaagatcccgcatagcttttgaatttgacggcaaacacgatccaaattgtgaagatccggactctcttaactttagggtcatgaagaaaaggatgtacatgatattctcaaatgctatcgtcgccagctattcgcacttgctgccagtcgtgccattcaatgcctttaatcctcctccaccggtaagtaatcaaacacttcaacttttcacaaaatacggtcttatctgtttgttgaatcagttaacaataaaagatatcacgcccaggaatttgctttgatgaagtcggatcccccaatcgctcaacaccaatcacctcaccgccaaactggtcagggaagcggaggaccaagaattcggtctgaaacccaaccaagtgcttctgatccagttggccagtcagattctcgcaagaggaagctggttttaagtgacgacgaaggcgataataccggaaaggagcgaccggaagacctccgaagccaactaatacgaagaagaaaaacaccagtcgtcctgtaccaaaaatcagaaagtcttccaggtacaaatcaaataacaaccttccttgtattaatattctcccatcatgaagataacaccgatggcaaaacttgtaggaaaccatccgacatagatccttctgagaaagactctgacccgactaacatggaagcagactcctcaaaagaaaccgggccgactgcaaaagataccccgagtaataatccgctggccagcgacaatgtaaaacccagcaacgaacacacgaccgcaagccagtcggccgaagctagagtcggagttaaccaggagcccccgactggaaaccagtcggatg

SEQ ID NO: 16759 - DNA, 2303 bp, Oryza sativa
tgaaaaaggcgctcagccaagccacccgcattataaatgtaagctctttggcgcctgatctcaaccatctcgtttgccatttagtccaggcgctaattaaactgtcttgcagaggattcatcttaggaacgaagctaaaacggcaaccttagagaggttagtccctcatctcgggaccctcgaagccaccaggaatcagctgcacgagacaaaagagcttgccaggaagaatgaacatgatctgagggatcggattgctgagctccaggaatccaattttgaactgagcccaactaacttatgttgttatctttgtaatcttgattaaccagagtcaatgtagtgcaagctgccaagatatctcaactagagaagcaaattcaaactctggaaaatgataaggcagaactagcaaaacagagggactcatctttaaaggaggttgaaggtaccaaataatcagtacctcaaaagccattatcttctatatgctgattcgttaatgtgaatctattgatgcagaccgcaagatcaagtcccaggcacagtttgatgtcttagtcgacaagatcaataggcttgaaggggccagggacaaagtcgctaatgccgctactccactcatccaagccatgttcttcaataacgccggtccgagtacacttgatgttgccgaaatcttcgacaagctgagagtcgctccggatacttacttcaagaacatcaaagaagttggaagtatgggagcaagtctggcattggcgatgaccaaatccctttatccaagagttgacattgatgccattgatggctttgcagatgggatgagcgaagaagctgctcttgacctcatcaatgatgcgcaaaaagccgctgacaagattgctgctgacgtggttgagagattccaagatgtcgaccttcggccgactgggtctgataattctgatgatgaaaaaactgatactgattgatataacaatgattttgatgattaatgatgatggaggctcaatttgtacaatactgatgaatttatgccatgcttggtgttccatacttagcttttgatttcttaaaagcctttgtcaagccttattgagcctaaaacccgcaaaagctattaaaaaccttcagtcctcattgactaagtcgaaagaccaaacagggcaatgataaatcaagtaagcaaattgaattgataaaaatcacactccattattatcatagtagccccccgactgaaaacttcaaggaaaaacttgaagttagcagtcaaagaggaaagatacaaacgaaatgcctaagcataaaatcgacgaagatgttcaatattccaagaattattgatgagagtaccatcttcgcgcttgaggcgataagaacctggccgagtgacttcagcaattatgaacggtccttcccataagggagataatttatgccgatcctgtgtggtttgaattttcctcagaaccaggtcgccgactaaaaaggctcgcgatcgaacattccgattatgataacggtccaacccttgcaaataccgagtcgactaaattaaagctgcttcacgggcttcttctagtcgattgatgtcgtctactcggccctcttcataacactcctcgttgaagttccgaaatcgtagtgattcaaattccacttcacttggcaacattgcttctgcaccataaaccaaaaagaacggcgactggccggtagcccgactgggagtagtgcgtaaagaccaaagtacggatggcagctgatctacccacttgccagcatagggacgtagtcggtcgaaaactcgtgcttttatcccttgaagtaccatgccattggcgcgctcaacttgtccattactcatggggtgtgccacagaggcataacaaattttaatgccaaagtcttcacagaagtctttaaatgctccgccagtgaattgagtgccattatcagtgatgatccgattaggaaccccaaaccgatgcacaatgttgatgaaaaaatctctagctttatctgctgtgatcgtgatgaccggtctagcctcaatccacttggagaatttgtcgatagccacaaagagatgcgtgtaaccgcctactgcccttttaaacgggccgaccatgtcaagcccccagaccgcaaacggccaggacaacgggatagtttgcaactcttgggttggcagatgaatttgtctggcaaaaaattgacaaccttcgcatgtccacacaatcttgtcagcatcagacacagctgtaggccagaaaaaaccttgccggtaagctttg

SEQ ID NO: 16760 - DNA, 9408 bp, Oryza sativa
caaaaattttatgagaggttctctccagtcggtttcgatcatgcttacgccttgagtatccatggcttcaattgtttcttttctgggaacggttgattcgtaaagatgttcgacgaacacatcagaaggggctgcctcccgttttgaaccaagattggccagtctgtcggctgcctcattgttatgtcggagaacatgggtgagctcaagtccatcgaatctatcttccaacttgcgtacctcttatcgataagcggtcatattatcatctaaacaggaccactctttcatgacttgattaacaaccaactgagagtctccacagacgattaatcggtgaatgcctagagagatggcaatccttaatccatggagtagcgcctcgtattccgccacgttatgggacgcagaaaaatgtatccacaatacgtagctcaatctttctccagtcagggaaattaaaacaaccccagctccagtgcctgtaagcctcttcgacccatcaaaatgcatagtccaatattccatcttttcctctggcatgtcttcttagcactcagtccactcggcaaggaaatcagctaaagcttgtgacttgatcgaagttcgtggcttgaacgatatatccaaagacatcaattctaaggcccacttcgcaatccgtccgtctgcttcgcggttatgaagtatatccccgagtggaaacgatgtgaccaccgtgaccgagtgattttgaaagtagtgagataatttcttgacggtaatttagacaccatataataacttttgaacctgagaatatcttgccttggagtcggctaaaacctcgctaacgaaataaattggtcgttggactttttgaacatggccttcctcttcacgcttgacaactaggaccatgctcacaacctaggaggtcgccgacacatataacagtagcggctcttgcggatgtggcgaggccaaaactggtggagtggtgataagtttcttgaagtcttcaaaggctttttgtgcttcggatccccactggaaattgtcagtcttcttcagcagcttgaaaaagggcatcccccgctcgccgagtcgtgagatgaaccggctgagcgccgtcatgcaaccagtcagcttttggacgtctttttgggagcttggcgatttcatgttgaggatggcgttgattttctccgggttggcctgtatgcctctttgagataccataaatccgagcaacttccctgacggtactctgaagatgcacttttcagggtttagtatcatcctgaaagcacgaatgcttgcaaaagtttcttctaaatccgcgatcaggtcatccttctgcttggtcttgacgactacatcatcaacataagcttcaacattgcgaccgatctgagttgaaaaacatctttgaatcatgcgttgataggttgctcgtgcgttcttcaatccaaagggcatggtgatgtagcagtaggccccaaatggcgtaataaacgaggtcttcaagcagtcggactctcttagtcggatctgatgatatcccgagtagcagtccaaaaaactgagtaactcgcagccggctattgagtcaaccacctggtcaatgcaaggtaacccaaaagggtcttaaggcaagacttgttgaggttggtgtaatcgacacacatgcgccattgccccgtctttttccgaaccaagactgggttagccagccagtcgggatgaaggacctccttgatgaagcccgctgctaacagcttggttaattcctccttgatcgcatccttcctgtcctgtgcaaaacggcggagtcgttgcttgatgggtttggcgtcttccttaacatgtaaagagtgctcaatcacctctctaggaatacccggcatatcggatggtttccatgcaaagatatctttattattttgaagaaaggtgatgagcgcgctttcctatttacaatctaactcggcgcttattacaacagttttggtaggatcggagggatctagtgaaatcttcttagttttgtcattgccttcttcggtctttgacagcttggtcgcaggcacctctccttcgcttgccgtggtggcagccagtcggatttcttcgcgagcgagagtgatctcgtgggtttgggccatctcgcaactttctttgtcacatgtgacggcttgcttgatgtcgctccgtagtgatatgaccccttgaggaccaggcatcttcatcatcatgtaggtgtagtgtgggacggccatgaatttggctagagccggtcgtccgagtatagcatggtatgctgtcttgaaatcagcaacttcaaaacaaacgttttctgtgcgaaaattctcccgagtgccgaaggtaactagaagagtgatctggccgagtggtatagctgacaatcctgggatgacaccgtggaagggtgcattactcggctttaattccgtgcgaggaatctgcatatcgtccagggtcttagcgaaaaggatgttgagtgcactgccaccatcgatgagagtccgtcggagcttgacattgcgaaccactgggtctagtaccagggggtaccgccccgggtggaccactcggtcgggatgattcgagcggtcgaacttaattgctatctctgatcaccgaaggtattggggcgtgttaggctgaaccgcattgatctcccgttctgttagcttctgctttctcttagattcataagccaggggtccgccgaagatgtgattgagttctttgcgatgatcttgaaaaccagtcgaggcatcgtcttcatcatctttgttcttcgatgtgccttgatctccgtctgagggcaatgtccgcgacggtcagatatcatgcgggatacttaggctagagttcaatgcacgtggttggtgaagattccatatgcaatacgatggaggtattgtgtgtgtatgggatgcggagtcgaatttggaaggagtccaaatttggtatgattggttatgtaaagtttgtttcttgtacgatgaggtttcctatgcggattaggacttctagtatgagtttggtttgtggctttaggctgcctacctcatgtataaatagagagggagcgtgaggcttcccggtagtgctttttagagcaattgagttgatagtttagttagggtttcaagtttagtcaagattttggtaaggactgcggctgttgcactttgtaaacacagagagaagcaataaagttgtcatatactttgagagttcgtcgatttgtgttttatcggattcggtggtctaactagcaactcatcggcggtcagaccggcgacggcttcaggaggcagaggtgattccatggcagtccaaccagacgatcaacaccggtcagaccggtggcacaggcgcagtcagaccgatctacatcgattcgatggtaacttttatttcctcaagaagtttgggtttttgggtataccaaccattcaccccccctctggttggcttagttcttgtgtttcgatcctacaagtcgtatcagagtcttgttttcttctttggattttaaccgatctagagtttttgccatggctaataagtttacaactaagctccatgttttcgatggaacggatttttcttattggtgtagtaagatgcaatcttacattatggttgaggattatgatgtttggagaaaagttgctaatccttatgtgattcctgaacaaattaatactgctgctttaaaaactgagtttgaacaaaaatgcaaagctcgcaatattcttttgactgggatttctcattcggattatgattgtgtttctcatcttcaaaccgccaatgagatttgcaattctttgagaaattttcatcaaggaacaaccaatattaaagaacttcgtcgggatcttttcaagaaggagtacattaaattttagatgaaacctggagaagttttggatgactatctttctaggtttaacaaaatttttagtgatcttagatctgttgattcttcttatgatgttaattacacacaatcagaggtttctcgccactttttgaatggtcttgacatgtctatttgggagatgaaagttaaatctattcaggagtccgttgatatgtctactttgactttggattcggtttacacgaaacttaaaacacataagatgaatgttctttctcgtaaagttgattctaagtcggatgctttggtttcttgttcgacttttttggatgttggtgcttctacatcgaactcttctattcttgctttaattaatgccacgtccgatgatcaactcgaacagttcgaggaggattatttggctttggtttctaacagaattgcttgatctatgaataatgtcaggtataggaaaagaggtgtccaaatcgttgttttgaatttggtgctactgatcatcttcattcgcattgtccaaagcttgggagaggcaagagagatgataatggtggagacaataaggcgatcaaggtggatgaaaacaacaagaaggagaagaagaaaagtcgcaagcaaaggctaattcaagaactcatagaagctttggattctgatgagtcataagatgaggacaagagcaaaggtaaggaggttgttgatctagcttttattgctcgtaatgcaaattctgatgtggatgaatctgatagtgatagtgaagaaaagcttagttatgaacaattagaacatgctgcttttaaatttgctgagaaacttaaaacattttctattaatactttgcgagatgtcaattctattaattgcaagaaattggaatatgagattgaaaaatctaaaaatttgaagtcttcttttgctcttggatttgctttgcatgctcgtgttattgatgaattggtttcgacaaagaacgttttgacaaaatacaaagttgctttaagtgcaagttctttgttcaatgttttatgtgcaaaaagggctaaacaaaacaaagattttttgatttctcaaagttgttcaaattgttttttgaatgagatgaaattgaaatatgctttaggatgtgttgagcatatagaaaacattgtgaaaaccaatgaagtgctttcttgccccaaatgtcgtaaaagcaaaggtatcatggtagattgtgaaaattgtgctaatttgaaaaatgaggtttcttatttgaaaagttctttgcaaagattttctgatggtaagaaacaacttgacatgattttagatcagtctaaagtgactagttacaataggggtgttggttttgatgttcgtgactatttcaccaaaaatcaacccaatgttttgagtataacagaatgcagagaaattttgacaaaaccaagtgcaaagaaaacaatttttaaatctggtggaattttgccttctctttttgcaactttaaaagaaacaaaaataaatatttcaaaaccatctacttcacaaacttgtcgtgagaagtatatttgtactttttgttgaaaagatggacatttggttggtttttgttttcgtcttgcccgtaaacagaaaaaggaaagagaaattgcttttgcgaaacgacgatggcaaaaattgggttttggttcgaggagcacagccagaccgacactggccagtcggtcagaccggctagcggtcagactggcctcgtggtgattttgcacaaaattcagatcggacttttgtggagcgacaaggtaattatttaggtaagtctggttctgattttattagtgcatatgtacctactggttctactggttgtgtgactcagtgttggattccaaaatttcttatttctaatcccaacacagaggcctcgacatcttcttgtttgtaggtattttggtggcatactccccatgagtgttcagtgttgagatgacaattgcttttcaaaataacatcaatttatttttgaattgacataattccgttctactctctcgtttattagcttttcatatgctagagtttgaggtagttgttttggttaatataagtggatatatgtcaattcataagaattttggtgatatcattggcaattggatgtctttttcaaaatctttgatttcttttttatttttcttgggggagaattgaggttattttgagggggagttagtgctttttaataaagccttttggcatgatttgagggggagttttgtacctcatggttttaacaagcaaaaatatgacaataagaaaaattgagaaaagagatatttgttttatacatatggtattttcttgtgcatgctagcaatactatgaaggtttatttgtctctagaagcttgtatgtattctagtctttttatgagacttagatttttcttttaagggagataatgcatgacacttaaattctatacttgaattaagaaaatatgcaatattgatgctagcatatgatttgatttataaatgctttatatatatgctttattgaattgttatttctcaaatagctttgtaattgctctttgtgcaaagagaataaaaaatatctatgagagaaaaaaatgaatactgaatccttggaaactgaaaggaccttgatgtcgcctagagaggggtaataggcgttcctaaaaattatcacaacttcatagcatattagagagatgagaactttcggttcaaataggaacttccggtatgggattggaagttcttgtctcaaccgaaaggttcagcggataacggaataaaacactagctatgaacttgtagctcgaataaagaaaatgtatatgaatcaaaaggtgacaaataaggtatttaagcaagatataaggtcactaactatattaattaagcatgcaagtagatcgggtaaaaacaaactcaagcacaatataggagatggcaagaacgagcaaccaagagaggagacacgttgatttgtttcccgaagttcggatctacggatcctacgtctccgttgaggggccacaagggccgggtctatttcaaccctttactcacgaggttgcacaaatgcactcctcggtttcactcttgatttcttcccttgcggaggcgaaatcgaagccttcacaaactttccgtggcacaccacaagcttgggtgctcaccggcgacgcctagccatccaggagaccttagtccccaagagtaacaaacacaatcaaagatttgcttgctatgaactcgagtgctcaaagtatgaagtgaaactcacaagctctcaacttctcaatctctcaatcgaactctcttcccttcacaaattcctctcacaaagaggcaccacaaaggatggagtgaagctcactagctctcaactcctcactctctcaatccaactctctttccttctcaaatccccctcacaaagtggcaccacaaaggatgggaaatggagatggctatttggctttggatgtgtctaatgttgcccaagaatagcaaccactcaaaggagagatggaggagtttacatacccaagcccctaaaaaactagccgttagaggccaagactgtaatttttggaagttccgaaaagcattttcggatatgtctgaaaatttacagaagccaatctcagatttgcacccatttttggaatttctgaaatttttggagttttccaaaaaattttcggagttttcgataatttttcggaatttccgaaaagcacagagtaaaacgactataactttttgctcgggagtccgttttttctgatcttggactctatggaaagctcacttagaggactacccaactcaaccaagaataaggtctaaaaccactcaaaggattggttaaagcttaggtttctctcaaggtaccaatctgataggtcactttgagcaccgagacatacacaaacgcatcgacgttgcatccctcttaatagtacggcattcctatactcaaatgtaaataggaagataattataccaataggaatgccttctttccatttccttcctttgtcataagggatgccaacgccaaaaccgtttcaccgtatattcttcaaatgattgatgcggttacttatagcttcaaatagtctcgcacggtccatcatgacaaagctgtcactcgcccttcaccaccggatttggttcttcggcgccaagccccttgcttgcccttcacctccgcatggtccatcgcgaccgagcatcgcttgcccttcaccgttttgccatagtagccacttcgtatcccacatcttcaatatctccactttggcatcaacacctttgcaatccttgggacctatttctctcattcaactcaataaaattattagtcccaatgatccagttgtcaacctccacatgttgaccaaccgattgcatctataaaaggatatgaataaatgatgagtattaatcaacaccttaagtgccatatactcaattatatgctcacatgtaaagatctcaattaaataaaagtgaataacttggatcaagtacatgcataaccaaggtataggatttgctccccctaaatgtatgcatacaaaatatttttgtgagaaacaaatgtatgcataattagagataaaagattgtgaacttaccctatacaagaatagaagttattgatcatatgtgtacactaagatagaagcataccttcatcatctccatgttctcaatgtgaaaagagactaaacaagaaatggctcaaacaaaacattagtctcacatgcttatgtaatcacatgaaaatattatatatgaatatatcaatatgagcacggagagaaagaatgacatatatagcttgatctccatgcatttcatccttctgatttcggtacatgtcacgaccggaattaacccaacgggcgttccttacgtgcgtgtattattccttgtcccaggaggcaaggtacaccaaaagttgatacatttcagagtttatcaagcggaagcgtaaatagttaatttattacatgggcggcgaaggcccagcacacacaaagacaaacgagaaacagcggaagactagggcgactaccacaggcgcttgacggcaggcacgagctagacaccaaagccttcatcttccaggggctcctcttctgggtttgggaaaaattgagcaagactgagtacaaccaccgtactcaacaagacacacccacaagtgcaggataaatgcaagggagtacaagggggttataatataaagggttagggtttgcagtaaacagcattaaaagacacttagttgctcaaagctattttgtaaacacgattccagagctataccatattattaatcaaggccgtgaacccacacgaacctgccttaacccaaggcctacgatgatttagaccgaattggcaacccgaccctgggtcccagctcgtcccaagccaacccaggccaaccat

SEQ ID NO: 16761 - DNA, 6541 bp, Oryza sativa
cggctattcgaatagattatactctgatcagaagtgtacatctttacccacaagacacatcttcctcacgtgtaactacgtgccacataccaccacggtatacggacggaagatgtgacatagtttccaacccatcctagccatagacaagagtaccgacccaaccccacctacggccggaacccccgggacaggtaggcaggactgagcccctagcagcaggacaccggccctgtgccatgacatctcgactaccgggccgcagctcgtgtagccttcatttgtcctagagatgtccatcgacccctgacttcgtccatctccatccgtgtacttttgtttataaccagactgagccacaaactaagccttacccactagacatgtggaagtacggtagtgctttgcaacagaggcccgaagaccggtccttatatggccgaggtgctactatcaaaaccatgcaccccgagcccagcctaaaaccattttggggattttgaatagagggggaagtgtgaatccaattccacaataatccatccattccaaagtgtccaggtgatgagaatattcccaaagtctagagttgtaaaaccacctaatgttgcctaattaaccagcgaagcatctacctaaaatcatactagtggtaccatgagtagagtgtccactagttggggttttgtttattctagggtgaacaaggaaataataacaataacaataataaggtcataacaaaggtaaataggcatggctagataaaacagtgataacgcgggaatttaaataaagcgataatgcaataatttaaatcaaaataattttataaactgggattcaatatgttcaaggatgatgtgacttgccttgctcgctttcccaaacgtcggcttcaacttccacgaagagcggatcttccgaagctgcagcgtctacacgaccaacggaaaagaaaaaggcttttactctaataaactccatataacaagcaggaacatagcacaaaaatgggttcttgacttcttaaggaaaaattagagacttgaacggtccaattccgagttcaaatggccaagttatggccatttgaagtttatatgctctttaaatgaatatttgcgaatttcttcatttaaattttaattaaaaaaaagatttattgcgtcagccgaggggagggggtgcgcggaccgggtccacgggggtggggcccacgcggcagccccacggtccacggtggaccgggcgcacccgggctcacaccggccggcgccgtgggtcccacgcgtcagccgcacccgagggcgcgggcggctgacggccgggccccacacggcagccgcagggtgcgcccgaaggcggccacgccggcgcagcggcgggaggcggcgcgcccgcgcccctatggtcgccggcggcggccataggcacggcggagcggcggccgagagaggggagggaaagggggaaacgaagcggcggtccacggctcaccccgggtcgacggcgacgacggaaaaggcgaccggagcggagaaaggcggcggcgcggctcgggtggacggggacgacggcgttccggcggtcggcgggcgaaacgaaggggtggacgaggtcggcgaggatgcggtgaagccgaaggaggcggcgccgaggcgggaggtggttcggggcgacgacggcggcggaccggagctcgacggcgacggcggagagagagagcgacggcacgagctcgattccgtcgaggagaaagggcggcgagtggcggaaacggtggtggggagctcggggagggtttatatagggttgggagtgagagagggcggccggagaaggggaaaatgggcgcggaagacccgcccgccattaatggctgtcacgcccggaaattcactagtaatttccgaactgatttgtgcataaaatcctcgtccaggaatcagccgaggtacacaaactgacaatttaatatacaaatccatcataataactaaactgataaatacttacttaagaggcacttagtcctcaccaagaagaaaaactgcagcggaaaataaaatctagcgaagctccggctccactcccacaggcagctcaactggggtataagccaaacgtcttctccttctggatcctttttcttcaactgaggttgattgattattgcaaaaatgagcatatgacatactcaacaagccacacagcaaatatgcaagtgcacaaggattccaaaggatggcataatataggctcatttgcaaaagcagcatttagcaaagagttaagagtagtaaaacagtagagtaattaattaaaaattttaatcaacactgaacagcacacccatgctgtacaggcccaaccatcctgaacaaccatacccggctgtacagatctaactccaaaccaggagctaagcaaattattatcaggtattaacatccataattattgtgagaggtgtgagactaatcacgaaaaacattgctcaacccgcccataaccgcgggcacggctattcgaatagttttactctggccagaggtgtaccactgtacccacaagacacaaccccacatcatgtcaccatgtgcctcaataccaccacggtacctcggaaaggagttgtgacaataccccttgcacaacataacccattacagcgcacctttcctggatcataatcaccccctcaaaaaccagaggcatggactccccagctacccccgtggacttctcgccacttctcagtctggcgcactataatgaatcacgctacacaaaagataaagccgttgcccacgctggcttgtggttggcacgataaatgtttcacaacagtagctcgcgaaccggtccttaattgtcatgagcacgactctcaaaaccatgtgctcacaacccaccattatcaagttttagttggcaagtaattaattaaccaatcacgattaaccatcgtgaactatcattaagccatccttaaataatagtgagtcataagttatcccaatagtgtgctaatgtttctaagcatggctaagcaatcataactaatatctagctgaaccaatatataaagcccaactagtcaagttataataacccaaggtatcaaggaataaagtaatcaatgcaaattggccataacaaaggaataagttcacaccacccggtgacattcgaaaataaatgcacagttgaaataaatagagaatttaaatataggatcaacatgctcaaaggattgtgtttaggatctgtgtgacttgccttgcaataatcggtcttcaagtaatcttcttgatcacttccgacgcactcacgaaccttcgcaacgacggaaacgacaagctaacacgcaaaacgaagaaaaagactaataaaaaccaaataaacagtacatataaagtaaacaaacatgtagatcatgattttagatgaatttagcaacttgaaccactcaaaaccgagttacgatgatttagttatgaatttccgaagatttaatctattagaaaaaactggaaaaggagaagatgatgacgtcatgatgacatcatcaatggccggaccaagatggcgacctcgccggagatagagcgaccggctgcggatttggaggacatgaacacgtagaggacgacgagacgaacccaaagatactcaccctcgtgccaaacgacgaccgacgacggccggcgacgaggaggcgacggcggcggctcgggttgcacggggcggcggagctccgatgaccggcgacggaaaaggaagggtggccgagcttcccctcaccacggcgcacccaacggtggtgacggcgaccggcgacgacgatggagacggcggcgcggcggcaccggagatggccggcggcggcggtttgcttggcggcggtggcgacgggactccggtgaccggcgacagcggggagagagcggccgggcttctccaccctctcgcgcacctaacggtggtgacggagctacggagcacggaagaggacgggagagggggcaaacgaaagaggaggactagggggtcctatttatagccttggattgaagagatcggactcctcccgcaagaaatcgatccgggaaatcaaaaactcggttttggagataaactcaaaaacgagttcgattcggataaaatactcaacgatttgctccgatttttggggtaaagatagaggaggataagaggaatatttcccctcaactaaattggaaaaaggagcaacggggaggcgagatttaacggaggaagcggcggctgcacagggcacagcacgggcggctcggctctgtccagagctggaagatgaacagtgccagggagggaaagtagactttctgctgggcttctacttccaaagactgattaaaggagggacaaaaagcagacttcgggaaagagaggaaaaggaatgcaggctgagaggagactgggccgagagtgagaggacttttcctaattcggcccgaaaaggaaaaggtgaattttaaatacttttccaattaaattaatcactgaaatgatctttgaattgttaaaaatacttcctatgctcaaataattccaagaaaaatcttgaaaatacttggacactcaaagtacttaacaaaattataattagaccatttaatgattaatttaatatgtgggtaattactgaaatgctctttgtaagattaaaaattaggaattgagctccgaaaaatccgagaatattccagagagtataattaaccatggagaatttaataaaaattaaatccatccatgctttatatttaggaaattttatttcccacatttaacttcacttgtaaattaaagaacatttaatataaattctattattaatttattaaataatttataaatcctgaaacgaaaatcaggatgtgacaaatctaccccccttacaaagaatctcgtcccgagattcggaacggctagaaagaaaagggcataggtaaactgcagtctatcttattccataactccgataattattctatggttttaaagaaagctactgctgctttggaactgatggctgagctgtatcccttgagacgcaaccggcactgcatttgctcctgtgaggacaatgttgttgacttggccttgtggctgttgacgcttcggcttcggacactcttttacgaagtgacctggctcataacaattgaaacacacccgatgctcccttccattactgttatcttcttgagactgatcctgctgaaatgacactgattgagtagcttgctcatcattgtcttcattgcttgcattagtctctgagttgatctcaccactgatgcccaactgttgtgactgttcttgacctgcagaaaaagattcaccaatttggagtggcttgatacgctgcctctggctactatcctgtgcctcctggaatacaatcattttccttttacggttatccatcctgttcttcttgtcttcaagtcgaattgctttgtcaaccaactcctgaaaatcctcatagtcatgagagatcaacataactgacagctcatcctttaagccttccaaaaacttctcctgcctttcctcgtcagtacgcacatcttctagagcatagcgagctagacgattgaactcatgaagatattccgtcacggtacgatccttttgcttaagtgcccggaactcacgcttcttcaaagcaacaacacctgcaggtatgtgtgtcttcttgaatccttcgataaactcttcccaagtgattggttgtccttctgctctgttcatccggaaatgatcccaccattctgatgcagattagaaaaggtagaaggagaggggttacactaaagacaagaccttaaccaggttaacactgatctgatgtgtgtagaccattatattgttcaagttgattaagcaagcaacctagtatagttacacactcatcaatgaactactccaatgatgggaatgcaaccatacctacacacaaagcaaacaacaagcgttctaccctactaactattcctcaaagacactttggcggcataggttctaagataggttccaaacttcactctatctgaacacttaagattcgactatcatcttattattcctcgatccacttgacttgcagaagttgacaacatcgacgtcttcgagtttctccatcaagattaacgactactcaagttgaaagaggaagggggaagaacgacaaaacgatttgcaaagaattctagataaggaagaaaggaaaattttcacaaattatgttttcggaaaattagtccttaaggtttgaccatttggcttatcctacagtcaagatggctctgataccaacttgtcacgcccggaaattcactagtaatttccgaactgatttgtgcataaaatcctcgtccaggaatcagccgaggtacacaaactgacaatttaatatacaaatccatcataataactaaactgataaatacttacttaagaggcacttagtcctcaccaagaagaa

SEQ ID NO: 16762 - DNA, 861 bp, Oryza sativa
tagattaactctgatcaaaggtgtacatctttacccacaagacacatgttcctcacgtgtaaccacgtgccacataccacccgggtatacggacgaaagacgtgacatagttcccaacccatcctagccataaacaagagtaccgacccaaccccacctacggccggaacccccgggacaggtaggcaggactgagcccccagcagcaggacaccggccctgtgccatgacatctcgactaccgggccgcagctcgtgtagccttcatttgtcctagagatgtccatcgacctccgacttcgtccatctccatccgtgtacttttgtttataaccagactgagccacaaactaagccttacccactagacatgtggaagtacggtagtgctttgcaacagaggcccgagcttaatccttatattggccggggtgctacttcccacaactggcatgcacccaaaccccaccggaaaacaggttttaggggttttgaaagaggaagagaggggtatgtccaattccaccataagccaaccattccatagtgtccaaatgatatgagaattcccaaagtctaaagttataaaaaccacctaatgttgcctaattaatcagcgaagcatctacctaaattcatactagtggaaccatgaatagagtacccactagttggggttttgtttatcctagggtgaacaacgtaatagtaacaataacaacaatgataaggtcataacaaaggtaaataggcatggctagataaaacagtgataaggggataatttaaataaagcgataatgcattaatttaaatcaaaataattttataaactgggattcaatatgctcaaggatgatg

SEQ ID NO: 16763 - DNA, 5030 bp, Oryza sativa
atttttcttgtacgtattttagtgtgtgccaatttctggtcgaattttaattattctattattcctcttaaaagatgatttttatttcgggatgtatttatcaggacgtgacaaatccaccccccttacaagaatctcgtccccgagattcgaggaggctagcaagaagataggttgggcggtcttctcttcttgtctgacttcttccgttgcgtcttgacaaacttccagcaaatctttacctttcggaactgcttggcttgacctcctgttgcggatggaatcttctcttcacctgacttggtccagggtgcaccttttggctgactcagactaggttgcggtagttcagtaatgcttccgttccagaacttctcatgattcatatcttcggagtcaacctcggacaagttatcaacttcatgtcatgcgtcgtaacctgcttgtcattactaggataccatgcttgttatttgcttctaactcgccaccaactgcctcatattagcttccctggtctccgggtgatagctacttcctgctagttgatgcaagggtcgataactttacctttgaattatgcttcccaagagagccaacttatcctacttgttatactttgacgtcttcccaaatggctttactgctggatttgttattgtctaatcattaccctgtcaaatctgaggcttcgttgtgagaggtgattttaatctgacctctatagactatcttcgaacgtatcactggttctataactgggaatggctctcacgaacaagcagctcggattcactttctttacattcagtttacttcccattattatcttcaggttatcctcagttagcattcaacgtattcctttacacttttaaccttgatgtgttctttcccattggatcatctcccaagacttggcattacctggtaaccggtgcttgcacttttcacttcgtgtagcatctgataccgagttgaagatttcactccttgccttcatagaaacacttttacctaggtcatcttgcttacttaatgacaaggtgactgttgcggggcaattacaatcaggggtcttccttgagcgatgcagagcatgtttctgtttatcaatcacctttcggcctacttcttttatgctagagaacatctttgccaatttcttttatcaatcatctttcggcttatctctaacaggtggtattctttaatgtggattgcggacgcttctggggatgatgaggtcctttggcttgctgcctttcggtgaaaccttgatgtggttcgtcaaaagctgcactgactaccttcagggaaatacattgcctgctatctgtatctataccactagggtttaattgccgatggtcatctttagtgcttcctcgagatggggagcatccaaattgttcttctgccacatcacctttgacctttttctgataccagataaactaattaccaaccatcgactattatgttcttcaaacattgatgtctcctggatctccttaactgttggcaggtatatccgatcttatcaatgtagaggcatggcgggtacccttaggggtttcatccaacaatccttatcttgatctgtaaaaggcgtatcccaactcctatcctcaactactgtctcgttggctttttaacccaacccagtttaattggttttcttttccatcaacaggttggttattaactcgaggttggaacatagttcctctgaaatgagaccctaggtctcctatgtcagtaaacaattatacacatgatcacatatccgcatcttccaaaagaatcctcttaggacttgtttttattacaaatttctcccatattacatgaatacaaggcactgccttaaacaaaaagggacggtgcttaacatcggtacattgtatcctcaacatgaatcatccctaagcatagcaagctcactgtttatagacatgaatgtatttctgtattacatgattgctgccaactttcgattacaccatgataagtagcggactgaaaaccacaaacatggctgctcattttgattctggagagatatagctggcattgttccagtgactgcatcctcgattggttctgtgatgatgtgataggactgcataatgctatcattcacaggagaagcttccttctgattgctggttgaagcggatgacggtcttctgcttggtatcgccctccggatgttgattgcccttggctcggcctggagtaggtcggggagagacacaacttcttccatctacgacaattctttgctgaggctgtcggtgcagagaatggttgctatgatttattgccgagtcaggtgcagcaggaggagcattggtgcattgtttctgctatgggttatgattaacacgaggcctcacgggtatggcgtttgctccagtgaccacaaggccgagtgacttgtcttcttcttgcataatggccggagtgatgacgcaggttacgcttcggctgtggacaatctctggagaaatgacctggttctttgcagttgtaacaaatcaacgtcttctttgctgagttgtccgtctgggaacgatcgttctgactaggagttggaattggtggttggaaatccttgctaacattggcatcagtggtgccattattgctatcaccattggagtctttctcagagtcaaaattgctagggttgtcattctgggtgccttcattgatactatcgtcgatatcttggtgaatgatgttgacattgcacgcttgatctaagtggtcatgaatggggcaagaaccatggttgttggtggtatcatcatcattagtattgctagtgttgttgtctgcattgcgtccgtcttcttggggcaggaactcttgatgcacaacagaagatccggtgatctgaagtggctcagtgcgctgtctttggttaccacatggaattactgggatgttgacaatccttctcttgcagttcgtcatccgattatgctcactttcgagttgcacggctttgtccacaagtttctcaaaatcttcataatcctctaggagtagttgcactgcaagctcatcttttaacccctggagaaacttctcttgtttgtcttcatccgtttccacatcttctggtgcatagcgagccaaacgatagaactcgtgcaggtactctgtgacggtcaaatctccttgcttcaggtagcgaaactctcgttttcttagtgtgaccattcctgcgggaacatgtgatctcttgaatacagatgaaaactcgttccaggtgatagtatgtccttctggccgtgatgcttcgtagctatcccaccactctgaagccggtccaaccaactgatgagttgcgaagccaacccgctcctggtcggtgcactgaatcaaccctagcttcttctcgactgtgcgcaaccaatcactggcttccataggatcgacggcaatggcaaaggttggaggctcagttttgagaaattctgataacttgcactgttgctggactgtaggtacttgaacgttggttgcccctgctgggttgttccaattctgtaatagttgaaaggctgttgccaacatgttggtttggttaaccacaatttggattagctctggtgaggttttgttgatgcttttctcattcccattggcttgggttcttgagtcatcggatccatcattcccatagcctttgttaccagtgttatccatctgtcacaaggtagaggttgagaggggaagcatacaaggaaagaatagaccagaactagggacaagaccttaaaggaactaactctttttgttgatgtgttgtttgtttcacttattctgcaggttgattaagcaaacaacctagcatggtcacatcacaacccaccgatgcagaccacgcactacacacacaagcaaggaaacacacgactaacaacactatcctagaggacggcttaggttctgcgactggttctccaagatcttcactcctgcttcacagctggcttcattgcttccttcgcttcgctagcggaccctgcggtcttccggagcttcggcagacaattggcgacatcttcttcttcgcaaaactaaccatctagtactggttgaaatttgaagaaggaagaaagagtaaatattttgcaaatagcacaggggaaaggaggaaaaagggcctttcggaaatagtttcatttataaaatatgtccttaggttttatccacttggcttatcctacagtcgagatggctctgataccagcttgtcgcgaccgagaaaattgccttttcccgaacgctagtgtattaatccccgtcccaggaaaagccggggtacaccacacaaacatgatacaaaaggcacatctttattatatcgataatatttacattattacaaaggcacttaaggcctgacaatcaaaaataaacagcagcggactagcgggcctacggctccatcttcacaggcgctcaactggggtataagccaggactccacctaagacttcttctccaaagcttctcttactgaaggggggggaaaagattaagcaagaatgagtacaaccacagtactcagcaagccacaccggagatgcataattaatgcaagggggtacaaggggataataatataggggttaagttttgcagtaaacagcatttaaaagtcacttagttgcccaaagctattttgtaaagacgatcctagagctacacagtattattaatcaaggccgtgaacccacacgaacctgccttaacccaaggcctacgatgattcagaccgaactggcaacccgaccctgggtcccagctcgtcccaagccaacccaggccaaccattccacattttagttgttaagcaggttttaagaattaaaacactaacttgggtacattgctcggcttgcccataaccgagggcgcggctattcgaatagattatactctgatcagaggtgtacatctttacccacaagacacatcttcctcacgtgtaaccacgtgccacatac

SEQ ID NO: 16764 - DNA, 3836 bp, Oryza sativa
acttgcactgttgctggactgtaggcacttgaacgttggttgcccctgctgggctgctccaattctgtaatagttgaaaggctgttgccaacatgttggtttggttaaccacaacttggattagctctggtgaggtttcgttgatgcttttctcattcccattggcttgggttcttgagtcatcggatccatcattcccatagcctttgtgtcacgtcccaaatcgactctaaaatctgtcctcgaaattgtgcaaaagaataagtaaaattcatgtgaaagcctccaacaattaaaatgtgcaaagataaaagtcaaatgaggcttgtaggatttttgtatatttcctaaaagcctaaaatgcttaaataagttttagtggaattttcagagcacaaataataattgaaaagaaataaacaaagtggaaaaggtttataaaaagaaaatcctaaaagaagttcttttccccccccttccctcttgggccggctcggcccacttctccctccctctctctctctcttctcccgcggcccatcggcttcccgcgcgcgcgcgcgccgctgacaggcgggcccgcccgccactctcgctgacgggtggggcccacctgtcatcgcctttctcccgccgcgcccgccgccgcgtccgtgccctagcgccgccgccgccgcggattgtgccgcatcccgccgtccccgcgcgcattaaagagaggggaatcactccccgtgattccctctcccgttttccccgatttcccctctctctctccctcggattcgttcgaatcgtgcccgcattcgtcgccggcgccatcaatggcggccgaaatccccgcggccggtttccttcctcctcggccgccctctctccctcccgttgctataaaatcgtccctcgtgctccgctcttccgtttccaccgctcgccgctcgctctcgccgtcggattcgtgctcgcgccgtgctccgctctctccgccatcgccgccgagctccgttccgccgccgccgccgctccggacttcctccttactcggcgacacctccgtccgcttcgccgtgtcgccgtcaacctcgtccgcgcctccgtttcgctcgtcgaccgtcggagcgccgccgtcatcgtcatcccgagccgcgccgccgtcttcctccgctccgtccgccgtttccgccgccttcgctgtctcggggtgagccgtggaccgtccccttcgtttcccccttccctcctctctctcgggtgccgctccgccgcgccggtggtcgccggcggcgaccatcggggcgcgggtgcgcgtccccctcccgtcggccgtgccggcgaggccgccttcgggcgtgccctcgcggctgccaagtgggcccggccgtcagccgcccgcgcccgcgggtgcggctgacgcgcgggacccacggcgccgaccgccgccagccgcgtgcgcccggtccaccgtggaccgtggggctgacgcgtgggccccacttcccgtggacccggtccgcgcgcccgctccctcggctgacgcaataaataggatttttaattgaaaattaaatgaagaaattcgcaaatatccatttaaagagcatataaacttcaaatggccatatcttggccatttgaactcggaattggaccgttcaagtctctaatttttccttaagatgtaaagaacccatttttgtgctttgtttctgctgttatgtggagttatttagtgttaaagcctttttcttttccgttggtcgtgtagacgctgcagcttcggaagatccgctcttcgtggaagtcgaagccgtcgattgggaaaacgagcaaggcaagacacatcatcttgatcatattgaatcccagtttataaaattatgttgatttaaattattgcattatcgctttatttaaattcccgcgttatcactgttttatttagccatgcctatttacctttgttatgaccttattattattggtattgatattaataccttgttcaccctagattaaacaaaaccccatctagtggacactctatttatggttccactagtatgaatttaggtagatgcttcgctgattcattaggcaacattaggtggttttataattttagactttgggaattctcatatcatttggacactttggaatggttggcttatgttggaattggacacacacctctcttcctctttcaaaacccctaaaacctgttttcggtggggtttgggtgcatgccagttgcgggaagtagcaccccggccactataaggattaagctcgggcctctgttgcaaagcactaccgtacttccacatgtctaatgggtaaggcttagtttgtggctcagtctagtcataaacaaaagtacacggattggagatggatgaagtcgggcgtcgatggacattctccagggcaaatgaaggctacacgagctgcggcccggtagtcgagatgtcatacggcagagggttggtgcccaatgctaggggctcagttctgcctgcctgtcccgggtatcccggccgtaggtaggattgggtcggtactcttgtctaaggctaggatgggttggaaactatgtcacgtcttccgtccgtataccgtggtggtatgtggcacgtggcaacacgtgaggaagatgtgtcttgtgggtaaagatgtacacctctgatcagagtaaatctattcgaatagccgcgccctcggttatgggcaagcctagcaatgtacccaagtcagtgttttaattcttaaaatttgctcaacaactaaaatgtggaatggttggcctgggttggcttgggacgagctgggacccagggtcgggttgccagttcggtccgaatcatcgtaggccttgggttaaggcaggttcgtgagggttcacggccttgtttaataatactgtgtagctctaggatcgtctttacaaagtagctttgagcaactaagtgacttttaaatgctgtttactgcaaaacttaatccctatattataattcctttgtactcccttgcatttattatgcattcgtgggtgtgccttgttgagtacggtggttgtactcagtcttgctcaatttttcccaagcccagatgaggagttcctggaagatgaaggcttcggtgtctagctcgtgcctgccgtcaagcgcctgtggtcgtcgccctagtcttccgctgtttttcgttgtctttgagtgtgttgggccttcgttgcccatgtaataattctatttacgcttccgcttgttaaactctgaattgtatcaacttttggtgtaccttgcctcctgggacaaggaataatgcacgcacgtcaggaacgcctgttgggtgatttccggtcgtgacactttgttaccagtattatccatctgtcgcaaggtagaggttgagagggaaagcatacaaggaaagaatagaccagaactagggacaagaccttaaaggaactaactcttcttattgatgtgttgtttgtttcacttattctgcaagttgattaagcaaacaacctagcatggttacatcaccacccaccgatgcaaaccacgcgctacacacacaagcaaggaaacacacgacaaacgaaacactagagggtggcttaggttctgcgacgggttctccaagatcttcgctcctgcttcacagctggcttcactgcttccttcgcttcgctagcggatcctgcagtcttccggagcttcggcaaacaactgacgatatctttttcttcacaaatctgaccaactagtactaattgaaatttgaagaaggaagaaaagagtaaaccttttgcaaatagcattagggga

SEQ ID NO: 16765 - DNA, 3738 bp, Oryza sativa
agacagtataatctggagcgagggtaatctggtcattctggtaaaaattaaaattctaacggcgtggactaaacggtaagtttactgtgatggcattttagggagaaaaacgcttgtacgatggcattttgaggaagttgcgtttgtcaatggcatttctgggattagagtgcttgtcaatggcatttcatggattttctcttaaagatttatgtgaggacttcggcatcaaaatttattatgccttcgtagcgcaccccatgagcaatggacaagtcgaacgtgccaatggtatggtacttcaaggaataaaagcacgggttttcgaccgactgcatccctatgccggcaagtgggtagaacagctgccatctgtactttggtccctacgcaccactcccagtcgggccacgggccagtcgccgtttttcctagtttatggagcggaagcaatatttgccagtgaggtggaatttgaatccctacgtttttgcaacttcagcgaggagcgctacggagaagaccgagtagatgatctcaaccgactggaagaagcccgtgaagcagctttaattcagtcggctcagtacttgcaaggcatgcgccgttatcataatcgtaatgttcaatcacgagcttttttagtcggcgacctggttctgagaaaaattcagactacacgggatcggcacaagttatctcccttataggaaggaccattcataatttccgaagtcactcggccaggttcttaccgactcaagcgtgaagatggtactcatattgacaactcttggaatattgaacatcttcgtcatttttatgcttaggcattacgtttgtatttccctctttgactgctaacatcaagtttttccttgaagttatcagtcgggggctactacaataataatggagtgtgatttttatcaattcaatttgcttacttgatttatcattgccttgcttgatttcttggcttagtcaatgaggactgaaagttttttaataatttttgcgggttttaggctcaataagttttgacaaaagcttttaagaaatcaggagctaagtttggaatatcaagcacaacataaattcatcagtattgtacaagttgtgcctccatcatcatcatcattgttatgatacaaacatcaatcagtatcagttttttcatcatcggaattagtagatccagtcggccggaggtcgttgtcctggaatctttcaactacatcaacggctatcttatcggcggctttctgcgcatcgttgatgaggtcaagggcggcttcttcgctcgtcccgtctgcaaagccatcaacggcgtcaatgtcaatcttcgggtacaaagacttggtcattgccaatgctaggctcgctcccatacttccagcttccttgatattcttgaaatatgtatccggagcaattctcagcttgtcaaagatttcggaagcgtcaaatgtactcggaccattgttattgaagaacatcgcttggacaagtagtgtagcgacgttggcaacttcatctctagcttcctcaagccttttaattttgttgaccaagacatcaaattgagcctgagatttgatcttgcgatctacataaatagatttatatcaatgagtgggcataaagaaaggaatggtttttaaagtataggttacccgcaccttcaacatatttcagagccgaatccctttgtcttgccaactcggccttgtcattctctagagcttgtatctgcttttccagttcggatatcttggcggcttgcactgcattgcttcttgttggttgatatcacatggatggcagcataagtaagttagacaaagattgtatttaccttttgacgaactgctcatctcaaagttggagtcttgaagctcggcgatccggtccctcagatcatgctcagttttcctggcaagctccttagtttcgtgcagctggtttctagtggcctcaagggttccaagatgaggaactaacttctcaagagtcgtagtcttcgcctcgttcctgagatggattctctgcaatgcgaatttatcggcatttgagcaaagtggctaataggttgattgaagctgtgtataaggaggcttacatttacgaggcgagtagcttggccgagtgcctttttcagcaggcatacttcctcatcttccttttgcttgtttatcacaattccctgaggttgcatgtcgtcatcccaccacttgactaaaatgggtgggcgagaatgctcagctgactgtatctggaggacttcttcttcgtcaccgatcattgggcattaggcattcatgaataaaggtgaaacaattgaagaaagtctgtcagatcaaaacgggttcggaggatgtgtttacctgtaatgatttccggtcggggacgagcaggcccttgtactttaacaggagagctggaccttggatcggcgctggcatcctttttaggagggctgtcagcttgagcttctacatcaggaatatctttatttggttctgtacccgactagtttccagtcgggggctcctgattagcaccaattccagcttcgaccgactggttcccagtcgggggctcgttgctgggttctacattgtcggttgccggttgtttgtcacttgggtgatcctctgcagttggcccggtttcttttgaagggcccgtctccatgtcagttggcttggagtcttttccagaaggatctatgtcagacggcttcctacgaatttgagttatgccattagtgctatttcaacagtgggtgagcagcaatacaaggaagatggccaaatgatttgtacctggaagatttcctgattttcggcatgggatgacgggatgttttcttcttcggattggtttgccttggttgttttccagtcacctctttattgccagattttccagcatcatcgccctcatgatcactcagaaccaatttcctcttgcgggagtctgactggctggctgatttcgaggtgtttggttgagtatcagaccgaatttttggtcctccactcgcctgaccagtctgccggcaaggtgatcggtgttgagcaatgccccacgtcctgataaatccatcccgaaataaaaatcatcttctaaaaggaataatagaattaattaaaattcgaaaagaaattggcaaacactaaaatacgtacaagaaaaattcaaatgtggcccggagaatttttgttaaattctccttggtctaaaaggagccctcaaattttagtgcaattttcagagcacaaataataattgaaaagaaataaacaaagttgaaaaggtttataaaaagaaaatcctaaaagaagtcttttccccctcctcctcccttcttgggccggctcggcccattccttccctctctctctctctttccccccggcccatcggctcctcccccgtgcgcgcgccgctgacaggcgggcccgcccgccgctctcgctgacgggtggggcccacctgtcatcgccttcctcccgccgcgcccgccgtcgcgcccgtgccctagcgccgccgccgccgcggattgcgccgcatcccgccgtccccgcgcgcattaaagagaggggaattactccccgcgtttccctctcccgattccccctcttttccctctctctctccctcggattcgtccggattcatcccgcgaagtacgccggcgtcttcaatggcgcccgagatctccgcgcgcgg

SEQ ID NO: 16766 - DNA, 1135 bp, Oryza sativa
cttgagggtggaagagaaaatacgccatagaagaaatgagaaaattccacgacttcatgtgtggggggggtcgggaatgctttacccaacgccggatgtcatccaatgatctctttgcccggagaacgccgtgcgccaccttctccttcaggttcttctctgttacatcggagggcacccactgactctcgaagctttctctctcttctgccatgaatacgaactggatgatgtgatttggtccgagatatggctgggaatggatgggggatcgatgcggtggttgcacggaaggtttttgtggagctcaagaggatggatcggagtggatttgttaaccctagctttcgccgttgtggttttgcactgtagcagagaatggggaaagttgcgagagtttcggcggggaagacgaaacgacgctctgacttcggcgtttatttcgctagggtatcaggagtgctaatgtgcctgggcctatacagtacttgtaacaccctgaaaattcgacgacaaaaatctaaactctaaaaatacggattttcaaaaactttttaaattaattgcatcatgccgatcttattcgcctattttatttgaatttgatctcgaagtttattaatcgtgagtaaagattagttgtggataggaataaataaagtattatcgcgaccatatttggatcaattaaatttaaatatgatggaataagaattaaccctaattaaaaattcaaataaattatataaaaataaaatatgagtaatattaatctagggtgaattcattagttgagataacacaaatattgagtaaaatgcatatatccaaaaattaggaattgtggaatcaaatttatatgggaaatacactaaaatcgggataaataggaaaagccactattcattgccccctaggtgttcggtcgcgttccctagccctagcccctactctgccgcgttgccctcgcgccccgctcgccgcgcgccggtccgccttccctctgccgtcgccgtcgccatcaccgcgcgtgccgccgtcgtctcgccgcccgcccgtcagcatcgccacctgcccgcgcgccgacgttaccgagccgccccgagcccgcgccgacgccccgtgccgcgcgtgc

SEQ ID NO: 16767 - DNA, 683 bp, Oryza sativa
agtcgtgctcatgacaattaaggaccggttcgcgagctactgttgtgaaacatttatcgtgccaaccacaagccagcgtgggcaacggctttatcttttgtgtagcgtgattcattatagtgcgccagactgagaagtggcgagaagtccacgggggtagctggggagtccatgcctctggtttttgagggggtgattatgatccaggaaaggtgcgctgtaatgggttatgttgtgcaaggggtattgtcacaactcctttccgaggtaccgtggtggtattgaggcacatggtgacatgatgtggggttgtgtcttgtgggtacagtggtacacctctggccagagtaaaactattcgaatagccgtgcccgcggttatgggcgggttgagcaatgtttttcgtgattagtctcacacctctcacaataattatggatgttaatacctgataataatttgcttagctcctggtttggagttagatctgtacagccgggtatggttgttcaggatggttgggcctgtacagcatgggtgtgctgttcagtgttgattaaaatttttaattaattactctactgtttaaaaactcttaactctttgctaaatgctgcttttgcaaatgagcctatattatgccatcctttggaatgggtaccgagctcgaattcgccctatag
